United States Patent Application Publication US 2025/0297208 A1 - sequence listing, part 14

SEQ ID NO: 2788 - DNA, 44082 bp, Xanthophyllomyces dendrorhous
cctgtgcattcgcaaccgagtagtagccgagagggcgcgtatgttcgcggcggagaaagtagcgaagcaaaaaaaaaaaaaaggcagcgggaaggtgacgctaaggaggcgatggtccagacggccgaacgtgttcggatactgagaagtgatggagagatgtcactgttctttgtgtttgctgatgatctgctggaatcgtatcggtgtcccgcaatatcgtgacagtgttggtttcatatcgtggtttgtctactgttgtttgggcgttcagtaaggcagatgaggccaagacatctctgtagttagtcactcgactgaacttcatcgcgtcacataatgtaggagactctgatgggaaacagacacacccatggacactccagtggaacatataaaacagcagcagtcagatcaggtagtaaaagttctccatcttgtcctgatccaacccactttctactaagagagaaaaaattatacaagcccattgtaaaatcccttcaagcgcgatgtttacccaacatccctctgcacgtgactccggctctctccgaaccttctccttggtcttgttccttttctccttctgtgaactcggcagcgccgctagcgttccccacgttcagtcgttggcgacatcctcgttcggcgacgtccagtggcacgcctgtccggaagcgccaaataaccctaggtttcagtgcacgacagtgaaggttccgctcgactacacccaaggctgggaggcaggtgaagcccagatcgcagtcaacaagtgggtcgcccaaggtcctaagcacggagacgaaaggaaaagtttgtttgtcaatcccggaggtccaggaggggccggaaccagtcagtcctgacattcctcctgatctcatcacagtgtacttgtgcgcgctgcgatagaaaactgatagtatcgatcgaatgtgatggttcgcatgtttaatcagtgttcacttatgaagtcgctgctcctttgtcagaggtgatagatgatatgtatgatatcatcggtaaaccccatcttgacatctttactaagtcatccatctagcctaacctctagtcttttgctcccgtattggacatgcctgatgttgaataggattcgaccctcgagggatcaacaacaccacaccaaagatgctgtgttttccaaatcaacaaactgagacgctgtaccaggcctccttaggtcccactgtcgatccttgggtcggaagagaggagctgagaaggatgatcggcaaagccgacgcagagaacatgatgatcgaacagatgtgcgaagcatcgagtcaagaggctggtagacacgtaagagattgactctactctatccctgttgttcgaagaactgacatgaccatcaatccgtgataatctttgtgatagatgagcactacaacggtcgtcagggacctcgcctttctggcagaattgtttaccggaagggatacccctatgtgcgcaaagatcagtcttgactacagtgcgtagccaaaagaaggagcctagttgctgacccatcctctttccattacagcaactattacggggtcagttacgggtctgtcattggagaattcctgtaggtgcatgttggcctgaactactgtaaacaaggtatgaaaagaacatgagcgatgctgaacgctgatctttcaatttttttgaccgatcaggatcgggatgttccctgatagggtcggaaacgtagtgattgacggaagtgcgtaactcttgctgtcttatgctgtttctgttgtcatgacaagaggtctcaataacgggtacatgtgcgtctctcctgtatgcagtctgcgatccgatcacctggagggagaacgcccatcatacgtggagtcgaagagttcgtatctactacgtaatcgtgtgcgcatcttgatcaaacaaaacgcagtctgactgagaagtatgtgcgcatgaattggttggtataatctatacaggacttgcttgataccgataagacgtacatggcattccttcggagttgcatcgatgtgggtagtttttgttttctgtgatgatcatatactatgacgggaaaggtatgaatctgattctctgtatcccgctcgtaggctggacaggaacgatgtgctctcgctagtcagaactctaccgtcgagtccctaaagtcagatatagacgacatcttgaaacagatggtcggataccctctcgtcgtcaaaggcatgggcgtcctgtactctgcacaggtagatatcataattccattgtaggtagttggagcatagcccgccagactgaccactctatcaattatgcgtcacaggttcgacaatggatattcgcaaacctcttccaaccttccggctggtctggtctcgctcaggttcacttcccacctctttgttaaagactctcttattgcctggtctcagatcgttctgctgacgaatcttgcatcgcttcatactcttcgctatgttcgagaacagggattgtaagatctcatccagggaaacggaacgctgatatttgagtcgacccagtcgatgattgagctagacccaaagataccagcatcgactacattcgctaccgaaggtaagcgaccctcttccccttctcgttcttaactttctacactaacctgtttgaacgaaacaatcgaaaacaccaggcgtggagtgtacggatgcgattccctacccagaaaatatgacgaccgaagctatcgttgacatgttgaccgacgaaatgctcttccagatcaataatatcagcagccgttttgctggtctgttcgtcgacaagtgcctgaggtggaagatgcgggacgcagatagagtgaggatattgttatacatctctcttatcagtctcactagatagaccactgacaaaaccggacttgccgtctcgcgctcgatgttcagttcactggcctgtgcgtactctatccagggtttgcgcatttctgtgtgctgcacatccgctctttctattttctttctccatcctgtcctgactgtatcctccgtcctctttgtatctcatggcattccacccaggatgaatcaaacgctctcgaacgatatcctcattatcggtaacactgctgacccaataacgtcaatcaaaaacgcccagctgctgaacgagatccagccgatgagtcggctagtccatcatgatggatttggtgtaagttcttcccttctccaccacttcactccttaactttctatcttccgctctccataccccacgcgtggccttccgggcaactatttctggaagcggactttacctgaccccgtttatgtactttgacaacaacagcactgctcttacgtcatggcttcggtacgtgtctctttctatacgcttattccggcccactacgtcttccaacctatgtttctcatcgttcctattcttttatcctcataattttcaaattctcatgatactttcctcacgcatataaacacatatgcacagctctgcacactctcggctatgcgatcataccttatagagaacatcctcccacccaacaacctgttgtgcaagcccgaccaggtcctcttcccgaactccaccgaacaagccggcctgaccctgctgcgacgagcgtctgccgacagcggcagacccagtgagcctggcgagactggctccgaggagaccaggctgctttctgcgcttgtcgagatcggacatgctctcgaccggtcgttcgccaggagaaggtagacctgtgaggagaagacagaccgacctgtccgctccccacaaattggtcatcagtcctcgtcagccattgccagccactgtcagctaccatcggtcaccatcagccattgacaacaagctggccagctcgtctgtctgtctgcacttcctggacgcaattttctattcttgactctcctttcctctgccttcctctccttcgtttcctcttgttgccgtgttctcgcttcccttatctcccttttcccccttgcttcccttgcattcccactctcatctacctctcatggtgcgcctgtgtatcggtatcgatcgtgatcgcgggtcatgtgctctttcaacaagaactcgactctcagatgatctatctatctatctatctatctatctatgattcattgtcacccaatgatagaccagaagtcaagaactcctccagacatcagaaagctcatgggctggatacaagaaaggccagaacactagacagatggccatcatacggctcccgcgtaagcaacccaactcaatttgacctgatccaatctctaacaactttatcgaggatttttgttaccttgcaatgtatcaattttcatcccttatttgtttcggatgatagtcgttttggtagtatgtctttcggcacgttgagtgacgtcacttttcgtctacttagtcagctatatcagtttcagccagaccgtctcaccatcactccgttcaataaccataagaatctgaaccgctatacacaaaaaaaaagaacaagatcaatctcatttatgaagcctgttaacatctcaagacgatccctgaattcgttgcctcggcccatctcgaccaccaactgtgggaaggtcttggtaagccgagcggcctatattcgatcgactcacacgtcgtctgcttcgaatgcacaatacaatcgattcccgaccaatccaaacttacctggtcggattcaaaaacaacctccgatcctgtcaccgttccagactgaagtgctcagcctaccacctaataagcctggagatgatgggaatcatcagcagaggaacagacgtgggggaggtggaggagcgggcgactactggcaaagtctggacggtaggaccaagttggggttagttggtctcgcaggagcaggaggttactatgtctttcagttagtgatatactatttggccgcgtccttccacacgtgaaaagtgctgacatgcattattgcgatgtgtttgtctcttgatagtctcgaaagagcacctcattctggcagactccggttcatagacgtatctcctgcatccgagaagcaagctgggctgcaaagctttcaagaaatgatgagcgaatatgcttcaaaattattgcccgagaaccatcgaaccacccagtatgttcgtatggtagctgcgaacattgtcgaaagcaacggtctgggcaagatgaaaggtgcgaagtcagtcgcaggaacaaaccgagggacaggatgggatacgggcgaagctgagagctggaaagaaagccaacaggaagaggttgaatgggaggtatgctcgatctcacttgatgttgctgttgaaattactggtgcaaatgtatgcgagccactggacatcgcttactgttcatttgagttgcttttcaaaggtgtttgtcatcaacgacaagaatactaaaaacgccttcgttcttccaggtgcgttgctgaactccttccttgtcccaataactacgtcgcgaattaattagaaacactgaacctcgtccgtatacctcaaaacaaaggaggaaagatttttgttttcactggtatccttcctgtatgcgccaatgaggcgggtctagcttctgtgctaggacatggtcagttcattcatcttcttatcacacatacgagaatatagcagacactgaatgaagagtcatctatttaaccagagatcgcgcatcaaactcaacggcattcggccgagaggatgtcgagcttgaaagtattatttgtcctgaacatcgtgttggaaagtctgggactcgatatcggagtgtcccggctgctactcacttttttgctttcgtgcgttttctccgctctttgtaccttttgtcactgtttttgtgtataaagaccatattaacaaactctgttgacctcatgttttgcataggctgccaaattcaagaacggcagagagcgaggcagactttgttgggcttcgattgatgtctaaagcttgttacgatcctacagaatctccaaagtcagtttgatatctcttcgtcctccttaccgtcctctgaattttaccggatattcgaatattgtcttttgctaatctatttgtctcggtttgatgaatttggtacatgcctacaaaggatgtgggagcgaatgtccgagatggaaacgggaaataaatcttcatttggcggagcggccaacattgatttcatgtaagatcttcaatccaaccttttccttggttctcacgtcccttttcttatgtgccttcgacttcaatcgattcgggttttgttcttttcttcgtaggagcacacatccggcgaatggaaagcgaataaaggtaagtactccttctcttcctccttctggttcacaacagaaacccattcccaagatgaaggagagtttttttttccattgacctctaataactatcttccctcccatccaacagaacattgagggctggctaccagaggtaagaaccacacttgctcctccttcccgcctgtcctcctctaggtcgatcctcacctctttgcttcttcacgaccccaatttttcttcttcttgcgcatattgttcattggattatgaaggcactgagtttgagagcaggatctcattgtcaacaaatagacgactttcaatcacaaatgcccggtcttataccaggtggtcgattgagcgcttggaattagatgactcttccaattgtttcttttctcctcatgtgattcttgattccttggtgctatcttcttgcttgaacttgtcggtatgaatgacccgtttcttggaaggatcggattgtagcggaaaacatcacaggggagtgaagcaaaaagggcataacgatttgctttctgaagaataaggaaatcgataacatgacataatctttcatttttttaaaagacgggaaagaaacaagaaatacggatgacctttacggttgtcgtcttttttttgtatatcagaagattatcgagggataagatgaaggacgagaatgaatgtaagagaaacccaagaaaaaaaaaggacaacagacaaagcaagacagaataaagacaacaagatgagtaagagatcgagagttagagacaaagagaaagaaacaagatgacaggtgtagggttaaagtcgagtaaggatgaagaaagacaagatgtagtattatgcgtgaatatttttagtcaagattactctgaacgatgacgagaacctacaatgcgcgatttgaaattgagaagagcagaaaaccgataaaaaaaaaataagataaaaccgaaaagaagacgaatggtatatagaaatttgaatagtaagaaaagggggcataagtattttcaagaaaagaaagaaacaagagagcaaagagaaaatgtggaaccacaagacagacgctttcttatgtcagtcaactgtacctagtggccttccctttccctttcattgcttcctttgaccgagcaccatctgccaaaggcatgccgtcaacgttgacatcgctcgaaccacctaacgaaaattggaagaggttcgttgggtcaacccgctttttgatctgaccgagtcgtttccagttttctgctccgtaagaagaagcaacatagactgtcggagagttttggttgatgaactaaatcgcaaaagaatagacaggatagccgtcagttcgcataggatgaaacgagagaaacaaaagtagatagagagacaaacacaaggaataggtcctccaacgctttcaggttcgatgacttgggtgatccaatcatccgctgtacgcatacatcgttcgtcctcctctggtgattcatccaccggccattgatgcaaggcgaggatattgaactttgcagatcgacggctgagcgggaaacaagtttcggcattatcttcgagtgctccgcctgctagctcaaagagccaagaacacccgtcaggaatatccttgaacatgcgaatggtatcatgaatgatttcatctgtcagcgaggacagaagatcactcttgataaaccattttttgctttgcccgccccgaaggacattcgctattgagttttgttgttgaacaaacgagcgttccatgacatccttgaacaaacatctacgcaaagtcctcacaacctaggtcagaccagtaataagccagaatgaagaaaagaggaacgcaaaaaacgtactgttccccagtccaactacagattgcctcgacccatttcgtgccttcctccatccctccgttccaacaaagctgaatgataacaactgctcctccttgggagtctttcagacgaccgttcaccatgtcttgtacgccatcgtctccatctggtccagctgtaagaatcaaattggcatacaacttccgaggagcagctttgacgcagtctcgataatgcttcagcaaactcggggccgtctgagagcagatgtgagaaaaagaaattcgaataaaaaaaaagacaagaaaacccccctccgaattgatgagctcaaaagagaagaggagaaggagattaggcagacagacgcacagctcgattgaaagggaagatgatgttccccgaaaagacgactggaattggataagccaacgcagtgtacctagtaaagattcctagggacggcccgaatcctctgatagcccaccagagctccggatcggaatgctcgttcaccacctggatcgatccatcggcaagaaccatctcgacttcgaccaagcagtcgagggagaggccatattctctactaaggaaaccgaaaccgcccgtagtcatcgcgcctgcgccaacagggaaggcgggaagagggacgtgataggcgcctaatgaggtgctcgaagttgcttcatcaatctctttagtcaactagcggttccggagtcgagagaattccaaatgtcaacgtcgagaatagacaaaagaacgagacagagagaacaaagaagaaggagaagaagaaagaaaagcttaccagtccagcgccaaaagtggcgtaagctctactcggcatggttgccgccctcgaactggacgttattgaatttcttggataaaagaacggccctaggtgagctccaaactggttgactaaagcggaagacgaattgacgttattgtatggcccggtcgatagatcgatcgcatcatcgtaagccccggtctcggggacaggtcgaccagtggaggggaatgccgagtaagcaatcggcgattgggttgtaatggtggaagaaagaacagaagccgagggcaaggccggtgtggaggactccgaggaggaaaactggggaaggttcgatagtggaggcagaggaatggtcaaggaggaggccgagtttgagagtgtggaactgttgaatgagaacggtgctagagaatcatcgaagttagggttcgtccatgtggacgtaaatggcgaaggagaggatgaagatgaagatgccatgaccgaagccgagtcgtggtcgagcagagtataggacggataatagtatgattgagaaggtggataatgatcatgcaggaacggcatgttcgttctcaatgttgaggaaggaaccgcgatcgcctcatctggggaccgaacgatcggatcttcgtttctcgccgaacaacatgcctgtatgaaactctctggttgagggtcgcgcgacacatttgatgagtgacttcggtgccttccaattcgaccccaaccagtatcatctctcgctccacttccagcatcactgccactacctgacgagctgcctccaacgtctccgttgccacttcgactcgcactcccgcttccgcttccactcgcactcgtcccacttcctccgagggtgtagtccatgcttgacgggtcaaggatcccttcgaacgcatccgtccggtttcgttttcgagaggaatccgaagtctctcttgaatagccagagaccttgtcgaccgcgagagagatgtgggtgtcatttacattggggagtgaaagcttgacgccgttgagatagtggagatcgacagtgacttcaccggcgatagcccagccatgtgtcccgtatcctccgcttttgacagactaggtcagagggaagaagaaagaggggcgacaagaagttgtaaatccatcgagccggacttttagaatatccattggatagatcaaggcaataacaagaggttctgaagggaatgacgtagcgaggagcttaccagactaagacccgtctcatgacagaatttgaccactctaccaggattcaggaaagacagatgaggcagagagaaaaaagcaacgtccatgaaatcaaagaagacgatcgtgagcagctgtccatcttaaaacctccgacctggctgagaaggaagaattctaaaggctgggagaactacagctccaaagagtactaccagagagcacagaggagaagagacagaataaaaagatccggggtacccacttgctaacatcgtccgcatttctcggacgggcaaccaacttggcagcactggccacgttggagttgaagagcttggtgctttgatcgaaactttgtgtatttcaagacgcatgagtgataattgtccgaaatagaaatggtggtggtacgatttgagtagagaaaagaaaagagttggatgagtgagttagaacatattcgagcatgattttacatcttgcacgaccacaaggaaaagtcctcgggcagacagaaccaagtacacttgttaaaacagggactagcagtggataaaccactgaggccaaaaggtaatacaggataccaaggaaccggagacgagaagcaaaaatgaacccaccacttgtctgtagaatccagaatctctccggcgagcgactctctcaatgcggacaccgctgcttgatcgatttgtttttcaaccggtgtcgatctcatacctgttgattgggtggatgatatatgaacgagcttctgaaagtgtttccgtatacgatgtggatgaacaagtaaacgagggacgcaaaacgagaggagctgtggaactcagaacgggatcgggtgggaagcaagcgagaaatcaaatgccgaggcattgcaggacaggaaggactcgcggaacgggattacgtagggacgcggtcacgtgagtgtgcactgcactgattccttacaggtttgggacctggtcataacactagactggccctgatcagggaccctttcaacagtatttattatttttgatgtaccgtttttctggcgaacagtgatgtccttccatgttccattcaatacttgttgctcattgacgtctaacgataggaagacacgttgatcttttggtcgattgtcttctctcgctagtatatcttttgtttctatcttttcactcctttttattttattttgttgctctcttttttcccacgcccaagtcaaggtcttcagcacccatcgattttttgtgagaacaaaaaaaaagatggactcctacgctccgaagaactgttacggccgtggcagactgaacctccactttcacacttcagtcctttttcttttttcaaaggagagagagcctgtcgcttaccctatccatttgatcggatgtttccgttctggaaactacctgttggactaaaaagtttggtctctcgttctgaggaccaagcgaggggtcctgtgggtggatgcgaatgttccctcagagttgatccgagtttcctcttggggggctttttgcccctaagaaagagtcaatgtcgagggtcttagtttcggaatgcacatctctttcctgccgtttcttatttgattttgaatatttatatcaatgcatttgcacacctatcgtttagctgtggtgacggtttctgggtttgttcctacagaggaatccccagatactgccgatagattggttgtatgttgtataaacgtttctctattagaacgtgaaagaaaaatacacgataaacaagacaatagaaaacagatatcgagaacgagcgataatacaaaagatgcctagctagcaacgcgaaagaatgtgtatgtgagaatgaaagaggagcggtcgaagaccggaaattatagcaagaagatcaacagatcacacaaccacaaccaccaccttccctgcccacctctggctcgcctctcgacctatttgctcgtatgctccccgttctcctaccaacacttccaccggtcaaggtggctgtcaacggatgcgtcctcaaacggttatggttgctggcggacagtattgcgttcggacccaaaggcgggactacggactttgtatcgacttcaggcgtcgaaaggggaaacattctgatcgaaagatggacgatcgtcggttttagacttggataaatctcgtttgctgaagattgaaaagtctccaaggtggtcagctcgagctaggggtgtgtgtgtgtgtaagtgaaagcgaccaagtgatgagtaagaattaactaacaagatagcgtagatgcgtcatcgaggatcttgccccgatatagcactcgaagacacgaaggcgacgccggaatcgacacgtccgatttccagtctacaatcaaagagacataccaagtgagcagaattggtcagtcgttaagtgagtgaacagacaagagtacacgtgatgacgaatgacgtgtgcgcacctgatggccagttaaaaaacacatgttctctataaagagaaaggtaagaccgagcatagagaagaagaagaagaacatttagtcagaaaacctctcaaggaaagatggtggctctcggagatgaagaaaagaaatgacaacttgacaggccaacgaactcacttcacgcgtccgatggaagtttcttgagcaaagttaaatgtcttgcgttgaccgctgatgacgagcacggtgatcgagacattagcattctcattcgccggtccagaaggtggcagtgttggacttgtaggtccggtagagtcgtccgacatgaccgattgtgatgatggtagctgatgaaggaggaagatatgaagaagaagggatgactgaaaaggtgagcgaagctaccgaacgatcgagattaggtagaggtgaaagaagaagtgaaggacacaaacctgtggaaggggcggatacacggacacgatgggtggcaagcaatcaacgactacgcagattacgcggatagattaagggaagaaccggtcagggcgaccacgataaaggggcgactgataggagaattgagaggatgtgagaggatgaggggtgagaggaagaggggtgaaaaaagggggggataaaggtacagatttcgggcgatgatgaatggttgagagtgaagcggggtgaggtcaggacgatagcgttggtctcgatcaagcaaaacgactggaaataggaccaggaatacaggaatacaggaacgcagcggcccgaaagcttaaaggctccgaaacccagcgggtgaggacagactcgaccaccaagtggggcgagcggcagtgccgagttctgggctgacagagttacctagctaaataatttgggttgatcgataaggcttagacaaacactatagttagcttaacaaaccgactaagaaacggaccattcgagtaacctattcgtaataaaaacggccaggaacggccatcggataaaccgatcaggggaaattcgaatagacagattgacccggtttatgctgaggaaaacatatcggaagctgctccgattcaatcggtccgaaaaaagaagaaggtgtgccgaattcttgccgatcttgtctagctcgtcctcggcgatctcggcatcatcgccagagcttcttggcctgtacacttgttatctttcttttccatcactgtatccattccattcgccagacagagttgtcagataaactcactggctttctgatggaattaccgcctagagattcgtctaagacaagcactcgtcttacaggtcatgccatcctttcaaaaggcatcacctcggccaccatatcctcaaaagcaaagataaatccgaggcgatcactttctatcactgtgcctggtccttcacaacatcgcgttcgcgaggtccccttgacgaatgctacctattctcgatcaagaatctctatagatgaacttcccaagtcttctcgacgggcttcgattgtgtcgttaaagcctttgtccaagtcgactgcgacagtaagagaacctgaatcgagaagagatattgagaagctaaaagcaatcacttggtcggctctagtctgtcctttctatcataccttcccattgtatttcctcccctgtgtgctgaccactttttcccgctcgcccagtctcaaacgttgcctactcttagtttctcttccctctcgtctgcttcttctcctccatcgacccagttagattctgatgctgtagagctctacctcttcctgtctacactgcaactccgactcgcagcccacgatatatctacttctgtccaaggattgactcatcagactgaagaagaattggcaaagttggaaaccaccattgggatcaacatccaggatgaacaggtggaaaatagacgagtcttgtgggaagcgttgacgaagcgcaatgtatgggtttctttcctttctcttcccagtctctacccctcccagaagtaaaacgtggactgatcagaagttgaatctagtttgcccaccgattcattccattgctacatgaactatctttcctgaacgcttcggccgatgcgttcctcgacgcatctccacgcgagccggaagacgacgggaacatagacgagcgcggatcgttggctcgatcggaagatcttcagaactcattcagtttcgtccatttcggcatttccttctactctgttgactattcttctcaatggtttccctcgagtctcaacgtcgttgttgtttttttcctccttttcgcgctcatagaaagaattcaaacgaactttgaaggtctcacgtctctacctggtcttactgaaccaaacccacaggtactacagaaccttctcgagctctacattctgtcaatcacggataggatcgaacggctcaagagctccgatagagagacaagaagaaaacgacaggaaagaagacagattgtttgggaaaagagtttggagatctctcaaatgacattgaagtgattgagttttgaaatggaaactgaattattgatctcttatgacagaactaccgcaggaatctttattgaataggttggctctgagagcgcatgtagcatccctgtactctatgtttatgtttgttggtctatcactctttttgttcatctatctttttgtaaatatgaacaaccgaaaacgtgaagaaaaaaaaaagtaaaagaagacaaaagagggggtttgatcggtcctagggaaaacttgactgagaggttgattggtcgtttggatcaagacccatgttgagcatgaacttatcaattcgaatacaggtaactaaatgatcagttcatcgtttaaaaggaaagctggagaactctaagaaaaagtctactcacagcatcaaagtctagatcccatttaggttcacctactccctgaccatcaaccaccgaccctacgtctccgccaacagacgtaaacagattctcaatcccaaacctgacaccaacccccacatcaggttcagcagaccaagaagcataatcgccgaaagtcgcatttgggtctatcgagaacgatggttgggcagctatggcgtcatccagtgtcgttgggaaatgatcatattgataatattgatgtccgtgggtctgagtttcgacttcaggctgttgctgctgttctcgttgcggttgacctggggtatgcgggctcaagtgagatggtaaagatgaagagaccgaaacttgtggtgaaagaagaggatatggtcccccttgagtcgcggatgtcaaggtatcatttcctgttatcggaggttgcgctactggtttgaacaaagttgaagttgaagtggagtctacatcgttgttgctcctcattggatcgttgtcagcgttcgtactggaatttttcgagttccctttccgatcccgcttcgtgcgttgtacgtttccatcttgggattgggctgatggacgtttcttcggctgtttccgctgatgttgttgtccagatccagacacttggccatctaccgtttttctcctcgcgttctcgcctatcaaatctaggtcctcatctgagtccgccggatcggcatctacgcctggtagaggtgttttgagagcggatcctcgaagtcgggcctctgctttgttccgcaatcgtttgagcaaaggctaagacgtcgaaaagagaaagagaaagatgatcagcggtgactccgtatagaggaaaaatgatgagaaacgaaccagctcgtctcttgctcgagttcctactttggcgtcttcaaacagagaaactcccaattctatttgccaaaggtgagcacaaatattagcttgaactttttgatcacacttcgcatccccagacttctgaaactctgattttcttacctatctcttggaaggctgccaaagccagtgaagaacccggctaaacatcaaagaatgactgaaaattagtaacaacaaaacagctaaatctcaaagtcagacgagtgaaacgaaccgaacggatcacagcgaccgataaactagcgatagcggaaaaacaatggaaccaaaagaaccaccatctgctagctaatgctccgtgtagcttcatcaagtctctcactactgagatgcatgccttgcacgattctaactctgctacataactctgactattcacacagataagccaagtttgcagcctcgtcaggaattcaacgcataccaaaccagactcgaccgaaataccagggaagaaagaaaagaaaactcacttccattttgcttttagaggttcatcagggaaatctctcagcgctctagcgaaccaacctcggtgcaggaacagcagacactcgttctatagattcgagaacatgccacagtcagcggatatttctccagttggtttgttccgacgatcaaaaagaaaagtttagaatggagacagactatgatgagaagcatgctgtgtctttgcaatattcgtttcttatccgaccatccttctccgtccgttggtaaaacacacctgttgtacaacagcaaaggaaagccggtataagtgccatgcttcataaactgaagtcctggatgaacaggttaaacaggaagagaagagaagagaacaaagaccactcacgaatcctcgccacagtgcagctcagctggtagctgcgtcctttcaaagattcggatgtcccggtcaatagcgagtacgatatcatacgtaaccggactggtctgagtctgtaaatcattaatcctttttatgatggacaagattcgatactaccgaggagagaggaaaatgtgttcgaaatctattaagtatttgcatattcgatattgaaagacaggactgatggtagtaaggtgaatagcatactttgaattgatgaactagaacagaaccgatgtaatggatgattatgagcaccagatcatcaaacacaatctcaatccagatcgttaatgagacttacagacgtctccttcgtatttttgaccgtcgggcagaccacttccagggtatttgacatccgttgtggaatcactcagacctgggaatagtacaactcagaggtcagacgacgaccaccgcgccacatccatcgagacacttacatcgaggccgaccgaatgttagtgattgaattgcatccaaaaacgaacactacccaatatcgaagtcaggacatcatcttcgctgtcagtaatgaatattctggtagaaagatgtcggagaggataaaataatgaaacatacctcccaaaataacctccttctcatgtccacttcggcaggatcaagtccccatctcgctccatccctatgtaaaccaacctaatttgatcgaataaatttcaggccgcgttagtccagtagaaggataacaaagacctgaaggacagcaaacacgatccgtacagctgtgagatgtttcatggctaatccaagtaacggccagaattgctcgcccctattttggaacattatgatgattaaaagcaaaacgttgcgaaaagagatgtcgtttgattgtgagatatgaagattcagttagcgtcagaggttttgcctgacttacccagaggtggctttggttccatttctaacagtagtgagaatcaaacggtaagttgcggaagaaaagacttcaacgtcggtactaaaccttaggtttggaaaacaaaattgaaaaagaacaaacaataagtaggaacccatcagttgaatggcttgtatataagcaacggatcctgatgggtctacgtcgttgcattttaaaaaatcgaagcagagaagaaacagctatcagccatctgtgtattgaacaacctttgataaagatggcaagaaacttactgattgcaagacataatttggcaaggtcgcagtaccgtctagctcgctgattaactgtttttcaatcaaattcagatccatcatccaaataactgttcgtcagtatacatattacgtttggtgatagctcgataaacacctacatggtggattattcaaatcgaatagtgccccaaggcaaaggaccatgtagaacacggcgagcttgtggacgttcatatgttgaatcgaggttgatacagttggagaaccatagacgtaagggaagagttcgtcgtcgaactctcgtttggagatgacatcgtacatccacgacccgttctagaggagagaagacaggaggtgacgagagatagatatgagtaacagagtatattcaggaggatctcaaacttgagaaaatggccaacgaacccgccaatagacttcactcaaaccccaagcctcttcccttgtcggtaacatcccaaccaaccattcgacaccgggtctacctcctgagggtcggacgaatccgagagaatcctgcttgaatgggaacatatcaaattggagggaagtgtgatttgctgatgggtttggttgactgcttggctctggagaggcaggatcatccggctgtaaaggagacagtagtgttttatcgatagaattaagcgcgaagcttcacggtgatagattgtgtgattccagatgtactgaccaacaagtaagccgacccagcacttccgccgaagtaccgacttgcacccggttcgttccccattgtcagtcgaccaacgttttcctccccaacatctctcgtctcgtgtttgatgcgagtcccgggtatcggcacaatcggtacaccatttaacgagtctggtgttccacccctttctggtgagctgcctctctgatcgtcatccgcaccgggtcctgaactgacggtcccaggcgcaggcataggtgagtcgttggcgtgtcggtttccatccaacggctcgaaatggtaacttgattcaagaagtggatgtggattatctgatcgagtgagcgctcggtgagactggtcgagtgcggtttcgagagctgatattcttgcatgaagttgcgtggtgttggcgagaatcaacctgtgaacagatatagatacgttcggaagaggttaggtttgtcatcaatccctcatgaagagctgacactggtataactcatcagacaagaaatacgaaccgtttgcccttcccgcctttgagttctccctctggacagatggtgctgactcctcgcttcacacaattcgtacaaggccactctcgactacacttcagtttgagtctcctacattctgcacaactcaatacggccttctcagggtcgtgcttgccggatttgcctcccaatcctgcttgtttcgagccggacggcccagaagctacacctgtagaagagggagtgttgtgagaggaagaaggattcgttccaacggcaataggcgtagggatgttcgaggatggctggctggctggatcagacgactttctcttctttgataccggcgaggtctttggtgaatatcgatcggtaggctgacctccagctggacgtggtaatgtggggacagcaggaagattggttgggattggactgaggtgatatgatgcagagattcgagccctaggctgaagagaaagaagcgataacagagacaaagatagagtatcttaatcgcctgaatagtaacgaatgaataaagaagcaagaaatgggcttacctcggacgcattggccaagagatggagaagcgaagacgcaggcgctgtctcttccttcgaggagttttcttctgaaccttcttccatctcgttagactgcacctcaatgtgtttgtccgctacagagctcccaagaacggatggaaacaacacggcagtcaaggtagttgatctaaaaagatcataatgaattaagagtgagacgactgatgactgtgtggctagaaatgctgtgtccgggcgtgccggagttgaatgtaatcacgtgccattctacgccacatccgtcagccatctcctcttctctcgtcctcaccctcgctcagttcataccggttcttctcgatccgccgtatcaaacacattccatcttatcgctcaacatgggtctcaaagaagttttcctccctcaggtgtgttccatgtttcgttttactatagcgttcttttgatagatgctccgtgtgacagatcttcttttctcagaagggatcgatgtgggagtgctcgttcagatggacgcaaagatgaacggagggatgaccggaattgcccgatattaatcagcccattgactatgactgaccattcttctctacactttctcatctctgtcatctcactttgaaacatgtaggccgagagttataagcgaaagaaagattacaaattccaggaggtaagcatcgctgctcacgatttctgcttattatatatacgcggcatactcagtcgattgccgattgaaaaggagatggccgactcatgactgatgagttcttttactttcttctcgtccaacacaggaattaggaagaggtatcgccaacactcaccgtgcacctttgtttaggtcggcttgaactgatcaatcttgaatgaatctgacgttctgcttttcgctttctttccatgtataaggtacattcggaaagggtatgttctaatttcggatcgttatctctatctcattacgacggctcaagatcctgcggcgctgactatcatcttcactgctaatcatcttgaacaaaaagttatccactgcacatggcataaagctcctcctccaggttcaaatatccgggaggtggctatgaaggtaacgattcgttctataaagtgcgcctgactattacatcatctaaacgatcactcaatcaacgtctgcttccgctctctcctcgatggccataccgatcgttccaggtcatctccaagaaggctgttaagggcaatgaatcggatgtgttgaacgagatgaaaattctaggtgaatatgctcccttttcatcagattctctcggttcatcagtcaagctgacctattttattctactatgcatgtccggcagagggtctggatcatcccaacatcgttaaactctgggactggtttgagtgtgagagtttttcaaagcccttcctactccctcaggtcgttccttaatacgctgctgaccatgtatcaaaccgttatcctttcagcccgagaaaagtactacctctctttcgaacttgccgtaggaggagaacttttcaaccggattaccgcgaagggaaaattcagtgagaaggatgcgcaggatgttgtcaggtttgtcctcttcttttccacactgttatcagtagctcttgactcatcaactacaacaatgacaataaaagatcggtcttgtcggcgttgatctacctgcattcacatgatatcgttcatcgagatctcaagccggaaaacatcttgtaccactcacatgacgagaattcgaagcttgttttggccgactttggaatgtgagttttgcctaacgtgatgtctgttgtccaagaacgacgatgaagccgaagacaaacaagttgattacgctccttttatacatgctgaatcgcgctgaactagcgccaagcacttgaattctggagagaagctgcacgctgtcagtcttcacttctattttgttttcttacgcgcctccaatattgttctcatctttatttgtctgtcgctctgagttcttctgaatcaaggcggctggctccatcggttatgctgctcccgaggtccttaccggtgtcggacatggcaagccagttgatatttggtccttgggtgttgtaacatttattctactatgcggctactctcccttctcaaaccaggataacaacgaattgattgaggagaccatccgggggcgaattgtcttccacgagaagtattggaagaagcctagcgcagaatgtaagctagctcttctcgagtcgctcttttcaaagcttatctaaaggattgttagaatcgatgatcttatctcattctttcctctcattcgttcatcctcgaagctaaagaattcatcaaatggttgatgaacgtcgatcctgaccaacggcctacggcccaagaggctcttgatcatcctgtaagcgtccgattctttcatttgtcacttcattcaagattttttctcttttacttgaacggtctgctcgcttgaatctaacgtcgacaattgttttctgtttcccagtggctatcgtcacatctccctcaagatcatgatatcggcgaaggtcttagaacaaactaccgttcgacggccagcgtccgatggaaatccgcttacaacgtatgagttgatcttcttctctctcttctcttttttcttttcttggaaacttttcatgagaccaaaagtactgacggtcttcactctaggttattactgctaccaaccgatttaacgccgccggccaacgttctcgtcaaaattccttatatggcctacctcaacaggatggaggtcgtgagactagatctggttcagtctcgactgtatgtgacttgatctcttccgttttagtctgatatcccacggattgtacattgacgagaatgggtcgatgttcaccttctaaagacgagctcgggaggatttatgaccgccgacgagagcgatcatccgagtccccaacctctccagcgggagatcccttatgagagtttcgatagtaacgatcccgatgctgctaccctgtaagactatccctgtcgttctctgcttcagtcgttctgtttatatgccttttccctttctgacttgattggttgaattatatcgcggttggatatacagtaatcatatcgagacaaagacgggtgctctacagctttgagacccacgtgcaggaagaagagctctaggaagccacttttgtcggcttggtctatcaagctgtatgcttgctcctaccttgaattacaaactgtttctctcattcttcttgacatctcttcggtttgatgtttcggccttctgcttgcccttttatcgccaacagtcgattctgtcttcagatcctgatccttgtatatgtttttttaacattattcgtatatgatacatgtaatatattaggaaggattctctcaacccccttaaattgttcatgcgattggatacacggtctataagtgacatgtttacgagaccacatattgaaaaattacacgcgatggccgtacggtattggcttcgtatgaaagcaagatataaatgctcttttagataaaagaaaagtttctcttgcaccaacgagttgaattgcagcctatcgaatgagacttcgaggctgagtaagagagtcaagatgattcaaagcgaagagaaacctgaaaagaaagaaagaagggaagtgctaccgtcaacggtctctccctgcccagttcaaatcatctctatagacataccttgctcctgcaactaacgtccgtacattggcctgacctatcagaaataatgctagtttcttcaaggcatcaaactttaaggctttggctcgtccttgctgagtttcgctctccaagtcctcgcctgtccagtcctacccatccgttccaacacatcccccagcattcccacgcattcactccattcctccgttctggccttcctcgtctccctttcatccaatttgagctcgctttcggcttcggagagtctgtcgtggttgatgaatgtctgagctaaccgaagcctgacttgatggagtgaaggcgtaccgggtaggcgaagcgaatcaggggacggatcttgcgagaggaagaatgctagtgcagacaggagagggatcgattctggttcggctgacaaaagcgataggaccacaggaagcgataagaacggcgaaatcgtagagctcgccattgtcactctatccgctctatctatctgctcagaaggggagttaaatggtgaacggcagaaacaattgataattcgaaaaacggtaggtcgtttaagaacactcggagaagagcgggtcacgtgctggtctgtcaagtggctgggcaacgctcagccggtagatggcgccttaatcacctctattgggtacgaacaaagtgccaaccaaccatcatctcttttctctcgtcaatgtcagatataatccctaatctagaggaggtgaaggccactcagtcgaacccggatctactactcaacttgctagcgggttcagcaggtggcgcctgtcaggtcatcgtcggtcaaccacttgatacgatcaagactcgcgctcagacggctgctaaaggacaattcaaaggaccttgggatatcgctgttaagaccgttcgaaatgaaggcgtacttgcgctctacaaaggttcgtgtctactgtttctgttgattatgcgctttgtaatccgatcgagctctggttgtcaaggcttatcaacttgcgccttctttccgttttgccggcctcgtcttctttctcttccctttttttccaaaggaatgggtaaggcgtttgcttttgactcgttcatcaggttttgttccgtccgttcttctcagcatcgactaaactttatgaaatcctctcagcttcccctttgatgggtgtcgcagccgtgaacagtctcctttttactgcttactcgacagctaagaagctgatcagtccatatccagatctaacgatccctcagatcgctctggctggaggtattgcaggaggtgtcaattcggttcttgcttcgcctggtgagcgatcactcttgttcttctcatcgtgtctctctgtaaagatagccaagatgactaattctcttggcctctgtatgctaatatgttcgatcagtggaactattcaaggtgagtcaatcgtttccttgttccggtttgtaatcaacgtaccgaaactgatctactgatcttctaacaaccctcaagattcgaatgcagtgccaatagttcgcatcgtctttcaaatcaagcgtgctctataattctactgatccctccttcgtttatcactctatagtggaacatcaacggataagtcgctctcgggggttgccaaagatctctggagggattatggtttcagacgaggagtcatgcgcggtttcaagttctgtccctctcctctgcttccgtctcttttttacaccggatcaagactgaccaaccttgtgatcatttcttcttatctggaaccttgttcgactgtcaacagggtatctttcatccgagaattaccagcctacgccggtttctacagcgcgtatgagttttctaaacgaacgttcaagcaacgactttatccgcaacaagacttgcctgtctggagcttgctgttatcaggcgcgaccggtggggttgcatactggctggcgtcttacccgctggatctcgtgaagtcaaaagttcagctggcaaacacaccgccagaaaaaggatatatcacccgcgagctccgtcagatcgttcgagagagcggattgtacgttctttctacctgtcggctcctctataatttcccttctctgtttctttctttgttctcttgttctagacagttggttagttgactgactgactgatcgactgcgcttcctatcttgctctgtaatcgcttcgacctatggtgtgtatatcagctcgggcttgttccgtggactgtcaccaactttggtgcgagctgtaccagctgctgcttcgaccgtttgtcctttttcttctttctttcttgccttctttctcttctgccttctttgcatacgttcggtgcaagtatttatctttgtctcccagcatcagcgtcactcacatatggtcttcttcttccctctctatgtgtatgcatcaacgtcaccgggtgcagtttgtagcattcgagatcagcagagagttccttatcaagcatgctggcttttagaaaaggggagggattatgttcggtcaagtcgatttggtttgtctgggcagaacatgtactatggtggtttgtcatatattctggtctttctcgcatctactttgtagcccgttgttttttagatgagtcttttctgagagtcgagagtctgttgaaagagcacatgacccgcgatcacgatcgataccgatacacaggcgcaccatgagaggtagatgagagtgggaatgcaagggaagcaagggggaaaagggagataagggaagcgagaacacggcaacaagaggaaacgaaggagaggaaggcagaggaaaggagagtcaagaatagaaaattgcgtccaggaagtgcagacagacagacgagctggccagcttgttgtcaatggctgatggtgaccgatggtagctgacagtggctggcaatggctgacgaggactgatgaccgactcgtgggaacaaattgtctgtgaggtacgatcagatggccgagagcgtgtagagctgtgtttacgtgtgtctgtgtctatcttctctataaaccccgtctaggtcgaaatatgtcaagatgttctgttgggtgactaaattcaagaacgcctgaggtttattcgccttgtcgaccgcaggcgacacaacacaacatagcgggacaccgatagaatgccaacagatcatcagcaaacacaaagaacagtgacatctctatatctccccatcactgccaagtgtccggacacgttcggccgtccggatcttcgcttcctcagtgtcatcttcccgctgcctttctttctgcttcgctgcttcctccgccgcggacgtgcgcgctctctccgccgcctcgttctcttctgccaggatgcgatctcgctctgctttctccgctcgggcatacatcccggcttctccctcgtctagcaacatgtcttcgaggtctgcgtcctgcctcagcctagctacctgtttcatgtccggtgcatttctcgccttgctcactacccaggcttcatactcggcttcagtccatttccatgatcctctcccgtcctcggtcgggctctcgggcatgcccagtcgagttacgaccagctcactaatcgcctccctgagcgctcggttgcgaatgcacaggttccatctcgtctcgagctcgtctcctgctagtgtccccggtgccaggttgagccgaccagagttgtgctgcgcgatgagaaacaggatgagtgacggcacgtggtgcaggaccgacagaggcgacgtcgggtcgggcgaaagagagacgagggacttgaggatccgggttatgcgatggaggtgcatcgtcgacgagaccagatggcgggctgggcaggtggtcggtggacggagagcaggtggaaggagacaggaagagagaaagagaggaggagaagaggagaagaggagaagaggagaggaggagaggaggagaggaggagaagaagacaggaagaagggcagagacggagagagaaagagaaggtatgagacccggtgccttgagtgatagcatggatatgcagacagacacatagagacataggaggctgggtgggacgaacctttgtcttcaaagtcccaggtggggacaagcagtccggatgcggggtcgatcagccgtatcccgtacatcttgagagtctgatagaacgcagctcccctgatcttaacagctaggcattatctgccgctcatttcaacagatgtgtcatgggcaaggtccttggaggatcaagtgtgggatgagaagaatcttagctgtaaagcaacgccgaaaagcaagcgtctgagccttcttattcaacaacacatctgaacagcgagcgcttctttgatgatatccatgatcaatttctagtccgctgtaatctaggtcaattgtacgagactcagatctacttgtctgaactcgatgccattgcaacaaaacaatttagatgtttagaccagattaatcttcaaacacgaacagagaagagccacaagtaatgaggaacgtgtgcgcgcacaaacatcagaaactacaatatcgaggcatcttatcacagatgatgatgaggaaaacttgccagaatggatgatactcggttgaagcttctcgaaatcataacgctcagcttcaaaaggtgattgtgtcgatatgccgctgaatgaacttgaattcaatctattgatgcaagacattatatctatgtctttttctagtagcgctgatatcaatcgatatgggtgagcaacaacattgcctcgtattcaaaattcctacaaacgagccgggtattatcttgcattaaatctttgggaggtgatctacaagcgacgtgaagacaaccctaatcgctcgttacacgtaaccgtgctgttgacttcatcatcaatctcatcgaatagcaatcaccaacatccacccgcgtataaagatacacacacattcacagatggaactagataacccttcctttgatgtaatcgttgttgggtgcggcctcccagagtcaatagcagcagcgtgaggtttactcttgctttattgttcgtctgatataacaagtataaactcacgcttttgcccagtttagttctctcgcccatgctggcaagaccgtgcttcatgtcgatcagaacgactactatggagcagaccatgcgtcgttaactctcgaggagcttctcaagtgggcgtgccaaaggaaagaatcgcagctcaatgataacaagaacggtggcgtatctatctatctcaagaaccaatgtcgaaagttcagtcagctcgaatggatgttcgcttcggacaatatctctggtacttccgatcctgaccaattggatatcccttcactgcttcagaaagtttcccgatccttttctctctcgctctatcctctattaattccttcagtgtcgcccctgattgaaatgttggtggcgtcaggcgtctcaagatactctaccttcaggctgttggacgagacatctgtgtatgttccgatggagggaatcgccaagaaggttccaggcgggaaggaagatgtgttcaaagatcgatcaatcaaccttgttgaaaagaggagactgatgaagattttgatgtggatcatgggtgacttcgaatcaagtccggagcttgctggtttgtgtctttatcttgttctcgcctcatcaggagcaactgttcataaagatgcgcttccttgtccttcccctaggcaaagagacggagccatttccttcgttcttgaaaaccgttttctctttatctgaagagatggcttcttctttagcatacgctttggcgcactgccagtccccctctggtacgatttctgtcacccccttcagtcttgatcacgggttactctgaacctgtacctttctcttggacatacagatccaactctcccatcattgttaagagtacgaaagtatttgcgctcagtgggaaaatacggaaactctcctttcttgatcggacagtatggaggggcgggcgaggtcgctcaggggttttgccggtccgtatcctgtctcttcaattttcatctgatctcgtggatattaattcaatcaacttgtggaatgaaatattactcgaaacagtctttcagcagttcaaggaacgatttatgtcctttctcaccctatcgaatctatcaactaccctagtacgatttcaaccgatccaactctcacgccttcaacagacaacatgacaatcaaagttcaaatccaaggtttcgcccatcctgttgaatcatcccatctcattgtttcccaagactaccttcctgctcctgtctctgatcgagaattaaacacggacacaggagaaaaatgggtgagatgtatatccatcctgaacaagttcccagccctacttcgacgtccacttcaggcgaatgatgtcaaaggagaacagccagagggtgtggagcacatacagcaaaaggagggagaggatgaaagggacacagcgttggttgtctttccaccaggaagcttgggaagcgacgtacagggtagtgtaagcgcgctgttgatgggtgaaggaacgggaagctgcccaaaaggatactgtgcgtttttctctttctttgtctcagccaacactttgactgattgttctttctgtttaccatcttatctttgtcttgatggctgcagatgtcttgtatttaacaactcttcttcctccaaccgcctcctcctctccttcgcctctaccacaattcttaactacactgacaggacctgatcacccactctttcaacttgtatacaccgaaactatcccttcaggtgaaacggagtcgcctgttcctggtagggtccacattccacgctctttggtcatggtcaaagaagggtctgatcctgtagctagatctgaagcgagtggtggagggaaaagctggacagaggaagctacaagatctgcagaggagggagaaagacttttctgggaggtttttggcaagaaaggacaacttgactccactcccagcaatagtgaagatgagggaaagggggagaaggagggacaagatcagaaggaatcaagaggatttttttggccgagagcagagtttagtggggatgatgatgatgatggtttctagatgaagtttgaccactaacattctgaaatatcctcaaaccttacatcttgcggaagatagtgcggtaaactccatgttgaatacatattggctgtgaagaatcactgttgcgaacgtatacatctcttcaaaggaatgattcaacagtaaatgtggaacaatctggacgaaaatagatcgcctcaatttcagaaggtttgatttgactaaagacgccgcaagcgtgatacgggataaatcaagagataagatatgcacttcaatcaggcacgatgaagaccatactcgacttgcaaggtcaacctgagaaggagctggggaacagactagtctatttctgatcatgttttctataagggagtattcattcgattgttttttcaccctcattcactctttgtccaaattgcttgagctgtgcacgtagacactgttgatgacggcgatgatgatgacgacgacggcgatagcagaaaacgacggattaaatgaataagccataggttaaattaatactctctcttacatacagtccttacgaatttttgctctcaaaccatcacacattccgacagatccaagttagacaatgccatcagacaacagccaggtcatccgtaaagtcgcgctcagaggtgactttattctagacgaaccagagttcaacaagggtaccgccttttctgccgaggaacgaaaagagttcggactcacttccagattgccttatcaagtggactcactagatgaacaatgcaacagagcttatgaccaactaaaatctcttcgacagcccatcaagaagaatgatgttcgtctggagagggagctagagtggtttcatcggtcaacatacgaacgctgatgttcactgttttgattaacaacttcgtacagtttctctggtcgctcaaagcgcagaattgggttctcttctatgagctcattacgagacaccgtgagccctaaatcctccctcctcatactttccgtacgactctatcagccaactcgttgggtcttccaagttaccgagctatttcccatcatctacactccgacggaggcacaagcgatcgccaattattctcatctcttcaggcgacctatgggaggaatctttatgagctatgccaaccagggtaattattcttgttctttcttaacttcgattttggggtgtctttgttgagtgcgatgtttctctcttaatcagatactatggaagaagatttcaagacccacttgaccgactctgtgggccgaaagaaagaaatcgacttagtcgtcatctccgatggagaagctattcttggaattggtgaccaaggcatcggtggtgtcgctatcactacggccaaagccgttatctatactctcaccgcgggaatagatccagccaggacccttactataggtctcgatgttgggacggataatgaaaagattctaaaggacgagctttacgtcggctggcgagaaaaacgagtgagaggcgagaagtactacgcattcgtcgacaaggtcattagccttgtagagaatgagataggacagggtgtattgattcactttgaagattttggtgtcaccaacgcgcagaacattcttgacaaatacaaaggtttgcctcttcttttgatgttttcaaaccatctgtctctacggactaatttacagcctgctttcccttccatacttttcagatagtcatgcggtcttcaacgatgacggtatgtcttgtctgctcgtatcttgtgaggcagcttccacgaaatagacctataacgcgcgtttgctttgggttgtcttagtccaaggtactggagctgtcactctggcagcccttcagtctgccattcagatcacaaagtctcctttgtctgagcaacggatattagtctacggcgctggttctgccgtatgttaatccctgctcttaattcttcccctcaacgcttatcataatcttccacttgtgttgtcatcaatcgaaaacgacatagggcctaggaattgctaggcaaataagagatgctatgacgatcagagatctagacgggaaatcaatatccaaggacgaagctaacaagcatttctatctgtatgtattgtcaacctcaacaacattgctctcatgctctccgatactcaacattttgactgactatcttcatcacaatttgaaccaaaatatgggaatgagcagcgttgataaacaaggccttctcatcgaaggggacgaatctatcagagacggtctcaaagaattcgcaagagatgactggaaagatgatggaaatgaagaaaaaaagaaggatctggagaaaattgtcgagtgggcgaaacccacggtcatcattgggacgtccactcagccaggagctttcagtgtaggttctttctcttgagtattcaaaagaacaccgcgatcagtcttgctaatcacacaagagtgactgtggagctaaaggagaaagtagtgaaggcgatggcgaaacacacagaccgaccaattatcttccctctttcgaaccccacggaactttgcgaatgccaacccaaaggttaattcctatccttctcttttcactctaactagatattgacagttgcatccggttcatgtacttgtgatactatcaaataataatagatgccaacgactggacggaaggtaaagcgcttctcgcaacaggttcgccgtttgatccagtaaagcaacctgatggatcagagtatatcatagccgagtgtaacgtaagtacatttctcctcttcctgaaatgaccacagcctttacggccatgaatgatatcgattaattcctattgatctttcggtttgaggggtaatggtagaacgctttgatataccctggcatcggatttggagtcatcctcgctcaagctaagacgatttctgacaagatgattgtccgtcatctcgacttcgttttttttctttcgatataactccgctcacttaatgctgattgcatttgccacaggttgccgcctcaaaagcgctagccgaactctcccccgctctcaaagactcaagcgcgagccttctacctgctttcgaagattcaaagagcgtcaactttgtgatagcgcttgcagtttgggaggcggctatcaaggaaggagtggctaggagagtagttaatgagaaggataggaaaaagtttgccgagaaaaagatgtggagtatgtctctgtcctctgtgttcgtgaagcattgacaactagtagaaaactgatagtgaatctgaacgtgacttaacgttcatccacgtatcagaatccgagtacaaacagttcgtgtacaacaaggacggggatctctgattcatgtgcaaacatatcaaacatatcaaacatatgtctatgaaaaccctcgctctatatttttagttgattgatatgtaccaataagcttcaagaactacccatatactctcagtctcaatgctccaagctttttattcttttatgcctctccccagatatgattatatagatcgagttctacgcccaagagacatatctcaagcgaacatctttgagaacgcagatcgctccttttgtttcctttcgtctctgtattaataagacaaaaaacatgacggagaggtgtcacatgcgatagagaggtaacatatgagataagaaaaatcagtatatatcgtgcgcaaaccttccaacatagaagaccgaagagagaaagaacaaaccttctcttgttgattttcactaggaaagcggcaatagcactatcattaggaactagagcctttgctgctttgacgtccttctctgctacttcgtcattcttcagctcgaagtaggcttgacctctgccgttgtgtattcatccgacccgatttggattgaagtatcatttcagtcatggcaggcagaggaagaggttggcagactaaaggccgaaagaaacgaaccttcggtagagtgctttggcctcttcttcgggtttcagcggagtgatctttagagcgctcgaacacaacgacacggccaacgaactgatttgctcaattgtcagttgatagttgttccaaattgaatgaacagaggagcgccatcaaatagagaaaaggaagtcatggactcacgcttggggtttgggagtgaccttgagggcgcaaagtccggcgttggttagcagagggaatcggagggctttaaatgcagcatcctcctcaggggtgtcttggtaagggtgttgatcgaggtaacgaatagcctctagacaattgtgtgttcgattcatatcagcaaccaagagaagtaatcagtcagatcgtttcgatgtaagagagagctggtcaatcagcagagacggaaaggaaaaaagacatactctggtacttctctagtgccttgacaaaatcgcccttcttgaagtagtccgttccaaccgctttcaaaattcccgcaatcctcaagccctcctctggcttgtcctccagtttctcatcgtcctccggccaatcctcgaagatatctccatcgctattggcacctgcttgagtggattgagaggcagcgaattcctcctcagtcaacacgccgcagtcagcaatcttgacttcagagacgggagcatctccaggctgggtaggaatgttctcgatctgtcgaacaagagatttgttttggataacttgaccaaacacaacatgcttgccatcaagatgggaaggaagcgaagtggtgatgactagaagaaagagaggaaagtgtaagagaaacgattctatgatggcatcgaaatgcgcttcgaacatcgcgtgtcttgccaagtactcacagaactgggagctgttagttccgggacctaagtgggatgttccagaagcaggacaaacgtgagcaaaggtgtcataaagatacagcaggaccgcgctagcagagagaagagaaaagaaggcgcaccagcgttggccatagagagcaagaactttttatcgtgtttcagtgtaaaattttcatcctcgaacttttcaccatagatggattcacccccggttccgttcgaacgggtaaagtcaccacctttctcaagataactcgggatgagcgagattaactttagtcatcgcgcctgcccaaacggaaaatagtagacaaaccttgcaacatgaaccctttgatacaacggtggaaaatagacccctaaaaaagacattgattctgttcagctaagcaggtctaacggttcacctttcgcagagcaatgaaactaagcatgtaccttgtaatacagatccttcacgccatcacttgccttgccggcctcaccagtacacagctgtctgaaattctctgctgttctgttcgagccggttagttgcaaataattgggcgttagtatcgttgcgcatacaaagcaagcctcgtcagacaaatctgaagatagagaaatcaattggctttcgagcaaacgtcaatacatacttgggaacaacatcgctgtagagctcaaaaacaatccgaccggcgggtgcgcctccgatggtcatgtcaaagaacaccttaggtctagaagaagaagttgaattggctgccattattgtgttttaggtatctattgcgatagtctgtcgaaggagagatgatggtgtatgttgtgtgcagatatatgccaaaaaagtctgacgatcttttgctttaacgctggaaagctctagaaacctggacgatgcatttcgagaggttgtcgtataacccaaggaaacgcataatcagtttatcagataaattccttgttacgtaagtcgacccaacctcttcgtaggcgatatcgaatcagagcaccacaggcaattaatcctccgaccaataacgtctgttcgcctttttcgtctttgtttgtgcgtgtatctgtgtaaaagcgagataggtagacagagtagcagatataatggttagtgtaaagagaggataaggatcgttcagttccaagacacttctgatcaacgagtctgcatcctgtatcggttgcacttgacgaatgagaacagacctcgaatcctacatcctcgtccagtcggccgccaaagtcgccaccggctaaagctcagcctttagtgaagaagaaccagtctttggatgaagtcagaatgaattcctgttttacctggtgtgctgaggacgattgttgatgaaataaacttacgaagctcggaacgttttatttgttgtggatggatggcaatgacttttcacgacctgctttagtttttagaagacttttgggccggtacgatcgaccggtatgaacaggaaagcccagattttaaacagcatgttcttcctttaggtgagtgagcctcttgtcttctcttgaattctacagtaagatgcggtgcaagagaagaggtagcgacaaagtccctagtcgtcaaatgctattggctgatactgatcaatgtttcgcgaaatgatggaaacccttcagcacggataaagaaagtgatgaagatggatgaggatgttcgagtaaggcctttatagcaaactcaaaatgatctcgatatcaacactgatagttcgaacgcgatttctgatatggaatgtttcaacgcatagatgatctctgctgaaggtttgcctcgtttccgggtttgaatagtcgagccaagtctggttttacgaagaggagaatgctaacgaatcatatcttggtcgaatgacctagctcctatcatcttttcgagagcttgcgagcgtaagtatttgttgtattctacagattctgcttaaatgcggctctgacaagaggtctgtctcctcaattaaatagtgttcatctcagagcttacgtgccgttcgtacctcgttgccgaggccggaaaccggaaaacacttcaacgtggagacattgcgaaagctgttgctggttctgatggtgatcgcctttcaaactatcttttgcttccccgtatccactctggacggagctgactagtacactggttttctcgatatattctagcttttgacttcttatgcgacatcgacgtggctaaggcaagtacgaagatgagtgctcctgggaaggacgagcaagacgaattgatggatctaggagatgagactacctcagcagcagccgggaatggttcaaagaagaaattgaataaaaagaaaggtcacaagaaggcgaggacggaagaaacgtatgctggctgaggtataggagccgttgtaattcatgatcgtatttgagctctgcgtaaatgtctctgcagacaaaagttatccaaagtggatttgattgaacgggaagaaacagacaatatcgcggtgcaatcggggaatcttatcggatctgaggatcagttcgaggtcgaacatgtcgagcatctagagcaaaaagtaatcttggatcttatccactttacctatctatcccgatttgtcgttctcttttctgctttgcttgttcttatcctaggttcttcctatttctgtccaatctatgtttatggtgtccatcgtcctgccgcctttatgtcctcattgttccactcggaacgcttggttggtatgtcaataatattgtatataagtcatgcattttaagtccccctctcctccttaagagaagaaaccccagaagatagtatatgtgtatgagaaaattatacaaagacagagagaaccaagaaaggaagaaaaatgaaagtctgtatgcgtctttcttttcttagttcaattctactcccttttgatggaattttactttttctttttcttcccgggtacggttgcccagttttcttctgtcaccaaaggagcggcgttgttccctctttcccaccacttctccacaggtgtttttgtagccttggctgcacttgttgtcgaagcagatttggaggcctgtataggagcgagggtggcaagtttgggttttgtggatacgtcctctctgctgagagtggaagaggcggatgcggatgcaaaggtgggcataggggcaggtatcgacgtggacgaagagctcggcgcggtatcacttgacgctgagtcactagccgggacatgaacaactgttgacggaggaggctgagaggaaggaggaagggcagaggaagcttcagctgctaccttcgctgccaatacctgactttcttttttctccaatgctaccatcttctcaaccttttccaacgcggtttcgaccactcctcttctttcgctcttcttctcttcttctgttcctgctgtaatggccgagactttgaccatcacgcccttcattgctgccaagacaggcgcggaaagtttctcctttggcttgagaacaagtttggcgagagctaccattgaagggttcatctcgtccgtttgaacgaccctgcgttcttcatcccagtcctcgatgttggcccattcgccatcaagctcataccatttaggaatcccatcatcgggttgttgttgcttgtcaaatgattttggtttggtctcgactgctgaacttgatttatttgaatcgggaagagatttcaccccagcaggtgatggagagcttgatgacggggaggagagagcgacggaagattttccgttacatacagtctctgatgacgactcgatagtaggagcgacgaccgtggatgaagaagaacgcgtctcgatttctggaggagtaacagttgtgggaaggtcatcctccggttctacatctgaaagaatatcagacacggcggattcttgttcagactcgtattcgggataaacgtcttcgtatggttcctcaaagattggtaatcctcgctcgtgcaggaacgagcagtcatcgttctcacatgctccttttgaaagctaagaaaatacattcaatcagaggaaacagacaaggcttcagctttgattcaaatgagaccaaaaaaaggaggattactcacgtattctccacagaccatcaacacaactccatcctcaaactccatctctatcggcatccaccacccgttctcattctgtttcggcactttcttctgaccagtcaagaggtcaaatccgaattccatcgagtctttatcttcttcctgctcttccacctgaatctcttggttctgcacctcctgctcaatcgacgccttcggtgattcatgtgaaggcttcacaatcggttccgtcacgatgggaacccgaactgaaccaggtaaagtgacagcagcagcctgtgttacgactgctgggggctctctgatgtctagcttggaagaaaccgaagagtggaccgtccctatatggttattacctcccggtccaaatcggtgttggaagggctggtacggtaaaggctgctgctgttgttgatgatgattggaatggtgatgatgactatgcaattgctgctgctgctgctgctgctgttgttgaggttgaggaatgtgctgtatgtgtggatgggaaagaggtggaggaaccatgaactgaggttgagaaggaacataagatggataatgaggaatcgagccgttgaaccgctggtacatctcctccggcgcaaactgttgctgttgttgatgctgaatagagttcatttgggattgatgtgaatgctgagcaggttgttggtggaatgatgattgcgatccaggaagtccaccaactgaagaatgatgcatatgatgagcagggattgtctgaatcaaaggggccacaaaagaggtcgtaggagcaaacgtttctggtttgggagaagcaggcgtggtgagtgccgttgtcgcatactctgttgtattcgaggtagtggtcgtagtggtactcgagggtacgaaaggggtagtagaggaggcattagaaacagaggaagaaacagaggatgccagtggttgagagggcacagagccagatggtgaggaggtcggagggagattcgacgataaaagtgaaggggagagttttccgttcggtgtagagctgaagctcgcagggggtggaagcgccgaatcaggagctttggatgcggtgtttagtcggggctgagacggaagttgggatccagaaaattcagttgtcggttgagatggtgtgaaaacttctattggctcgtacgaagagtgtgggagaggtgatttggttgatgaagacatctttgttgaaagagcaacggcagggatctcctcaatttgggatgctggctgaacctccttctcatccctcttctctttttccttttgatcttccttcccctccacctttagctctgccccctctgcctcttctgtggctatcgtctttgtgccgacaacaacagctaccgactcctctaccggtaacgattttggtagatccttttgtatctcatcaggggatctaactccattctcattccaagcagagcttccgttcgggacctctttctctttctcgtcagtctcaacgagggaagccttccttttcgccgccttgacctttttctttcgctctagtttgacctgggcagaagactttggaggctgcgccggctctgccgaaccattcgccgatgccgcagagatcgccttgaccttctgacgaatctttttgagcatgcttcgagcaggggtatgtgaggttgtgggaggcagagcgaggagatcatttaggtcttgttcggcctcggtccagctgatagatggttgaaataacaggacgctccaggttagaaagaataattcagatagcaatcaaaagatttaacatacttttgtagacttcggtaacaagacgctcgttttaacaacaaagctggtcgttcactcggatcatatttcatagcttcagtgaatgtgtcgatagcggcttgggggttgttttttatcacgtgatcatccccctaaaaaatgaaatgaaggcgatcagtcagcctatgtgttcagtcatagccaggcgcgatctcaaagattctttgtggaaaggaaagctaaacttgcctcgttaacaagctcaaacgtcttgagtttggcctgactaagcatctcccagctttccttccactgttggctgacttctggccaggtcggacttcctctaaggataagattcgtcaggttttcgttgtccaatccgggtaaaaacctgatctcgttcggatcttcctcgcattgaacgatccattcccatccttccttgtcgccccactttacagactccatccattcttttcgaagctgctcctcgagaagatccaatgcatattcgtggcatcgctcaatcacactctttgctagttgagcgagttgttctagcacgatcggctgtgcctgggtggatcggacggacacagaggcattgccttgagagcaaatgtcagcaatcgtgaaagacgacgcgagctcagggaacaatcggttggcgtgaatgtgaaaggaaggtggtaatgagattaggctcgctttttctgaagaagaaagggagggaggtttgctcggtggaatgggttccagagacgccggaataagtgagctgggtgacggatatggaccgggagcccactgaggagagaaacacagacaaataagtttacaggtaaggtaaaacaatcgtactctcacaatcatccaagaggtatggcttgagagatgaaccacttacatcgtcacatgcccgctggttccattcgtatttgggcgcaagaagtttcttgagttgattgcccatcgcttttgcaatctctttggtggtctccccgttggtatcggcgacagacttgaacttttcccaggccttgcttagactacgtctcatctctttctcttcggcagcagcgactgtccagccatttcctttggtgagttccaaaatgggtagtgtgccagcacccatcgatgcttttaactgagcccggacggtgagcatgagaggaccatttgcgacaaaataggaggtggtgaggaaggtgcagaattgttgaataatgatttgagttcgaacttctttgaggtgagcgatgagtagtggagtgagagaaaacaagttttccaatgtaggtggtgttgaaggagattgatcccggtctgttaacgaaaaagtcgcaaggaatacatagtcagataggagaaggtaaagagagtgtgtaggtcgaattcagaaaatggtgggacaagagtgaagccggggtccagtcaccagtacatggaccattgatcaattgacacctcgagcagagatcgcatgcttgaacaaggatctgtttcttccgaagatatctgtatcataggcagcgttgctacttcctctcgatcaggctttggtgcattcagaagagaacacaatatagcctctgtcaagagaaagactcaaccaacccctccgtggaagggcagccgaaagatggaaggaagtgagaaagagttgcagagaggtggacttgcctggaaatacattcatctcgctttcgtcctcgtcctcgtcaatttttcctttaccaagcccgactctcattccgagatcaggaatccgacggccttcttcaagccgtgagatgtcgaagtcatgtgcagtagtgttggcgacgacccggtcgcgatggccggagagcgaggaaggcatgtatgttctttgtaatctgttttttccctcctatttctttctcgtttttaccgaacaaatttgagctacaaacaaagatacgtgagtgtctgctgatgagaactagtgcgtgcttgtaggtataagggtgacggaaaggaaacaacggtgtatgagcgatgaaggtggaaggcgaagaaaagagaatgaaaaaagagatggaaattcgtcggaaggggagaagaaaaaagatacgaaaatatgattaactttggtagttgattattcagttttcactacaaacatttccaactcttcatattccctgccttgatctttcttttcgtacacgcaca

SEQ ID NO: 2789 - DNA, 308 bp, Xanthophyllomyces dendrorhous
cggatgcataactaacatgaaacggatgaaagtgcatatacgatttttctgtcatactcgtgtggaagactaatcaatgcatcaaactatggtcagcggtgatttgtactgttcgtttggcgcccaaacatgatcatgcccggctaccgttctaatctcattcaggctcaaggcccagccagatccggtttgtgtgtctcttccgtttgtgcatcagagaaatgtatcgatctgttgggcatttgtttcttctacgaagaaagacaaattggatgtactggctcgaaagatctttcttttcattgttc

SEQ ID NO: 2790 - DNA, 735 bp, Xanthophyllomyces dendrorhous
ttgtgggtttttgtgggtttgtgtgggccaacggggcaagatgcatgcatagggcagatagtatggtagtgcagtatgtacaacatggaacgacgcgaaaaagatggcagatacaaagcaaagacacgtcgaaaacacaagaaaccacagaaagaacacgtcaccttttgtggtcttttttcggtatttctcggggtgcacgcggccgatcggggcaaacacggtgtcgttcggtcgggctggacgatgtgcatcgaacggtgggcggcttgggtgggactgactgtgggggatgcggcgaaaaacgcggaaaacgagtgaaaaagacgatctcgcgaacgggccatccgttctggctgccgtcaacgggggcactgtttgttttcgatgctccacacagatagccatcgagcgtggcaaactgggagtgctcgattttttgtgttccgaggtgtattggccgaggagggtggaaaaaacggggtgggcacggtctgtggcgggtggtgtgggcggtgtttgtggaaatgggcaaaaatggggatgggtgtgggcaaaggtggtggttagggttgtttgtgggttggtaggataggagggggtagggtctactagggaatactaggatgcattaggaaatgatgggaaacgattagggaaattacgtaacggccggtgccgcgagtcgtgtggttgacaagggtggcatgggggggtgtaacatgggttagggaa

SEQ ID NO: 2791 - DNA, 1456 bp, Xanthophyllomyces dendrorhous
  misc_feature (202)..(211): n is a, c, g, or t
  misc_feature (1217)..(1226): n is a, c, g, or t
ccactaccatccacttccacgacaatgtcgaccagctcgcttcccaagacatactctcactactacctcgagaaccgagggacgtttgactcgatcaagttcaagcaggacgtcccgctcaaggcacccggcctgaaccaggtgctcatcagggtccgtgccgtctcgctcaactaccgagatctgatcatcgccaaggacnnnnnnnnnntcgcttcccaagacatactctcactactacctcgagaaccgagggacgtttgactcgatcaagttcaagcaggacgtcccgctcaaggcacccggcctgaaccaggtgctcatcagggtccgtgccgtctcgctcaactaccgagatctgatcatcgccaaggaccagtacccgctgagcgccgtccctgagcgtgtgagtgcatgcattctgtcttctctctcttctctctcttctctctcttctctctcttctctctcttctctctcttctctcgtcgcggtcaagctgatcaatctgcgctccgtcctatgagccaggtcatccctgcatctgacggagcaggtgacgtcgtcgccgtcggagacggtgtgtccaactggaaggctggagaccgggtcatggtgagtgcacactgccttctcgcccggcctcttgctgatgtctgaccgaacgctaaccggacgctcatcggacactcaccgaccctcgctcggttctgtctgcccaggcgaccttcaccctcgaccaccagaacggatactttgacgaggcctctttcctcgacagcacgatcggcggtgctatcgacgggatgcttgccgagtatgtgatcatgcctacgagtggtcttgtccgggtgcctgagcacctgacatacgaggaggctgccactcttccttgtgctgtacgtcggtcgactctgttgatattcttcgatgtctttcgatgcttcttgttgcttcttgatgcttcttgatactgagcttgaaccggacggtggcctggggccgtctgggttgtgcgcaaacaggctctgaccgcttggaacgcgttgttcggtaccgacggaagtgtggctctcaagcctggacagagtgtccttctcgagggaacaggaggtgtctcctgctttggtgcccaggttcgtgtcgtctgttgttttggtcagagtggcgccatccttctctgtgtgtgtgtgtgtgtgtgtgtgtgtgtgtgtgtnnnnnnnnnntactgagcttgaaccggacggtggcctggggccgtctgggttgtgcgcaaacaggctctgaccgcttggaacgcgttgttcggtaccgacggaagtgtggctctcaagcctggacagagtgtccttctcgagggaacaggaggtgtctcctgctttggtgcccaggttcgtgtcgtctgttgttttggtcagagtggcgccatccttctctgtgtgtgtgtgtgtgtgtg

SEQ ID NO: 2792 - DNA, 347 bp, Xanthophyllomyces dendrorhous
cgcgacgatcgacgaccgatgagccggtctcgttcgaggcgtttctggccgagcggggataggacgaggaggtgtgatggtcgtcatcgtcgttgttgtcgtcgtcatcggcatcattattggcagcggtggtagcgtctggatcgatcggcagggacggacgatggagctctcgaaggtgtcgacggaaggagagttcggtcaggtgggatcgaaaggagttgtctgttgggttggttgcgaaagctgtttcgatttgtttatttgagtttaggtagggacaatatcaggtgtcagtgtgcgcaatgttgcgagaagagagagggggagagggagagagggagaga

SEQ ID NO: 2793 - DNA, 865 bp, Xanthophyllomyces dendrorhous
tgtgtgtgtgtgtgtgtgctagagtgtgtgtggggcagatagaccgggaggacaaggatgccgagcagacacaacctggtgtgccgggcgggaggcgaccgaggaagaagaagaagagggaaggttgccgaagaacggacgtcggatgtgatgatcgacgttgttgtagatgagatctagtgtgttcattcatgctctctgtgcgctctttgatgggcccgggactgggcatgactgggcatgactgtgttggagggatgcggtagagaaggctgctgggatgtcatcacatggggaaccatgtgatgtgatgtgatgtgatgggatgggatgcaatgcaatgcaacgccacgagacgcattacaaactgcagcgcacaacacaaacacaagcagacatatatcacaaaagaacacggcagagagcaagagagcaaccagagcaaaggaaagagaagaggcatggggcatgatgcacaaggcataaagcataaggccgggggaggatcctcggagggaaagagatcaaggagaagatgtagatgtaggatgtggtgcacattccggtacgcaacacaccgcacaacacattgttcgagagcgcaacagtacagcagtgaagcagtgaagcagtacatcagttcatcaccacctatgcctacacctatgcctacacctatgcctacacaccaaagagacagagaaggagacgtctggctgccgatcaatgttctagtagattctgtagtgtgatctgaaggaatttcctaatacaactttctagtgtgctccctaatacaaatcagacacgaacgattaggaatcggatggaacgttccatctgtttccagtcgatccccctgggg

SEQ ID NO: 2794 - DNA, 32137 bp, Xanthophyllomyces dendrorhous
  misc_feature (1268)..(1322): n is a, c, g, or t
cccttcttttttttcggtctggacgaatcctccgctcgagaaaagagcgagtctggaatgtcccttcggtcgattgaccccgtgttttatatgcgttcgagtcttcatgtgacagatccgtccagagcttgtcgtcggtgatcgtctgctagtgtaccgaacagtgtccatcatcctctcgaggggagagcgagcaagcgagtaagcgagtgcgcgtgtgagcgtaggtgcgcgttccccatcctccagacgaaacacacccggaaatcaaaacaaacgatccccgtgttttgctttctctcctcgctcgttcttccatgctcacacactctgagggaacgtcgttctgatcccataaagagtcggcaaatggattcctttctttcctttcgcttttgtttctcgattatccatcgtctgttttcgtcttcggttgcgttctccattccctttcctccctttctttctctttctctttctctttctccttctcttctcccttccactttccttccaaagcgttccaggttcccttccaccttcgtttccttcactcttgctcctactcccactccctcactcactcacaccggatcatacccaactggcttgagatgtttgttgtctcgttccttaccgttctctccctgctcgtccagcaggtagctgcccatggtccgttctcttttccttttcctcttcttatctttcctctctctctccccttcttcgcaccgttaatcggctaacggtggaaggcgctgctctcggtaatcaggtgctctgcacaacatcatgattcgaaaggtatgtccctcgtctgttctctgttgcgctcagatcatttactaataaactccctcttctggtcttatcaatcgattggcaggccggaccaaagtccaaagaagtctgtggcgctcagtttaacattgatcgggacggtaagcgcaaagctctcgtctagctctctttccacctgctatcatcttactaattagaacaaactggccgatttacaattaggtgtcgccaataagaatggctgtgagtgcaaattcgtctttggcctgactggtagctcaatcgttagatcttgctcacgccgtctctttctctttgctggcaatagtgatgcttgcctcaaacaacaaggacaccctcggtaacccttatctttcaacttgcccttggtaagaactcttttcttcgatctcgtccctccttcgttctgatagcatgcttatcatcgatcacggcaacctccnnnnnnnnnnnnnnnnnnnnnnnnnnnnnnnnnnnnnnnnnnnnnnnnnnnnnnnggctcctgcgctctgcaggacggtttgcactgggttccaatatgaggataatgtggagaatttgtacaccttcccggccggtaccgttctcccgctccgatactacatcggcaaccaccatgagggctgggcgaatgtatccgttatcaacaccaagacagacaccatcatcggatccatgctgaaatcgtgggatagcaagttttccgtatacgataactggaacacctgcccgaatgttcccgatctcgatcagaacaagtttgaggttaccattcctgatctgggcgatcaatgcactactcccggagtctgcgcggtccaattcttctggttcagcaagatttacgataaccaaatgttcaactcctgtgtagactttgttcagccctatggcggttagtactgaccatggaatctttgttggagttctctatgatgtgacctgatccgtctgacccgatttttttttcttttttcttttttcttttttctttttctttttctttttttttcttttctacattcgatttttgccattccaggatccactgtgccaccgatggtcaccaactaccaaccttcatctacacagtttattggatgtgtcgcctctggcggcgagcaggtcttgccctactttggaaacgcctcttacccaggtagcacttcgaactcagccatgcagagcagcaacacgtcgtccacagtcaaagcaacgacgatgaatgcatcttctgctgtcgccgcttctagcgccgtggtttccgcttcgtctacagccgctgtgatgtcgcaagtcatgaacaatgttgccatcaccgcttcggccgcatccgttggaatggcctccgcttctgcttcagcgatgagtggaatggcctcggcaggatctaactggacttcggttgggaccatttccttgaacggaagtctcgcatctgccacagctgtgagcggagctgtcaccgtgaccgagacagttgccaccgctaccgttacccagacgatctacgttcaggttgaggccgtcggaacttccaccgccgccatggcggctatgatgaccaagagggagactcgatctagagcgcaccatcagcaacgacgacacgctcattaaagaggaacgtctgctcattccgcaaagttcccaaaaatatctcatcatcttgagatcactcgctgagcgagtgatttggatgtcaaacttttgctttttgtttccatcatgtttttcgcctctctctctctctctctctttctctctttctctctttctctctatcgtctgttctcgttctcaacggataaagaccaatccatcgtttgacacatggcatggtcgtctcatcatctcatatctttttattaaaatatctcatcatctccagcctggcgcactcgtttccttcctctgctttccgatctttcgttcttagaatccagtctctcttctcattcaatatcttcacgaaccccctcttcacgcctttcatcttctatacgtctcatgttccctgtttacgaccttgatgcacgctggactgtgctcctatcggattagatgaatgaacaatgtatcaaactcgaaggatcttgggctggcacattcaaatgatctatgacgtaagtatgcgcacgcgtcttgacgtctcagggttgacgactcttcttgcttcttgcgctcgtcgtatcgatcctccccatctacaaccatcttgatctcttgatctcctcatcctctctttctactgaatattatcgaaacccacagcatgtcatcagacaagggacaattcgagcaaggctacagacccgatgtcatacagcaagatacccttccgttcgtatctctcgattcagtccgaggcacattctcatgatataaagtgtgacaggaacggatggataaacccagactgatgcacaccgtttcttcacggaccgctgatcaacatagtggcaaagaatgtagaatggaacagccgccagagtatctgaagcaggccgatggaagaaagtacaagcctgcagagaaactggtcgacaagatcgctctcatcaccggttcggggtgtcgtcttttgtgcgatcaagggtcgggaagtcgacgagtatgctgattcatttcttcttcttcttcttcttctttttttatctttgcgaaatcaactcgagaaccacaggtggcgactctgggatcggcaggtccatagccgttctgttcgcgatggagggagctgacctcgtgctgtgttactatccaaacgaggagaaagacgcccaggacacaaagacgatcatctcggtcgaagcaccccacagaaagtgtcatttgatcgcaaaagacatctcggtcgaggagaattgcgaggcaatcgtcgatgaggccatcaaggttcgttctccaatctgctcccttcatagccattccatttgccggtgatgatccagagaggctcatgccagccgtgccccttaggtctacggaagaatcgacatcctagtccacaacgcggcgacccagaaagaggtcgaacatatctctgatcttccttccgaccagtggaggcatgtcatggagtacgtgtccgagtcccgtactgaggaagtaatacatgcgctgctctatttctaactgatcctctccatatttcgaatatctcaaagtgtcaacatgtgagcagccatccttggtagaacatacccgatctgccaaccctaagctaatcaacctcgagttttgcagcaatgccatcttttacatcaccaagcgggctttacctcacatccctgagggaggatcgatcattttcaatgctaggtactttatcaattgaattagttctcagatcgagagtatgtttcttgatgtatcttgattgctttctcctcgctcaatcttcaactcagcatcaatccatttatcggacatgtaagatcagccgcttattctcccgatcagacgcatcagcctgactctttcgataaatcgtctctatattcagccaggtctgttggattataccaccacaaaaggggccatcgtcgccttctctaggtcgctcagcaaccagatcgtcagcgagaagaagatcagagtcaataccgtctgcccaggaccgatcgtgacgcctttggtgtatgctacgatgaccaaagagtccctagagaaattcggaatcaccactccggtacgctttcgtctgacatgtcaaatcctctcccaatcatgctgaactttgttcttctcgactatcgtcgggtgcgtttgatgcgcgtattggttccagatcggtcggcctggacaacctgtagaatgcgccacttgcttcgtctttttgtaagcatctatcgctcccatttccggttgtcatctatgtcatccctcttgctcagtacatatatcgtccaatcgttctcgtagggcgagcaatgattcatcctacatctccggtcaatgtgtaagtttcctgtgtctttttcgaaacattatttacgaatatagtatcacgacatcgaccccgacgcatactgagcatgggtccctacgttgcactatagatccacgtcaatggaggatccgtcatcgcctagatgatcaactttgtttgcatcactttcctgaatggacaactcctttgtcatatttcttgatattcttgtattcgttcttgtattcaatgtatcgatgattcttggctcgaccgctcttgttcttcttgatgccgaaaggctcatagtatcaaagacatgaaaccctctctcacatccgaatttcactcgtcgaagctaatttttccttcgttttccaaccaaagcctttcccagatgtctgcctaggcccatgctctctattatgtttcttctttcgatctccgtcttcgtctctgttcagagccgttgccgctcctgccggtattgcacctggcataccagacggagccgaatccttgtctttatgatgtgacttccagcctgtcctctttttgcccctgtgtcctatacttccctctgcctcatatccagtcccatcctcgcccatcacttcatccgacggctttctcacgacaccgggcgaatacggaacagtgaacggccccaaggtcgatgattcgaaaggattgaacaaagcctcgatgatatcctccgttcttgacggcaccacgaacccagacgatcgggacttgttgtcccgacccgagagtccggtatgtggtctgtcgatcgtgggacgacctcgtgtctgtggttgagagtcgggatgaggtgaggaagaggatggtttcgagtgattgggtgatttccggtaggacgaacttgagttgcctttcgagtgagggagtagatgatgctgaagagagctacctaacgaatggagattcgttgacgagcctggattggtagaggaagaaaacaagtgggagctttgtgctgggacgtgagatgaagtgagggtttgaagaggaggtgtagatggacccggggccgaattggtagaatgagagagcgatgagggccgagggtaggagtgttcgcttgattttctagagaatgatggtcgggcctgttggagagggcggtttttttagtacgcatcttcctgggtgagatcaaacgaactagactcacttcggcacagagtcgattcaggtttgcgctggacatcacaggagtacctatcattgaaaagaaaatcaaagagagtgttccaattgcgaacagcattccccataaaaacaccaaggaatcaggcctcgtcctctaggtcagaaagtttgcaaaaaaaaagaggtgtatgtaaaaagagtgatgaacctgctaaagagcctttgtcatgtcctacaagtgactctagtccgccgcccgagatttgtcctttcgtgattaacatcctgcgtacaaccgatgtcgaagaggtaaggtcgcgtcttcgagttggaaacaccaagaacaaacgtgcggctggacatacggattccattctctttgacctccaacttgttcaagctcaatacaaacctgaattcgatccaatcgtcatcaggagaccaaacgaaagatttgttactagaagttggcagaaaacccagaacaaaaaattgaactcactttcagtgtagcgttcgtctttccttcatctagcaagtatcgtctcgtgaccggaccggatcctgcatattcggctagattcaactctagatgtccaagtaatacgtctttttccgtatgagtcgaggaatccagcggagaaaggtgctacagtagacggttaaaaatgaagcgaaagaaacacataattgtcaacgcgcgcgttcatcgaatgcacgcacacacacacacctacacacgcaaaaccggcgctcacctgtatgacgatgaatttcaaccatcgttctcccagcacaccatcccgacttatcggtatctggattccgctcctgatacgttgagaccaagaacaagcatgatcaccgatcggtatctttgcggtctcaccccggcctcttgtcgatacagagggcacacgtgatgaacccgtttcaacagtagtcgtgtgtgtacctgtggctgatgagtcaggaccgccccgtgtgtcggatgaatttgcttcgagatgaaacaacaaatccggaggcgaagagttgatagatgcagagtcatgcgatctttgctcatcgtgtgttgaaccctgtctggccgttgtagcagaagacaaaagtgatttcttgaggttctttgttcgagacttccatccatgtagtcttccttgtagtcttccttctggcttttccgactgagtgtctgtagatgaagctgatatgtttgccgaggacttgttctcatagatggatatagacgacgacgatgagacttcgtcttcgtcattataatcgaatgaatcgcgggagtgagtgctggcctgatcaccagcaagaccttgagtttgagattgtgtttgagtttgggtgatcattctctgaagagtgattatgcgttgtaaggggttagattcggccgcttgatcttcatccggaggaggagtagacaaaggagtgggagattgcgcctcgtggactggtttccaccatcaacccggtgattatatcagccgtacatagtgattgatgtaaggcaggagggatgttggattaagcacttcgtgcacttctcaaacagtcaaaggaagaatacaatcagaaagacaaacgttcggtgtccttcgaatgatacttcttgaacctccatctgactctacctcgaatgcaagttggcatgaacatccgtacgcaacgacaagtcaatcaagaggaagtcagtcccttggtttgacatgactcttttttcccgagatcccgagcaaatgcctctcgaatcaacggtggattcaagagcatcctcagtgatgccctggactgagaacagagaaaataaaggaggaaaaaacaaagagacgaacgagagagacccatttacgagcggaacgttatgtatatcatcaatcagcaccgtcaagttgaacgtcgcgcgtttgcccggcaacaagttcaacagccccatccttccttatttccctgatttctccagcttgatgatctatctggctaagtacttctgctggcctgacttggtgatctgtcgaacctatgtagacggaggggataaactttggatgcgctgatggatgacgaacgattagacgtttgatgattctcagccgggcaaactgacaaactcggtctagggcgaaacggaaatgatgacataatcgatattccgtcacgtgtttgcacaggttgctcaaagccttcattcaatcatccatcgtctgtgctttgtgaatggagcttgatagaggtttgatagatatatagagcaagcggacatgaagaagaacggattgaaggaagaaaatagataaagaaaagagacatggagatgagagagaagaggtgctacccaaaaagagtgataacagtcaggatttccaacgagatgattcgcgcccaaaagaaaagaatggggaagacagagaaaagatatgaagaaacaaatggctgaggatatttgaacgagatgctgaaacgtgagtcgtttcagacggctgcgtttactttggaaagcgtgtctggattagactgagaataagcctgaaaggcctagttttgagtgtactgaatatcctgagggtatcgatcccgggggttatactgtcgttcgtaccctccgccgttccaacctgaccctcctccccgacctcctcgtccgccgcctcgaccacctctgcctccccggtagccattacctctacctccaccctgattgaagccacctgaaccgttgaagccaacctggccgccgacctcaccgaacgtactcatgtttcgtgtcctttcctcgtcccgccactgtcgacctctaacctgtcctccggcgttcatcggtcgaccgttatcagcctcaggtttgagatcagacgagatcgagtcaaagaacgaggtcgtcttgtcgtaaaattgggccttgttcgccccggccgcaccaccaccagcagagagcgcgctctgtcgacgcggcttggctgctcgtccggacggatcggcaggttcttcgtcgtcagaatcatcagagtcgagatccgagtcagaatcaacaaccccaccggcttccttggcgacggaggacttgtcgaacctcgcattggactcggcaaagtcaaactcggcagccggaatcaccgttcggcccgagggctgttggtatgactgggattgagcatgcggtggtccgcggggatggccgccgttagaaaatgcgtgatggggaggaggaggtcggattcctcggttgttcccgtcttttcgaccgccacccgaacgggtatgaggcaaggcggcaggggtcgaaggaagaccattgcctggagtgggtccaaccgggccggtagccgcagacatggacatctgaccaagagcctgctcaatcttgtcaagattggactgggcggcgttctgcatcagtgcaggagggacgcttggacccgaaggagtagcagcagtggccggaaccgaagcagcggatttgttttcggctttaggctcggagatggtcttctcggcagcaggagaagaaggagcaggaggctgagatcgaggaccagacgggggcgcagggacatccttgcgttgctccgaggttggggcagacttaggaatagagacttcagcagcagtcggttttgtagcttgtgggattgaaggtggcgcgttctgggtagcaggggcggaagctgccggagcagcagaagcagcggtggaaccagagggtacagccgaggatgtaggaaggggagccggttgctgaggagagggaacaggggctccgttgacgcctcttggcatcagcggacttccaccggccggtgaaggtgggtacccgggtcgcatcgcatatccaccgtaaggaccgggaggaggaggagggggatacatcccatgcgggggaggaggtccccacgcagctccgggaggtggtccgctaggaggtctcccggcaggcatagggtaaccaccgtagggcccaccgggccctaaagggtgttgagcgtagggagatgcaggatgagggtaagcctgagtattggaaggggaatgaggagcgggtcgagattgagtggtaccctgtaagataatgaaagattcaggcacggatcagcaaaccgagaggcgtgggcaatgggattgagggagtgataaagggtttgaaaagtcgattgagcttacacccatgatggcagggtcatcgggaaccgacgcggttgtcacaggtggtggagcctgttcaacggcgagatccttgacatccttagctctgttcaattgaaaagtttggccagcagatgatgtatctagtttagacgacaatcacacgaacggggaaaaggcacaggaaaggctaacctgaagacaacgaagtcataaattcggtcgttgggaggaacgtattcgttttgaggcttcctgttttcagtacccctggaagagactatgggagaaagagacagaccgttcgatatgacacgagaaagaagcgattgagaaagtagaagattgtctcaccattctcaagactgattgtgctttcctgatggtcgatcgaatggagccgtccaacgtaacggatgtcactgacggaagtgagggtgatgatcgcactggatgcattagaggacatatatggatgtgtttaagatgagatatagggcaagagacgccaataagagaaggtaaaaaaagcgagagaaggaaaaaaagatgatggaagaccaaagagtcagccgatctcccagaacaatcacaacatgcgaaaacagagcaagaagatctttacccaatgaaattggacgccatcgtgagaggaatgagatgagaagaagaaaagacctagaagaaagggatagatgtgagtgagagtaagggagagatgttgagtgcagctgggacgatcagctcaacacgccaacgagaagggccgcacgggtttcggcactcggaatcaaaatcagtttaatacacttttgaagatattttgtagtaagtgctctaatgagttttggtccgattttctattctgcacttttaatttggtctgtatttagcactacaaagattccctatttggatctgtatctttggtttgaactacatcttgtagtcaagtctatagtatgacttctcgatggatagtatgatgtacccgctgagccacagattggtagaaaccttttatcgagctgggcggtttcctcgcttagcagtataatcaatagcgcctctgaatacacaaatgtgtgcacatcttcaatccgtcttcagtgcaatacatagtgtagtttgaggtgagcttcataatgaacagatccacagagtcatggaaagaggctgtcctatgcaatttgtgatagaccatctagtagatattctgtaatgactcgtgccaagtcactagatcgtcttgtagtgcatatcatagtccacctttctgttggtctccaacacattccctaatacacatcgttacacattccccaatacatctcctaacatattccctatcacattttgtattctgatcgatcgatcccccgtaatgactttcccttcaattctaatcctcatccaaatttcattcatctggccactgttgtgtgattgactttcttcatcttgactgacccggcctatttgttgatcgatcgtgttcgagcagtgaatgttcttttaactgaacgcagaggtgcaaaaggacactgtagatagatatctctattcatcgtcaagcagcatggaatctgccaacagctgacggtcagaacctggtcgaattctccacgctcactctgccgccctgactcgtcctctgggctctcttgatccttcgtgtcctcctcctacctatgcttcataccaactttccccatgtaacacactaacagaatcttgctaacgatctgatgatactcttgcagatctggtcctaaactgtatgagctatcacaaactaacgatgtccgtggatcgtcagctttgattagtctcacttcctccctcttcttcgatcccctttccgttcaggaccctgattgaccagcgaccgatcagggcgaaatattattcctcttcttccatctaaaatcgcgtcgcgtgtttgtgttgaacgaatcgttctgtcttggctctcacttggtcgtttgttgtgatctctcgtttccctatccatcccacaagaagtaatttcaggaaacgaccgtcgcccagtcttcttttgtccaaaacactctgctctcgaccctctgcaatattcttcaaaagctccatatgaacaaatgaatcaattctcctcccttccaatactgcaaccaccttcggtcgtgtcgttctcagactcttctgccaaccacaaaacatcacccttgggtcgttcctcaatatgcgtactctcgtctctacccaactcgtccgttctcaccgatcgcttggtccaaaacctcgtccaaactcaaacttaccacaccactggatcggtcgatgagatcaaaacaccggtaaagctgacgactaggctcaagtcataccttccctcctcagagtccatcaaacgacttcgaccaatcaaatccttctcaaaattgaaacataaagctctcggatcgaccacaaaatctcctatcgtatcgacgtctttgttcaccagtctcgatctgaatgttgaggtaagaccgaatggagcaagagctcttcagtcatggtctcattcgacggcatcaaagtcgacattcagaaggccgggtttttcgtcttgcatccgtccaggtctatcactcgattctccacctggcttgaatgttagggaaccagccaatctcgacggagaccttcccaaagtcatcgagattgtacaaaatccgctattaggcaagctatcctttgagcaacagtcaatcaacagtcggatggaacagacaagagcggaaagagagagagaagcttggaaaaagagaaagagtaaaaccggtgtcagttgggaggagaggttggaggttttggatgtctgtcgaggagaaatctcatttgggtccaaggcaggagaaactcatgagggaactcgtgggtttgacgcaaaggctgatccttcgaatgcaacctcatcgaccaaaaagaacagtatcctagatgttcagactcgttcgttcttttctcttcacttattcatcccacggtcttcctaatgatttatatgagtctgcgaactttatttcaaatcctagtccccgaaatcgtgcgctccaatagaattatgaaccgaaggttatctagacacggccttcgaccatccaagtcattcgatctcgatagccgtctacccaccatcgaatgctctccacccacgagcccgaccaacagccttcaaaaacttgatgacaactcggttgcaaattcaaacttgagtggccactctatattggcaccttctgaaactcgattgacgtgggcaagacaggggtacagaagacaagtacgcgttcccagacggatcgcctcagccatatccttgcctcctcttattccaattcctcccctagatccgacacctccgaactttccaatagatgaatcacccaaaccgatagaacacacaatgtcaaatcccatcggagctctttcctattcttcagcatccagaccttcagctctgccaccttcttcagttggtgcttcgcctcaaacagatatgacgacagttgggaaatcgcaaccgtcggctaatccatcgaccgtgctgacacctatcaatacccagctcgatcggccaggttcgatttggagatcgcaaatcattggaaggtactatgacacaagcgggttcctcgaaggttcagaatcagagatagatccctcgccactaaagggtctagagtatgatttggcaaggatcatatcatcagatgaaggaatagagggggcaccggcaaagaaggataggaatgaagacctgcctccgagattggaattgcatgaaacgttcagcccgatcttgttttcattggacttttctctaacgtcggagaatgcagaacactcggggtcatttcctctcaaagagaggctagaatctcaaaatcagaagatcttcactctgatcgaccctattgtcagccctagagaagatccttacgttcatatccctcgcgcgagatggttgtccatggacgcccagtctgctctctctgccgtcaatcctttctgtattgccacctctgattctacctctaccgtcaccacctctagcaacgcaacaaaccctgaatttcttaaatcattatgtcccatcttgccctatcacacttcgccgtctccttcgtcttcttgcagcccgcatagaacttctttgaaccagccccttcacgaagctcttcctcttaagctgatagcaatatctttatacctggcgcaaccgtcacctatcatcgatccaatggacgttccacttccttctagtccaatggatgaaatttctggattttcgttttctgcttattccaccctttggacccctcctcgtcagagtcgacctcagagtcatcatatccttgaacccatctctacatatacacctccgataactgaggctgatcaagccgatagcttaacttcatctctgccatcatcaccgtcattatcagcgacatcatcaataatcgacgaatcaggtgatctttcaatttcgtcaaaccttgaggctcaagtcaaattcgggactgcttctagattgacgagttcggtccctcgagtgatataccagccctctctctcggcaggattgaatcctttactcaagcactatcttcacaatgatcacgtagaagatgacaatagaagaaaagatggcgaggaaggaagtgatgatgaaagcggatataaatatcacggccgaggatcagattctgatcaggatctatcgccttgcgttgccagatccgtctttctctcatcaagagtgaccaggaagccgacaattgtaccccagacatggaagtctccttctccctctaaaccttccgggcgggcgatcaaagctggaccagtaaccatcagccctagcgcaggcatgtctttcactccttctttcacttctcgagagagaaacagatcatcgttcaggctaaattcctcattgattgctgagttcggtcaaggagccttatcgacatctactcctactacttcagaggttagcttgcagatgtttaggaggaggataaaggacgtgctggaagccggtatcggtgattcatttgattgctcttctgttgaggtgagccaaatgaagagtggaccgggatcaatcgatcgattcatttctgaattaatcaatgagggaggagtgcaagaagggaaggatccaaaacaagaagaacaggagggagacgaagaggaggaagaggaggaggaggaggaagtcgagcatgacgattcgttcacatatgcgctggaacacccagaagaagttgtcaaatttcaggtcgatttcaagactcatgatgaagttggccacatcggatcctccactcacgcaaaatacagcacggaaaacaagactacaacatatgtttcaaccgtcggactctcttcacccaccacaccttacatcgacaatcaacgacaacggcagggtcaaatggaacccgaagacgaatttgatgacgaacacggtaattcttccgatttaggatcaaccggtagagaaatcatgaggcttgctagggagaaaggccaatcaaaattgttgaaacgagcggctggtcgaagtatacgcaacaagctagcatcaaaccgcgggggataggaacctccgtgtttgagatttatcagcttcgaacaatggatctacatgtgtaacttctgtccgtatagtaatcatagagacaaaattcacttgcctatcgcgagagtgaagtagaaagtgaaaggttgaaatttgataagaggaagcaaaatccacaccgaggagttctcagagtattgttacaaaacgagagcaaatgataaattaaataaaacgagtaattatattttacggcaatgcagcctaacctttatcgaaaagacacgattaggaatgaagtgaaaggatcatgattgggaatagactgaaatatattctcattgctgctgcttgctagaagcatgacaatgtagagaagactgtcgagaggtgagagtgcataacttatctaggagagcgttgatcctgttgaccgcgattgagagaagggtcagttgaaacaagacttttcgaaaatgagaccgttgtgaaatcaaactgtcttgagatgacacgtacctataaggcttgatgataacctaagacaaggacgaaaccaagagcaacattagcggccgaagatcttcaatgtctttcgggaaagaatatggacaagacgtacatcatccattccaacctcaagcatacgctcaatctgctcttttcgagcatttcctgtcagtgcaaagattggcactctctttggaatctgaagacaacagacgaggaaaaatatatgtcaatatgaaatttcgatatatgcatcttctatgcaaacacttacgatgccatcgtcctccatttttcggatgtgtgtcacggaagtgattccatccatcacaggcatttctataggtttaaatattcaagcgatcgagtgttcaatgtctttatcaaacagacagagcttgaatcatggcaacaatgaataaatagacgaaccttgatccataaggatagcgtcaaaggtcttgtttcccaaagtgtgggacgcaacgatcaaatccaaggccattttcccatcctgcaaatatcacggaaagacagaaccctttaggaggggttcatcaagtaagtgagtattgttttggggataaggaagaacatacatcggcgcattcacatgtcaatcctgctttcatgagctgtcttcgcaagacctagtgttgattccaagagaaagcagctgagtgttagacgaaatttctaaatcatgaatttaaatctggagtgtaccttttgattgatttggttatctttgatcaaataagatagattagcagtgtaattgtaaacttgactcaaaacaatcagcaagttggatcaaatcgacataccttcgacctgaagacaccaatatatcaatattagtgatcagttagacagggatttaccttgctcgtatttataacttgagagaaactcacaactaatatatgtaactgaacgaccttggttgtcacactcgaagcaaacaccggcttaaggggatgttggaacgacaagggcgcgtcagctttgataaagaaccggaaggtggaacctaaaagaggatacaacaacgttgagaaaagatcagaatccgcgtgataaattgagcagggataagagccaaccttcgcctttcacagattctacgttaatccgaccgttcatgagctgaagtttccgataagtgtcagctcgcattcttgataatcgggtcttgaaatgagagactgaccgaagttatcattctgcacacatatagtcccaaaccactacccccgtacacagcatgggtagaggacgatgcctaaacatatttgtaagaggcatcagtacaaacttaatactagggcaaatcatcgaggcgatttacctgagaaaatcgctgaaagagtctagtcaattcttccggagtcagacccggtccagaatcagtgaccgctccatatatgtagcagcttgatccaggtgtaacgggtacgcttgttttcgggggtcgacacgaatcgtcgtccggtgcagcgctggcaacttcaatgctaactgaaatctcacggcggtgcatcgacgctttatccgtaaatcgaataccttttagggagtgatgatacagggtcgtcagtggaggttttaaggctaagtgttcaataaatacctaccgttggagatcagattaatggcaatttgaccgaatcgaacaggatcggtgagataaatgtgttgaccgtccggtttggcaagttctccaactaggtctagggatatgcggatttctgatatgttcgccgaatcggcaactgtgagctagactgcggctcatagatccaaagtcggaaaacacaacacttacgcttcatgcgacactctccttcaaacactgaaataatcttccgacactcgtcaggaaggttgacatctgtggcgaagatctcaagactttcaagttgaatcttgcccaacgaaagaacatcattggcaatgcgttcttgagagagagcctgaatagcagattgagaaaaaagttgatattctgaaaatcattcacatgaccgagatttgatgctatagaatggcgacataccatttggtgaatagattccaaggcgtctacatcctcatcgatgaggttaattagctgtgatgaggacgaagcatttagcgatcaagcgtttagacacagttgaaacatgattgagtaatagcttacctcgctcgtaggaaagtaagccttgccgctattcagcgctgtttcgagttctgttatgcatcgatcaagctacttagtttcactttcattgtcatataagcttgtaacgtacctgtccgaataactgggcagacgagaaaatatggatgtaaggatgagcaaggatattccaggactttgtgccttgtcaagacttgcgaaatcaacttacaagtcaaatttgacttgcaaagaccagcacactaccaatatacacaagaaatgagctcatttgggcagaagtcaatgtatcttggagagagtacaacttacttgcaatatagcagatacaggattcctgacttcgtgagatacgacggagaccaaaaactcctgatgacgtctgcgataaaatcaaacaagtttctgttcagcttctgtctttcaaatctgattattaatgaagttatatgcactttttgtcgtcggcctctcgctttgctgcttcggcacgtaacaggttctgttttcgctcttcctcgatgcgcttctggttggtaacgctatatacacaaaatattgtcagtcttacaataagtaaccatatcaaatcagatgagcaagatcatgatatgtactctgtcaaaacacatattgtactgtgatttttcaaataaaggcgtcacagatagcctaaacaacgatcttatgttcaatcaagcctgacacttaccctacgagctgtttaatgcaccaaaaattcaaagtttgttaaaaaaggacctgacctgcctgcatagtgataccgtttggtaagaccttacactttgagtatgactagaaatgatcacagcttggcagaatgaccaagtgccatttgcccattgccctatcgttatgcaagaagaatgtacaatgagttcgatagcacctgattgtgcaatagacggacgtggactcacactcccaacttgaagccttcttctccaggaacaactcgttataaactaaggaatccagaggtcaactgttgagaccacttatttaacatgttatatgaacgaccggtgacaagactcactctgttgaagatacggcttgtgatgatctgcaacactatctaaccacagagatagatctttatcccttggatgcccgctttgagttctccaggcctcattcactatcaatcaaagaatacaataacggaattagacaaaatgtaatatgtgtgatttctgagtcaagtcatttcacgtaccatagctagtcatcatagacgcaataggggccaggacgacgaccggttcagtggtttgtgtgaaagacaatttgaaggtgttaatactcacatgatctcgccatcagcattccatcgagaaattccgaccggcgaagcatcggacaataacttcgtagccgcagattgttctcggaagttgcgttccagctccagtctgctcttgcccaactgcagctgaagatgagctcgagcaataagctctttagcggagaaaggcttgatacgaccagaaaaagggatatttaaaattgatgttaggtataaatttgtcaacgggatcttgggaaataaattgcacatactttactaagataatcttctgcgcctgccagcagaccagatactcgctcctcgtcaccggcctgacgatatcgtgaatgagccactttgtgcacttgagctgacgatgaagaaaagaaataagcttactctagcagaaataaggatgacaggaattaacgcgagatcaatatcgtcttcatcaggattctccttgcgcaaagcgcgcaaaagtccgtagccatcaagttttggcatagatatatcggacaatatgagatctagatgaagattaaagcacataagtcttggagcttgatgaccagattttacgtttgaatacacgtcgactaacttggtttcgctgatcgagcaagtgccaaagcttcttctccatcgcgagcagtgatgactttacagaacgaactgaagatctatattgattcatgtagattatcagacccacacgtaactcgatgcaggatgcaaacggacttaaaacttacctgattcatgtattgtctatcacgagaacgtaaagatagaaaagcgcgtgagatcgatattctatataagtcactcaggcgtttttcttgagtgcatacctcatatcagatctgattgttgacaaacacgattgttgtgtcagaactttactccgcacaaatcaaagagaaaagtaaagtgacttacgaatcatctacaatcagtaccaaatcagatgatttattccaatagagtgaatctgctcgtccggacgactgatatggcaacacaatatccagaagagagaaaggatttagaacaacgattgccaatctcaagaagctgtaacaagtagattcagtacctctgaagcagataatccactctcagaaaccgaagctgatgttccgttccgagagttggaccatctaacggcttcgtcgacaatccatttggagtaagtagatgagagatttatggaagaatcaatctcttcgctagtttgagatgctggaagatgacttttgccgtaaggtaagaagacagatactgtggtgccactttcacctgttgggctttcctcttcagtttctgagtcaatctgcaatctcccagaatgtagatggaccagatcagagcaaagagcaaggcccatgcctgtcagatcgctcaaatgatgagcacctaaagacaatcttccgagacttagcgaggctaaggagatgcttaccagttccctcgtgtgatcgtgctgtacacgtaactctaaagaaccgttcagtgactcgtggaagatcctgctttggtattcctacccctgtgtcggtgacgcagagctcgacctccgaaggatggtgagagctgcatgatgcatgcaaagaatatcgaatgttatttcaatcagccaaagctcttgcggaaacaaagaatgtatatgcgtaagacagagacatacacgcgaacagtgattgaaccgcggagtgtgtatttgaacgcattgcccaaaatattgaagacgatcttttcgtacaactcctaaatgattatatcgacagaatgtaaattagttgatcgagcaatacacacacaatgaacaggttcgaatacaagccaggcatagatcaaaacagtttcttaccttgtcaacatagacaggtcgtgcaccagattcaacttcacaatcaacaacatatgtgatacgagcctgattgatgatttgaatacacaggcagaagcaacgggccagtgactttatgaatgactgacgcaatcttctcaaactgcaaattgattgatcaacatactcgttctatcgccgatctgaacatttcggatctgctcaatggacgagagtcagtcttgcatctgtgaagggattgaacagaattgggatacttacaattctatagttgtcaaagagaagttaatcgggataaaccgacctgacatgcgcccaccttcgatacgactttagagaatagggattaagagtttcacaagtcagatcagaatcagtctctcaatacatacgtataccactcggcgatatttggaggtaaatatacctaaaatccatcaaggagtcgacaagtctggctaatcgcgtcgaatttcgttgaatcatagagaaactagccttcttcttcggatcgctctctcctgcttccaaatcagaaattggaccggaaataagctaatggtttgagtaaaaagaaacaagtctagtcaacaaagaagacttctactctatagtaaagaagagccaaatttatgacaaacttgtagaggagtacgaagctcgtgagatctgatgtccaagccaagtcagttgagaaagacttctcatatttgtcaagatcaatatctggctaggccggtgtacttacactgagctgaagaagagactttttgctttctctatactttgcagctgaagttctctgtccatatgagactcgaaggaagtgatgatcgtcaagtttgagataagttgaagtctaagatcatctatccgggccttgtacgcggaatctaatggtcgacgggtgttgagaccgatgacgaggctagaaaagtttccgatacaaacatgagtttgataaagatccattaaatgtagcgaatatgatgaatgatcgaaacgggacaaacaaaaagatcttccctcttcgttcttcgttgtttgctattttcatgatgaccgcctgtttggtctcgtctccataagaacctgtatcatgaatgaaattttaatagtatgaacatcagagaaagactggatcaggttcatgcttacgatatctgatttcctcaggtatgttgacatgaacgtccggtaatgagattggttcatccgagtggaaagccgcctcgattgcttccttaaatttccacggtgtcaaatctctgttttctgaatttttatctaacgaagtctttatgaatgtcgatcttggtaataccggatggtctaagggtatcccaacgcttcctgctaaagttaggttcgcttcgactgatatatctgtcttctcccccgaggcggtttcagatcggagttgatacaggaaggcgtaaggaaaatctcgttcattaatctcgagagatttcatgagacttccgcagaattcggaaatagtacgcgcgggtgtcaatcggcgaacgatttctctggatgtttgctgccatcgttcgttcaagactttgcctgtgctgtcatgagtagtaaccatgataccatctgaaagtttgttgaacaaacgaatgagaaaacttatcattttcatataggggtttgagtgaaaaaaatataaaaggttgtaaaatagaacttacggcattccccatctcccgagacgattggggtccatttccaggtcaagtgttttctattgagaacaagttggttcattttgtttttagaaaagattgagttacgccccttcccatcgtccatcttgatggagaaaataagacaaagatcctcactccatgccgttcaagaaaaaggtatctgtgcgatgtacagaggtaaaaatgaacggtaaacttatggaatcatgattcaaatgcaggcggaacagatgactaaccgtccgatttagagacgcctgttcttgttttttgacagtgtaaagctttttgtttgacaaccatccagttctgctcaacccacgaatgatgtcagaagtcaggctatggaaattggtcacgcaaaaccatgcaagaagaactgtacttcatccgcccaggccacagcttatcattgatatgcacaaacgattgttcagttaattcaccattggcaaacccaaatgatcggtcaggctattcagtgagtaaacttacaggcaaaacttccaaaatgattctcatttaagtcttggccataagcgtcgttatctgcgaggaaaacaaggctagatatgattagaagttgatgttgaccacgaacgcgacaaagaaaaaggatcaatcgcgcactgattataatccaatcatcgccatatgaccaccctaaacggcccgaagattatcaaggagagaggatcagaaggtaagatttgatctcttgaatgaataaggtcgactgtatggaaatgaaacctacaaatgtaggaggaatctgtgatggaaagaagcatgtttacagtcgtgactagaggcaccggccatttgtctctcttggaaggatttaaaatcaatgagaaagagtgtgaacttgagaaatcggtcagtcactgaatcatgaacaatcacccaccggtcctaagggatggttcgcccaatcgaactcctccagtttcttcttcgatttctcgttgattactaaagttgggggagccggcacttgtgcatcctgcgctagccaactatccatcaagatacttgactccgtcagtaatttgtgatgttcttccgccataggtgtatgcgcatcattcccgtcgctcgaatatccctggccgacttctatcctagatgttatctcatccccagtgagttgttgaagatcctcccaggcgaccgggttgacagaggatgagtggttttcattggccttgggtttgggtttgtgactattcgggcgagatatcggatgaagatgaagaatgagaaagctaggatgactgctcgagactagaaggactttgtatgatcgtttccgtccccataaaggaagccgtacggtgatatccatttcattcccgtccatggaattgttaccatcttggaaggaattgtaagattcaatcgaagagggtgctcgaacagagggaatggatatggcatcggccatagcctggttggttgtatgatctttatcagcagagataacgccgtcgaggtcttggtcgtgcgcgagaatcaaagacttcattcgagcttgatctagaggcgaaagaatggtttccaaatctttccctaaactagcagccgacgcggccggattagtccaaagtgataccaggcttggctcagacgaggaggaaagccaacatgaaaagggagagcgagagtgccgggatacgaaagagatggtcgacaagatcaacatatataacttaattgtctcaaccttcaatgacgtactcttggactgggaaggacaaaagaaggatgaggatgacaagctaggtatggcaagagagttaagttctgacgaagaaaagaacggcagtatgagaagttgtataagtcttggctattttcataattgatccaaagccatcaagtcttctctcttaccgagaagtctgggtagaacatattcgaagcagccggatctacgtctccctcgaccgtactcatcttgaaggtttgcctgcgaagggatggataagttgttgttgatgtctaagtcttgtgcgcttccgtactatgattcgttctccatccgggccagcaataagttcaaacgccgtgtaggctctacgtaatccacggccacgtggggcgtataatgcacgtgaaagattttacacagccttcgccacattcttcacacatcacgtgcatcacaaggaggaagccccatcgagtgagacactcgctctcgtcggtcttctgcactaacctttcaacgctttcaacctcgcaatagaccttgctctctcctctatcttacttatcagcacaaacaaagcttattcaccctttctatagtctgctgcaagaaagaagagatttaaacagaagcatgaccttggtcggaacccttctcaaaccgttcactacactcagtcttctttccgtcccaatccttttcgttttcagaatgaaatcgtaagcgttgtttctttcgtttttgttattgtcacgtttccatcttctccgtttcggaggattgaggtctagcttccataagtcttgccgataagctcaaacgagtgggatgatatctagatgcaaaggaagggagtagagggaagaaaactgagctagttggcgagagcaggatattctccgttccgaggttccgaccggctgtactgacctggcagccattttctccttgctcctcggttttcatgattcacctcttcttagacaaaaagccagatattacatcaacctgtcgatctacacgttgtgtctcttaacaaccagcgctgtggccattggaatcagtcttacgctcaccttgtttggccaggtcagtctccaaattacctggttcggggttttgattagctttgctgtggttctgacaactaacgcgttgttttgtgatacatgttatccttccgccacccttaaatacaataatcacagagattaaatacaaactattgggtggcgagaacgttttataagttgacgtctcctattcttggaatcaagattgagattgaaggaagagaacatttagagaacaacggtggtccagccgtacttgttggaaaccaccagaggttcgtccctgtctcgttatccatttcctcaatccatcttcttcgtctgagaaatttcttctctccgataaaagctttatggatattctgtaccttggagcaatgttcccgaagaaggcatctattatggccaaaaaggagctttcttacgtgcctttcctgggatggtggagtacgcgctcgattactctttctcttgccaacatgattcgaattcttgatactaatcagacgatatgtaccttctcttgtgtttggtcatagtgagtttatcaggcactgtttggatcgatcgaaagaagagtaaaaacgctatacaggcgatgagtcgagcggccgaagagattaaaaagaaacaggtgagatatttctgatgtatgcctcgaagattctgttgctgaaattaatttatcccaaaatcagatttctgtgttcatcttcccagagggaactcgatcatccacaccgaatgcctcgctgctcccattcaaaaaaggggctttccatctagctgttcaagctcaagtgcctgtgattccaattgtctgccagaactatcaccacatcttcgatggaaagacccgaatgaacggaggcgtattgagattgcagagttagtcttttctgcttggatctatgcttctctatacatgtcactgactgattggctgaatttaatttcctatcccccttgttccttttttttcccttttctcgcagtcttgccacctatctcgacgactggattcacggctgattctgtaggagatttgtcagacaagaccagagagacgatgctaaccgcgctggtcgaattatcgcctccagcctcactagacgagagctcgatcacttcagcctcgacggccaacagggagtccaccgagcaacgacctctgctctactctcaagtagcatcggttgattcggatacgaacgatagcaacctcgaaacgacctatggtgctatcagtggcgaggcgagagagtccggggcaatcaccgaggaggatgaggttgatgaggatggggctgtagttgtgccgaggcccaaggcggaagacagccgataatttggtttctcttcgctgttccagcatcatccggactgttcagtcttggatttgtttgcttttgtttatgaacatgggtgtagactactttgttgtttcttgatcaatcgtacttcttgatttaatggattcccgaggtagataaagatacgaactggcttcttcctgatttgcccgacgaatactgaccgatatgagcggaccggaccgggattctccggtttgacacgtgacctctcacaattgccttgcgcgtcatcattcaccgtccctgccaactactcgttcgcctccttctttccccgagagatcaagagttgcctataaagccatgcgaccatttcgttggctttagatcccttcttcttttttgaaagcacacgaactgtacatacaaacgagcaccgaaatgacaaacctcgtcccacccccaccatcgttctacgacgagagctcgattactttcaaagcgcagaagactctttctcgtcttccggttccttccttggaggattcgatgaagaggtatctgaatgctctgctcgtgagttcttcaaccttcttttctggtctctatgactctctactgagatgagcatattttgaagatggatcgattattaattcgttttatctgtaattttgggtcttgctggaatttcgtccgactttcgtcaagtagggtcttcaggtgggtgatcgatgtcgtctgtctctcgagaccttctttcatagcatcagtatttgaccgagaagcggaacgatggaaattatatggaacggatgatcttattcttactctgatcttcatacaggatgcacgagaacacgaacaaacaaaacaggtcgtagccgagttcttgtctaatccgacccaaggccccaggctacaggagaaacttatgcagtacaatgaaggcgtctcctcttatatcgaagaattctggtatgagtcatatctcaatcagtctgaatccgttcgtccaacatttcctcttgtagtgtacgtggttgactgacgctcaggcaaagacaaaactgaatgttgtgctgtacgatgattcttataggttgttttgtccctcaacccgttctttgtactggaagatgacccaacaccttcgagaggctctcaattggctcgagcatcttcgttgatcatctcttcccttggatttatccacgatcttcgagctgggacgcttcagccggatgcggtaagaggaactagtctcgatatgagtcaatacaccagagtatggcgaactcccttcaaatggtattcagacacagttcgaggcgcaatctggctgataccacactgcttgggtgactagctctttggaacgagtcgtattccgacaaataggggatgtaagatggtcaccaatgaggaatcaagacatattgtcgtgatcagacgagggcagttctgtacgtctagggtcactcccttcatgatataactccgaaacacgccgtattcacccgcgcctgctttccatgtccggtaatttcagactggttcgacgtgcttgatagagaaaacagaccgctcttcacagagagggatgtcatgctcaatctcgaggcaatctgtaaagatgctgatattttgccaatccgagacgtatgtgttttctctgttctattttattgttatccattgagaattttcattaatttatgtgactcttataggtggctacttcctcggttggagtcctttcgaccgaaaaccgaaaggtttggtcgcatctcagaacggttctaaccagggaaaaacacaatgccaaatgtttgagtgttgttgatggcgctttgttcatcgtctgcctagatgacgttagtcctgtaggcgcgaaggagatctgtggaaacttcttatgtggaagctacagattagaaggtggaattcaaacaggaacttgcacaaacagatggtagggttcatcccgaatgaattgataatcggccaaagcataaaaggctgattcattctggctttacgcgtatatcaatctaggtatgataaagtacgtgcttttatacgagaaaccactttgactcctaataatctacagggaactgatgaagaagactgcttgtgattcacatagcttcaaattatcgtatgtgcaaacggagaagcaggaatcaactttgaacataccggagtcgacggtcgtgagtacatgtagttttcttgcgatatcgtgatgatgattgattgtttacaccatctttctcaacatagacactgtccttcgatatgcggctgatgtatacaccgagctcgttcttctattcgccaaagttcgtttatgtcagatgtgtggtaacatttgactccaagtactaattctcgttcacgtgtttgaaaaaagagtatcaacccttcagctccgacactcttcaaatcatctctttctccacattcgaaatcatttaaaaacaaacaaactaaattcaaaccgcccccgtctcctgtatccggcacggccaccaacggttgtcaggaagaagaagaggaagactatgaggttgttcccaagaagttaacttggcatctgacaagagagattcgaacgggtatacgattcgcagagacaagattgagcgatttgatctgtcaaaacgatatcgaggcgttggagtttagtggatatggaaaagatttcagtgagttgagtcgacactattaagaaggaagagtatcaaccgactgattgatggcacttatatagtcactcgacatggatttagccccgacgcctttgtccagatggcgttccaagcggcttactattcattatatggtccgttccaactcttctcttctgtacaaataggaatctgccaaaaacttgacgattgataaagatgtcgttttcgatccccaaaaatcattttgcaggtcggtttgaatcgacgtatgaacctgcgatgacgaaagcgttccttcatggtcggacagaagccattcgaacggttcaacctgctagtgtagcgtttaccaaagtacgtgtattctctatctccttctcaaacctaattgtgtgggtgtcgactcacgttgagtatatgttgttgttctattgttgatcgtgcaggcgttctgctcgggagcgagcacacaggacaagatttctaaattacgagaggcatgcaaaaaacatactgagctcacgaaagaggtttgtctcatattcgttactgtcgcgatttcgggattaaagtctaaacatataggcatcttatcgtcaaacagtgcagtaaaggattaggtcaagaccgacatctctatgccctctacagccttcttcaacgagaagttcgatcggagaattcttccaattctggatcatcagcttcagattcagatgaaccattctcgcctgtgaacggaaaatcacccagaatcgagattccttccctattcacagatcctgggtggagtttactcaacacttcaattttgagtacttcgaattgcggaaacccggcgttgagacttttcgggtatgtacattcttccagtcggccgtctcttctttctccgcctagttcatttatgtttgtctgtcactggcttttcgtatgatagttttggtcctgttgctgccgatggattcggattgggttatatcgtgaaggaaaatgggatcgccgttgttgcagcaagtaaacatctgcaaaccaaacggtccgcctccctcctatttgtcgatcaattgagaacattcccttaatgctgactctattatcttctaatattcatacacacagatttttagacacgctccaagctgtcttccttgaaacacaacgcatgatcaaacaactctacctcgaagccaaccgatcgaccaattccgagcagatcgacaggcctaccgagcgcgacagagaacgcatcagagaagttatgttatcagggatcgccacaccaggaaccatgactcccaagatcatggaaccagaagatgagatggaagacccggaggacagtctggcgggctatggatacttcatgctggctgaagatggcgcaaacttgaagcgcgacagacctcgacgagtcggttagtaatcgttcgacagttctctttgttcttgtcggctgtaaatatactgacgattcagcattttcataacaaaacaaaaccaggattgacgctgaggatgccagaatgattgtaacctttttctgatattcagcttctcttgcggtctacttttcccgactttgttctgtgttctcctgtgcaattacatctttagtttctgttcttgtatgcctcttcttgtctgcttggaaaaaacaaaactgtgtttgttgtacgtttgttgtatgtatcatcatgttcttgccaagccacctggatgtgaccaacagacacgcatgtatcatcgttgtttatctgatgatgatgatgatgatgactagggtatatctggaacaagaagtcatttttttccaacgacaacatgtagaaatgattgagaatttgaaaattaaacgaatcatgtgaacaccatgaacagcttgatacaaacaacgagagaggaaagagaaatgcctgaatagagttggagcacgaagcattggaaattagaagtatacaaaggtgctcagaccgatgaagaaaaacatcacgaaacccaaaagaaaaatgaacgcaaacaacccgaag

SEQ ID NO: 2795 - DNA, 3613 bp, Xanthophyllomyces dendrorhous
  misc_feature (72)..(81): n is a, c, g, or t
ctttgtgcccgagaccaaggggctttctctcgagcaggtcgatctgctctaccgagagtcgaccatccgggnnnnnnnnnngctcgaacgcctaccgaaagaggatgctcgagaccgacgagacgttcctccaccacgaggttcctgtcagagagaagggtggagagaagcacgaagtcgagcacgtctaaggatgttttcgaaccattcaactcttcattcctctttttgagatttgattgtcttctagtttcattctttctacttgttcactcgtttcgttcgctcatgagtttctaattgccattcaaagctcctttgtcgttcgtttgtacttgatacctcttcccctttttttatttgttctcgttcttgtttctagtttttctactgctactttaccgggcttgttgtaaccttaacactgtgatcacatgtgcacactttttcctcccctcgaccacgcgggcccgttctggcgggtcccgtgactgactaaaaaactatctttatacctttgacccgggtccttcaattcgggctgacccgagtttagatcagaattgactccctctcggcttggttaaacgccgactgagacaaatttgtttacccgctcgaccatctgttcccaaggtttttacaactgacgggatcatatagaccctttgcgggatcggctgctaacccataggcaattcctttttgacttgacaaagcggacatcatttggtatagatggatttgacactgtttgggatcttgttggctcagcatctggtaaagatcggggaaggattggtcgatggatggtcggatctagctaggaggaaaacacgttgaagtagggttgttggatcatgtcggtcgagcctgttgaacgagaaaccaagaggacagggcgatcgaggtcgagaaaagaacccaagatattctcaccgagtattacaacagatgacgaaccgcgcgcgaagtcttctgaagaaatagtcgtacaaccgacatatacacacatacatatacaaacatatacatatgcatgtaggaatacatgggttatcacctgatgggtaggatgattgaacatgaaagactgacgacgaactttccggctttgatttgccgagctctgagattgtctttatctgcttgagtttttcgaatcaattttcctctcagtttgaagcaatagctacgatcacttattttctgtcttcttcttgacgattcacgtttttgagtgcgccgatctcttgttggatgaggaccacacatattgtctaacccgggttctatactaaggatcacacctggctggatgactttcaagcgggatgtggacagatcgagatggaaactgatttgttaatagaaaacaactacggggatatttcacttccagtatttgactataactccagaactcgatcagactatggaagtctagtgtggcccagtcgttgtaggtattatgatttgtcgtcggtctggtctggtctggacttggaggaggaaaggattgagggaacgggaagggactgctcagtgatttgcacttcttttctagaggtcgccttgtagtaaaaggtgagactctctttcgaatgactcggtcctctcaaccattcccgcttttctcaacaccattgccgatctagaccttcatcgattctttttgacgcaggtctatattcataaggctgatcgcacttgccctccgccgtctcgtgcaggtcggctgttccggttacttgctttcgactctcttctctaactcagtccgaaaaatatgccggctcgttcgccgccgttctgaccggaaaccgctttcgtctgcctttcctttcccaacgtgtctctccgaccgagcatacacacactctgagcatacctgggcgacttggccgaagtcgttcccgtacaagcgatcccataggttctcgttctgtcgggtagcttcctcgtcctcctttttcctataaagaccatccagtccagcacccatcattttcttctttctctcactcatccaaacaatcaacacatcctctcttcttcaaaggagtttctcaactcactcagcaacaacaaaaacaactcgccttttccttcttacactacttcaacatggttcgtcgttgtcccttatctctccgttcccttcgcatgttaccgttcattgctaacacttgtcccttcaacagcctgccccaggaacaggtgccggaattgaatccggtagcatggtcatcagcatcttgatgaccgcttttgccgcttttggtggtattctttacggtgagtcccccattctcccatgtcctcctcaagcgcttccgacctaatcgactgcgtattccttcaggtttcgatactggaaccatctctggtctcattgccatgcccgactggcttaagacgttcggagcttacggtaagtctccttgcggatcctccgatcttcatcgtacataaatctgaggcccctcttcgttctctttatcctctagactccgctaccgacgcctatgtccttgctaccaacaaaaagtctcttgtcgtctctattctctctgctggaacattctttggtgccttgctcgctggacccgttggtgatagactcggaaggcgaatcggtctcgttgccgcttgcggtgtcttctgcctcggtatcggacttcagctctccactagctacggtgcctttgtcgccggccgagtcgttgccggtctcggtgttggacttgtctcttgccttgtgcccgtacgtctcttgtctctcccagtccctctctcatcttccgttccaaacactcaatctcactttgttctcccgattgtagatgtaccaatccgagtgttgccccaagtctgtccgaggattcgtcgtcggttgctaccagtgggccatcaccatcggtcttctccttgccgccattgtcaaccagtgcactaagaaccgggccgaccactctgcttggcgaattcctattggcattcagtttgcctgggccgccatccttgccaccggtatgatcattcttcctgagtctcctcgatggctcctcctcaagggcaagaacgagcaggcccgaaaagccatgtcccgattgacttcccgacctgttggatctcctgaggttgaccaggagtgccttgacatcactcttgctttggaggccgaagccgccatcggtcagacttcctactttgattgcttccgaaacaacggcgcccgaaacggtctccgactctggactggtatctggctccaggcttggcagcagctttccggtgtcaacttcatcttctactacggaaccaccttcttcgaggcttctggtatctccaaccctttcttgatcaccatcgccaccaacgttgtcaacgtcggaaccaccattcctggaattctctccatcgatcgactcggacgacgaagcatgttgcttgccggtgccgcagtcatgcttgtctgccagtacctcgttgccatcattggtgttaccgtcggtaagactgatgacgcccagaccatcaacttgaccgcccagcgagtcatgatcgcctttgtctgcatctacatcgccgcctttgcttccacctgggg

SEQ ID NO: 2796 - DNA, 1811 bp, Xanthophyllomyces dendrorhous
acgagaggctaccctcgcagatgggtatctaacgatgaagcttgcgctaacagtgagctgttacctttaaagcaactagcttatagaaagcaggtatttcgcctgtagtcggctcgtacccgacgttgcttttaggtaacagcgtctgctctctcccgagagtagcgttgttcggtccaggagagccagttcctgtctcagccctctaacgcttgcgattgggaggagagaataaacattactgccttacggcaatctggtggactctaaatgggtccactacaacgaacccattttgtgccacaggagaccttattatacttgtttattatgtttactaatgttttcagccctcgctggctcctgtccacaaatgcaaaggatatcggtaccctctaccttgcctttgcggtcatctccgggatgctcggtgctgccttttctatggcgatccgcgcagaacttgcctctcaagggatccaagtccttggcggtgatcaccaactatacaacgttgttgtttctgcccacgcgctccttatgatcttttatatggttatgccggcgctcgtgggtggctttgggaactacctcctccccgtccagattggagcggtggatatggcgttccctcgtctgaacaacatctcgttctggctactgcctccctctctgatgttgttgctcttgtcggctcttgtcgaacaaggagcaggtactggatgaactctgtacccgcccctctcgagcctccagtctcacagtggtgcttcggtagacctcgcaatcttcgcccttcatctcgctggtatcagctcgactctaggcgctattaacttcatcgttacactcgttaacctccgtgctccagggatcacgttcgaccgagttccactcttcacatgggccattgccatcacggccgtattgctactcttgagccttccggtcctagctgggggtattactatgcttctaacggaccgaaacttctcgactagcttctacgaccccgctggtggaggtgaccctgtgctgtaccagcaccttttctgattcttcggtcatcccgaggtttacatcctcgtgatccccgcctttggagcggtatcccacgtcgtaggtgccttctcatacaagtctgtattcggcaccctcggcatggtctacgctatgatgagcatcggcgtgctcggttttgtagtctggtcgcaccacatgtataccgttggtatggatgtggactcccgagcctacttcaccgctgcgacgatggttatcgctgtgccaaccggtattaagattttctcttggttggctacgctctatggtggcgcccttgaatacagcactgcattgttgttcgctcttggatttatcctgctcttcacgctcggaggcgtaactggggtagtattggccaacgcctctctcgacgttgcgatgcatgatacgtactatgtggtagctcacttccactatgtgctgtctatgggcgcagtgtttggtttgtttgcggccttctactattggttcccaaagctcacaggccgctctctttctgaattgttcgggaaggtacacttcggtctactctttgtgggagtaaaccttactttcttccctcagcacttccttgggctagctggtatgcctcgacggatccctgactatgctgacgcattcctcgggtggaatcgagtctcgtcattcggtagccttctgtctattgttgctacggttgtattcctagttcttctaggtcaggctctttctactgggcgtgtcgtcacagcggcatctccatggac

SEQ ID NO: 2797 - DNA, 511 bp, Xanthophyllomyces dendrorhous
acagcggcatctccatggacaagccctgactttaatacttctgccgctgttcaagcagaccgggtttatggtgtcgaatgggctgtagcttctcctactcctcttcacgctttcgagcagcttcctgttgctacaactagctagctctaagctgtgaatagtcgtaatgatgttcgttgttacattttgttttagaatgtgaagctttatgctttatgcagtacaaggctaaatgtatttggtctatacctttaggtggtgtagtgaagggagcaggtggtgctccttttaatcctctttgctcggctgcttgcgtcgcaagaagtaaggctctgaaggtctcaaaggtctatggaaacatatgctcggagaagctctcggagaagtcgtcgaacctcgagaggctttcctcgtgaaaggactcatgtagaggggtaatggacccctatctggtggctttatagcatgaaagagtgtgaactctctctcttccagaggctaggtgagcctc

SEQ ID NO: 2798 - DNA, 1404 bp, Xanthophyllomyces dendrorhous
agcgagctgagtacctccgaccccgatcgagcgtacaagagtacgcctgtgacgggagtcatcggagagaaagctcaaagaagacagctttctctgagtccctgtaccgattcctccctgtggggtctcgaagagaagattcactatgatctagtgttccactagaccaagagctcatcttatcttaaatgagtatactcgttagcactcgcatcctcgatcgcttagcgcaatggtagcgcaaaggcttgaagcgcctttggtggaggttcgattccttcagtgatcacgatcgacctgatcacctcggatcgactgaggatgccccctcccttactgcttcttgatccttgccttatggctgatcaagcagtcttgtgaggggctcgtcctctacgacagcggagggtataatccgccgaggcattggacgagttactgtagtaattaactcgtctatgcctcaactgacttatacttatttttgatttgttgaatttgctatggtcggagtcgcgcttggcgtctctattgtattgctcggagtatacgctcttccttcgctaaccgaagcacaactgatccgatggtcagttgctagcctcggtgtagctccgttcgtagctactcctctcgagcaattcaagagcacgcccctcctcctgcttgacgcaaattcatttatgctgcctctcacagtctccgggctgtatacaattctgcccgtcgtccttctcggcagcttcttctttttggtccgacctactgtcgtccctcatcgatgaagtgtcgcccaggagtctattggagcgacacttctttctcttgtacgagcgcagctcggaaacaagcacgaagtgatgtttcctctaatgactgcgctctttcttgttgtcctcgtccttaacgtactcggaaatgttccctacgggtttactgtaacctcctccctgtcggttactcttggtttgtccttgtcaatctggttctatactcttttgcttgggattgccaaggacggcttgggcttcctatcacacttcgttcctgatggaactccgttggtgctagcgcccctgctagttgtaatcgagacagtaagttactgtgctcgagccgtttctctcggtgtgcggctatttagcaacatgcttgcgggtcatacccttctagcaatccttagcggattcctaagcaagcttgttgtctcttcagccgcagttggaatcgcctgtatcattccttttggtttcttcgtagtcctagtcggtctagagctcgctgtcagctttatccaggcctttgtcctggttgtcttgacagctagctatatccctcgttagccccgagaaacgaaaggctttctacagccgatggcttgtgtcttcttgactctacgagtct

SEQ ID NO: 2799 - DNA, 2071 bp, Xanthophyllomyces dendrorhous
agccgacgatgagctatgaattaaggaacgaaagaacaagtccgataggatcaataacgattagcctagagggctcggggaggcgacaaaagctctacgctacagggcgtaaccaagaccaacgggattgagtgagtctgtaagcgtagatgttagaatcccgccgacaaacacggctaacaagagcccgaagaggcagtacatctctcgtcgagacaggtcagaggagaccttcagggaagggcttcatcgaccgtaggcgatacgagagtacaatcaaaccgagtagactgcgccaagcaggacactcgatcccgatagaaccgcgaggagcggatgtaagaggtacaaaccaacaacaacaagtacctctgaaatccagttcagagtgatagggatcgcgatgttggcgcaggaagcgaggaagaagaacgtggccgagagaggcataagcaaggtgaggccacgaaagtatcgaaacactcgagtgtgataccgctcgtaaagcacgccccctacaatgacaaagagggcgggcgaaacgagtccgtgagctaacgagagaagaaggccgccagaggctgctgtcggggacagggcgaagagaccaacggtcacgatagccatatgaccgacagaagacaaggcgataacagccttcacgtcagattgccgagttatcgaaagacacgaaagaacgagggtaacagaggcaatcgcaaagacgaggggctgaaagcgcaaggaggcttcggggagaagttcgaggcagacccgcacgaagccgaatgttgctagcttcagcaccacaccagccagaagaactgacatggcgacaggagcctcagcatgagcgcgatagagccaaagatgaaaaggatagagaggggtcttcaccgcgaacgatagtgcgaatgcaaatcagagtcacgcttgcgttgacgaagcaaaatgagcactagcgagagagtcaaacgtgagagaccccagctctagccaaacaaagaggatggctaggagcatagcgagtgagccagccaaagtataaagaaagaagaggtaagctgctcgtagacgggcagcaccgcttcctcaaacaccgagggagatcactacggggacgagagacgcttcgaaggccacgtagaaagtcataagatctccggagagaaaaacaatcaacaaaattgactccagagccaggaggagggacgagtagctcgtttccattgagcgtccagtggagtatccactgagatgagcaataggaaacagagagctcgtcaggacgataagtcacgcggacaaggcatcgacgttcgcgttcacggtctggagtcaatgaccccagacaacaagtgttgccactattgtggtaatggcaacacctagggctaccccccgtgagaggtagccttggagacgagaagcgctagctgcgagacctaaggcactgacgagcgggagggtagacaacaacacaagcatacaaacattaaagcttccttctcgaagctttaaggtttaagatcaaaaagggattcgaacccttgctgtccgaagacaactcgttttcaagacgagcgcattagaccgctctgccatttgatcggggctaaccccagaatgcaaaattgttgaccgaaggtcttatgattttgctctatcaacagcaacttcctgctgcgcatgggtagccccaaccaatctccattggcagagcatccatgtcttcttagggacatgagactcatacggtcttttgcttgccgtatgcagtcatctcatgctattccctagcactcattacaacacaatagacccttacaggtctactgtactgcacagcttcatctcccattgtacacgctatacatcttctttgcttactaatgcccttcttacaggatgtacggttcacccaaagaattgtgtgatgtatactttcctcatgcaggtactgctagctattcttcatcgcaactgcttttctcttcccctcctttcggcctatagaaactactaaccgcatccgtatttgtcgctcttacttagaggggcttatcccgag

SEQ ID NO: 2800 - DNA, 1396 bp, Xanthophyllomyces dendrorhous
ccaacaggcccgggagggacagatgtcgtctcttacgaaggctccataagcaatggatcttctctaggtttggcctgctgagagaagagacagttacaaaaggagccacagtaaagagagcgacggtgagagggagaagcccagttcacccgaacaccataagagaatcatatcggagtcgagggagtgtcccacgagctcagacgtagatataaacgaagagtgaggccttaagcccaaggagggctttgccgagcaacatatccgaggaggcgccccctaggaataagacacaggttactgtgcttatgagtacaagggcggcgtactcgctcaggaaaaacagaacgaagggcatcgaactgagttctgtcatatagcccgcaacgagctccgactcggcttccgggaggtcgaagggcacacgattcgtctccgcgagggcagagatatgaaacgcgaccaagactggcgctagaggaagaagcaatcagactgattgctgaacctcaacgacagtcgccaaagacatcgagcccgagatggcgacgactacaagcactgcggtgcccagagtgagctcgtaagagatcatctgtgcagcagcgcgtagtgcaccaacaaaagcaaagctatttgcagtcgaccaaccggcatacaagacgccgtagactgtcagcgtggagagcaagatcaatacgagaaccgagtaatcggtctcgtagatcgctagtccacgcccaaagggtactacggcgaaaccgaggagactgcaaatcaggctcaggaggggtgctagcatgacgaagatgcgcaaggcctgcgttggctgaacaaattctttagccataagcttaagcgcatctgcaaacggctgcagcaccccgtaggccccaacagtattggggccaacacggcgttgcatcgctgcgagacctttgcgctcagcaatggtagagaaagcgacacccaagagcataggcagaataaggaaagcattaacgagagcaaccatagttggtcgagtcactaaccgaattcggcctatgcaaacaggaaatgatacccgtaaagggtggggagggggcacacaagcctgggagaggttctcacaggcaactcgtagccaaaggttcatatgctttggctactcaccgctagtgcttctgagacaagctcagctgtaactgagcttatcctcgttaatagtctcctagactatcgaggatgtctagtcagtagcacaagtgctcctttcgacgatcctgcaacgtgatcgacaggagagtcgaactcctgtctcaagcgcgaagagcttgtgtcttgaccactatacgagtcgatcgggtgtgtactcccgagatagacgagtatcatttgaaggcaacgaggacct

SEQ ID NO: 2801 - DNA, 1010 bp, Xanthophyllomyces dendrorhous; identical to SEQ ID NO: 1246

SEQ ID NO: 2802 - DNA, 378 bp, Xanthophyllomyces dendrorhous
tgtgagcggtaacatgacccttctccaggcgatttcaaggctcatgtcttatacaacttccttatcgtaaacttccttttgtgaggaaagctcctcgacgtccgacagcctttccgagagcttttagagccccatgacctctacgatcctttcctcctgccgctactgcagtgtcggctgcagtcccccttagaaagctcccgagctttctcctctccagggagtctactactcccttttccacagcagtggcgcctgctgttttatgatttcttctaaagactctcttgacgtcacatgtcctttccaagaggtctttagctctacgatctccttcttagcacaggagttctagactcctttcggctgtagtatcgg

SEQ ID NO: 2803 - DNA, 2685 bp, Xanthophyllomyces dendrorhous
taggctccagcctacctagctctctacactaacctgagagtgtagaccaagtctcatgagcacaacacatataaagagttctctagtctagattctaaagacaagcacaaaggaagtagaaaagagaagtcctctatacaaaagctataagactcatagcccatacgagggaggcaaagggttctaagaccaccatcttagggaatctacgcagccataagtgcgtagaccaaaatagcaaaactaagttacatctaggaagcctgcctcgtgttaaggttatatagaacctagaggcagagatgagtagagttgcgctagcaaaagtcctattgaagaaacaaagggctagcaggtttgcaggtaagctaactaataagaagactacaacatctggcacagagcctctaaagaaatatagctagagaggcgatgtaaacaacaacaagaaagagtgaggcaccgaagtaagctgcgatgccgaaccccagagtggctcctgcggtcaaaagcacaagacggctaatgcccggaccagaaacgcctaggcgtgaatgggcgagggcaagcaagcttgtgctaagaccaaaaggaccaacaagctcaaagagtcctcgatcaagagttttataagaaatataggcagcagagaggcctgtgcgagaaacaccttgagcaaggaaggagtcggtaccccactttgtctggctaagaatgccagccaagtaagaaagacgacgactgcgcttaaggtctacaggcacagagactcctgtggtgcctacaaacagaccaagggccgaagccactaggggcaaggtcacgaataatgctgaagtagaatattcagtgtcgagaggcgaggaagtcgaagggtactcagcgagacccaagactcctgcattcggcacgaatacttcactgaggcagtacccagccacgatcgaaagcacccccagaagagtcaaaatgactcgcactgttggggttgtaggatcgtgaagtcccgagaccatagcagaggtggcacgaggaagtccttcaaaagcaagataatgtagacgacctgaatagtatagcgtaagcgccgcacctaccagggcgagtattcaggtgacattatgaaggaccataaagccaccgagctgtgtctcgataataatatctttagaaaagtctcccgaggtgtaaggagcagctccaagcgctgccattgccataagcatgattgtagccgtaaagggaaggaatcgaaagagtccccccattaggcgaagatcttgcagaccggcaagggcatgaatgactgctcctgcaccgagaaagagcacggctttatacagcgcgtgcaatatgagaagcgagaacgcagctgtatactgcccagtgctacaacccaaaaccatatacgctacctgggaacaggtactaaaggcaataacgcgcttaaggtctgtctgccgtagagctgtgataccagcatagacggcagtacaggaaccgagaagcgttactcctgccatagtagaccccgaggaggcttcgagtagagggctgcaacgaataagtagaagggcacctgcggttactagagttgcagcgtgaatcagagccgagacaggggtcggggcttccatcgcattgggaagtcaggcctgtagacctagttgggctgacttgcctgcagcagcgcaggcgacgaggaaaccgagaggaacgagggttgactccgagagcgagctagaggcttcgcctaagatggatcagcttagcgatccagctccagcgaaggccatagcaagcacgagagtaagcgctgtatcacccatccggttaagcaggaatgcctgcacaccggattgcacagcattggctcgtgtataccacaaagagataagtagatacgagacaatgccaataccttctcaaccaacaaacatgatggcgaggcctgtcgacatagagagcacgagcatgagggctgtaaaagcaccgatatacagcatgtatcgagacaagtgggggtcaccctcgagataccagcccgagtagaagtgcactccacaggataccgtcatcactgtttgtaccataccggcagcagttgagtcaagaacgagggttcattgaactcgttgggaatcaacgaggaatcagtccccgagagagaggctcactgatgacgagcatcaccaaacttcataaagagaggcggtagcgtatagcaaaccgactcccatagatgaggtcgagaggaggagaactccttgagtaccgattcaccgagtaaacaagctagcgaaagctgcaaatactggacttagtaatacggccagtagcattacagttgagctagcgagccccgcatccgaaacacgcccacaacgagggccaagccgatagcgctttcagctcctgcgatactaatcgcaaggagagataagacgcttgaggctgagtccacgtagcgggttgaggctacaagaaagaataagctagcggctaggagcatcagctcaaggcaaaagagtatacgtagtacactctttcccgcaagagcaaatgcgattaagccgataacaaataagatcatagcaagtagcatcgatgtgaaacgagatgcaaatattgccctacactctagtgttaaaatgcttccatactatgcgagggtagcctctcgta

SEQ ID NO: 2804 - DNA, 2166 bp, Xanthophyllomyces dendrorhous; identical to SEQ ID NO: 1249

SEQ ID NO: 2805 - DNA, 2141 bp, Xanthophyllomyces dendrorhous; identical to SEQ ID NO: 1250

SEQ ID NO: 2806 - DNA, 1355 bp, Xanthophyllomyces dendrorhous
gacgatcggattggtcggtataggctccctatagaaagagcctatccctctagacccgatctagcgtacaagagtacgctggaggaggactctctagaggagagctcatgaacgcaggatctctggagtctatcctgcgaccaatagtcgtgtattcttgtttaataagcgttgcttattgtcgttcccttggaactcccattctaccgtgcgaagtagccgttgctactaacgcccgggcttacttggcgtagcctagaagtaagctctgggcttagctaagcgtctacgaccctttagcttaatggtaaagcccagaactgttacttctgtgactacggttcaattccgtgaagagtctttgcaggagtggcctaatggtaaggcactctgtttcggccggagtcatggtggttcgactccgtcctcctgcaaacactcggtagcatagtggtagtgtgcgtcttttgggtagacgcgattcaggttcgattcctgaccgagtgctcggcactaggccactcattattaaacatgttttacttactcgcttcgctcgccgtagccttcggcattggttttgcctcatctccctccccggtcgtctcggtgttctatcttgtttgtgcgtttgtcgcagtctctctatatctgcttaccctcggaatcgagttcctcggtctcgcatatatagttgtttactgcggtgcaatcgcactcttgtttgtttttgttgttatgcttctcgatcttcgagtgctcgagtctcgagaagcttcaatcgggctaagctcccgattgcccttggctctcctgcttggtatcattgctgccgggtcagcaatgctcttcttgcaggagagctgaggggcaacgttcgttagcccgtttctgtcgtcctcgacgattctttcgcttcaagacacgagtgtcttttcgctcgactcctgtcgaggactctcaatgaccctctacggctcatcttcattagccttacttgcaatgagtgctctgctactcattgctatagtaggcccaattacgattagccttctaaggtcattggcccccctcccccgttttcttctgctgtgactatcacagacgtcttgtcagcgtagctaagctacgcctcctcggcgtctcctcctgccccagcaggttgttcgcagctatcactgcgtttgttagcttttgttgccactgggccttctaggctaatcgtaatttaacctagaaggcttgttctttagctccttacttttgctcatcgtcggctgatcctaatcgtcagctagttacactaggcttcctcatctgcctcctattcgccttccggtgtctagaatcggcgc

SEQ ID NO: 2807 - DNA, 1571 bp, Xanthophyllomyces dendrorhous
tagagagccctggcgggtccaaggactagcagtcaaacaaagctagaagactagagggtccagagaggaaatctctctttatatccactctggacacttaattaccgggaggcgaagaagtggcagacgaggaagtctagtgcaactagctgacgtacgaggctagcctacgatgagcaaaagtaaggaacaaaagagaaggctctgcaggatcaataacgattagccaacaggcccgggagggacaggaaagaagcagtgggaggtaccgctcgacactttacggagacttgatgcgaagcttactgagcagagagacgatgtatctgtcgagtctactagccttagaacaagggctagagagagcctcaccaatacactacggcatataggaagagtcatacgacatcgaccatatgccagtagaggattgagctctcaaagcccttgtgatgagagctagtaagatggtatcgatagatacgccatcctcctactgcaataaagaggctgccgacgatcacgtggaacccgtgagtgccggtagccatataaaaagtagaaccgaaaacaccgtcgctcagagtaaacgaggtatctgcatactctactgcttggaaatatgtaaacacaactgcaagcagtagagtaatgaagagaccgaagagaacgtcgcttcgggagagttctacgagcgcgtggtgcgcgtaagtaatggctgcacccgaagagagaagcaagacggtgttgaagaaaggaagagcgtaagcgtctactggcactagcccaacagggggccaggcagatgcgagctcgactacaggcgacagagcgctgtggaaatacgctcagaagagcgataggaacacgagaagctctgttacgaggaacaggagcataccgagacctagtccattctggacgtcgagagtgtgatctccgaggaacgtagcctcgagagttacatcgcggaaccacagcgccatagtgacgcctgtaacgaagagcccgagagcaagagtgagacctgctcctgagacgccgtggaaatacccggcggcagagagagcagtgttgaacattgcgaacgaaatagttaggggccatggagatagcgtaacgagatgagacgagtgaagcattgacaaggcacctagaattgaaatataaatcaacagagcctaagctccggatggtaattcaggttcggcagaagcaggagtcgaacctacaatacggagctttggaggctcgcgtgataccggtttcaccattctgccgggtgctaaacacccataagaacccaactagggttcgcaataacaatagcacccgagagcaagtcccagtagggctaaacgaaataacacagcatagtggaacactatgccataatgaatcctttcctcggtactcccattgaggaaagtactggtacacagactcagagaaagctggtttcttgaggctttctctctagtggcctcctttcaagcgtactcttgtacgcacgatcggagctagaggtacaggtctctttctataagggagctgtaccgaccaatccgatc

SEQ ID NO: 2808 - DNA, 459 bp, Xanthophyllomyces dendrorhous
aggccgtcgtcagacaagtagcacatcagacacagcacactacacacactacacacactacacacactacacacactacacacactacacacactacacacactacacacactacacacactacacagaacagacactcacaatcgtccgcagacagtacccatggatctgcgccagcttcagcagctggatgaaccccccgatcttcgacggcttgccctccggctgccggaacgccagccccggctcctcctcgttctcccagtactcgtcgtccacatcgatcgggtagtcgacatcgatgtcctcgtcgtggatcgccagcggccggcccgtgctcccacagagctcccggtcggccaggtagagcgcccagaacgcccgcttcagcatctcgccctccgcctttggcttggaccgaacgacatgcttcctgtggacgcccatgtcgacggccgt

SEQ ID NO: 2809 - DNA, 590 bp, Xanthophyllomyces dendrorhous
agagagagacgagagagagagacaagagaggagtgacttctctgtgttcgctctcgctctcaccctgctcctctctctctctccctctctctctctcttttacaatgacagtaagaacagtaagaacagcaagcaaagaggacggcaagagcagcgaggacgcgtcgttccttctcctcgtgctctgtctgcagccagaaccaggacgactgaccgctcagctctgttcctgaagcatcaacacgaacaggatgcgcatctctttggccggactgaccgcctgctctttgttcttgtgcttttcctaacgtgtctccctcctcgtctccctcctcgtctccctcctcgtctccctcggtctgacctcatgctgcagcttgaccgacctatcctgttcttcctcgccttccaagcccttctgctcttctaccacgtccgagagagcttccggaacagacgagtcggcatcactggcagtcgccaaaacggcttgtcgaccctgacgctccccagacggagccatgtggtcatgcccagaaggatggcgcttagctgatggccgtccgtccatccgtccgtccgtctcgtag

SEQ ID NO: 2810 - DNA, 1835 bp, Xanthophyllomyces dendrorhous
tctttcacgagatgaacgatctgtcaaattcaaacgatatcgagactacgggtccgaacgtttgctaccaaacacctgggttgatgcgtacccggtttgagagacagaaaaggaatcagaaatatgagcagaagacttgtaaaagttcatccgagggaacaaaactatcaacatttccacagaaccgataggaatccgacagctttcattgtgttcatcactgatagaatcacgtctaagcctctaccaaacatccagcccgtatagctaagtggttatagcgcatcgcttgtaacgatgaggtccgtggttcaaatccgcgttcgggctctttttttcctctctgctcatttgtcttttctctctatcacttcctttttgcgatccaaatttattcgcggtgtgagctgtatctgctcgtgtagtagttcttgatgctactcatgtccgatagatcttgtttttgttaggtctttctcgtcatgtttctatgcgtaatgggaactctcgaacgtgttggaaccctccgcagtcagggactaagcagaagaagaatgataatacatgagacaagccgttcaccttcgactctcgatagccgttcttggtcgacactatcgctttcgcagccttgaaaacgctgttgaaagctgacagtttaaataatgttccagttgcaatagatcggtgatcttgcagaggcaacatctggagatgatgcacgggaattaaacattatctttttacggtagctattcttttccattttctttttctcttctctctgtatcgtcctgcgataggtatattggaacatctgggtagtgatcattccggcttgaaaacaaaaccagaagctaggttagagacgagattatggatgaagaacgagcaaagaaggtctggtagaaaaactcaatcacattcatctgtctatctgaaatatactttagtcactgaaggtacctggtgaatcaatcggagaagccgaagaggaagaacggaaaatggactggctagaaggaaatcgttggagggaaggagccttgggttgccaaacatctttacgaatgcttctttctgtcatgatctggcccaggtcgaccagtacttttgagaggttcatggcttgttgctacaaaccgaacgacatggtttcctatctacaataaagcaagtaagctatcggtgaccgatgaggaaataggcagagtacggaaacagatagggactaacctcagtgaccaaatagttcttggagaaagctgagaaaagagaaagagaaaaggaaagaaagcgttgggcggagagatatatatgtcgaagaacacgaggcaaaacacgaatgccgagatgagaagaaagataaacgagaagatatgaagatacgagaatgagaaggaaggtaagaggagtaaggccaaaaggacaccaagactaacagccacgatggagaaaaatgtctgttcagatgttgaatgaaacagactgaggcgaagatgaaacaggatgattctaagaaatcaccccaacacaatcaaccccaacagatgattccaacactcccactcatcgttgctgtttatacaaagatgtgagtcattgagaaaagacagattgtcatgatcaaatccgggttgactatcacagggctactttgcgcaacgtggattattcttgacacagcgtcggttgaagtgcagaacgtaacaaaaagctacagatgaacagacagaaaagctccgagaagtggaagtagaagtagagatagaagaaggagatagagagaagaactaggaacacacctcagtggaccagaatggggttctggtgat

SEQ ID NO: 2811 - DNA, 422 bp, Xanthophyllomyces dendrorhous
ccccctccccgcgtgcgcgcgcgctggccgcacaaaaaaaatgttttgttttttttcgttttctccatttttttcttctgcgctgcgcgccgccctctcgctcgcctcctcgcgctcgccccgcctcggcccccgcgctcgcacatgcccccgcccgccccctcaggccgaggctctcgccacagacccaagacaggcgcacgcacgcacgcgcagctcacaccgcgcagcattcgcttttctagttaccagtctctcgctttctccacagcgacgacgtgcaactttcgctggttcccacggtgcaagtgccgaaaaaacaaaccgagccgagtagtgttcagagtggtccacacagcagtgcacacgtggacaggcagaagcaagtgcaaaaaagagatgcaagtgcaaaaaaaaaaaaa

SEQ ID NO: 2812 - DNA, 510 bp, Xanthophyllomyces dendrorhous; identical to SEQ ID NO: 19

SEQ ID NO: 2813 - DNA, 1133 bp, Xanthophyllomyces dendrorhous
tgtgctgtctgtgctgtctgtgctgacgatgcgctctctctgctcttgctcttgcgtagtaacaagcttcctctcgtcggaggacacgaaggaacaggctatgtcgctgcgatcgccgacaacacgagcacccagctcaaggtgggcgatgcggtcggagtgaagtggctggcggactcgtgcctggagtgcacggagtgccgacggggatacgagtcgtgctgccagaaggcgctgaaccacgggttctctgtcgatggctctttccagcagtgggcggtctcttacgccaaggttagtattatttggtgtctatagtgtgcttcagagtactttagtatgatacgcctcgctgaccttggatcatgcctgccttattcagcacttgactcctatcccttctgcgctgtccctcgactttgctgctcctatctgctgcgctggagtgagttctcttcctcccctttgttttcttcttttcgccatacacggactgaccgagcttgctgtctttctatccctctctccctctctctgcctatctctgcccttaggtcactgtctacaaggctctcaagcagatcggcggtgccccaggagagagtgttgtcgtcactggagctggtgagttatgttatcagacgtgctgcttgcatcgcacctgcaggcccagctgacatagttgcccactacaggtggaggactcggccatctcgctgtgcagtacgcaaaggccatgggctacaaggtcatcggtatcgactctggagacgccaagaggaagctcgtcgagggctacggtgccgaggtgtttatcgactaccagaaggaggacgtcgtcgcggcgatcaagaaggtgactgacggcggggcgcacgctgcggtgtgtgtagcgagcggtgctgctgcgtacaaccaggcgctgtcgtacctccgaccacatggctcgctcatctgtgtgggtctgccgaaggaggcgtacgtgaacgcgaacatcttctttacggtgctgaacgagcaccgggtgatcggatcgtatgtgggcaaccgacaggatgcgatcgagtcgcttgatctggctgctcggggtgctgtgtctacgcactttgaggtacagccgatggagaatctga

SEQ ID NO: 2814 - DNA, 305 bp, Xanthophyllomyces dendrorhous
gatggtggaaatgatgatgaaaataacgatttgtcaacttctattttatctcattctggtagaccacagcgtactgatcctgaacgcaccttgcagagtgaagccgctttagattcagagttatgtcgagcatacttgacgattccatccgacgttcccaagacgctgaaggcagcgctgatgggaaggcatcggaaggagtgggaggaggcagcaagaaaagaaatggagtcgttcggaaaacactcggtctacactctcgtgcctcgaccggcaaacaggaacaccgtcggatgtcgtgctgt

SEQ ID NO: 2815 - DNA, 361 bp, Xanthophyllomyces dendrorhous
gcagaaaagaagaacaccgaaggaaaggtcatcagaaggaaagtccgttttgttgcgcaagggttcagtcagcgacctggcgtcgactttgacgagacctacgcacccgtcgtcaagtttgctacccttcgtttactttttgcgaaagcagccgaacacgactgggacatccaccagatggatgtcgagaccgcgttcctctatggggacctgaaagaagaggtgtatatgcggcagccacctggcttcgaagaaaagggaaaggaagactatgtatgtaagcttcacaaaggactatatggcctgaaacaggcagcgcgagaatggaataacaagctccatacctctcttgcttccatag

SEQ ID NO: 2816 - DNA, 663 bp, Xanthophyllomyces dendrorhous
atatagcagtctagacaccaaccaccgagtgttgcgagttggttgactttctatctcttcggtttctcgttcaacatgttatttcatttctattttctacatcatctttatttcacttctctctcgttttatttccattctactttatttccatcttgtttctatatcgtttccatcttggtgatctcgaatatacagtagctagtttgttttcttttctctctcctcctttctgattctctcaatcaacttgctcactttgtgtgtgtacaattgtttgagggaatcagtttgttggaagaacttgatcaagtgcaatcagagaaacaggattaagagacttggaaatcagaatcaacatcagagaccaagggcataacgattgtgcttccattgaaggttttcatcaagtgaattccctaccaagtgctccctaattttattatgtcatacgctcaaacaacagcagagtcagcaacatatgcagcaacatatccagcagtccaacgatgtgatcgtcagatcgactcacgatccgtccttttccgactgcatcttttctgtcactcccctgctttcccaggccagaccgactttccttctcgactcgggctgcacacagacctgtgtgagcgaccggtcgatgttctggtcatacgagga

SEQ ID NO: 2817 - DNA, 386 bp, Xanthophyllomyces dendrorhous
tcgctcacggcatccacggcgtcatctcatcgctgaacaacctcccaaacgtctccttttccgtcccaaacatcgtcttcggtcctggcggcgtcagtggagcgatctcgttgtcttggcctggtccaagctgtatgttgtgcgttcccgtagggatcaatgtgaacggggcagccaccttctgggcagctccctttgttgcccgcttgggcgtctcctgcttggatccagacgtaggccggtgcaactgccgagacggtgccatcggagacatccagaaaggtccgtcgacaggcacaggcggaagaagagactggaccgtctggcggtcggacggagagaaaggcggatgggagaacctgtcgccaggctggttgactggccca

SEQ ID NO: 2818 - DNA, 383 bp, Xanthophyllomyces dendrorhous; identical to SEQ ID NO: 1262

SEQ ID NO: 2819 - DNA, 486 bp, Xanthophyllomyces dendrorhous
gctcggctgtgtcagtcccagacgtgcgcttctcagccggaagcaatgaaggtctctgacttgtcgcttgacctagagaggcagtcggagcaggttgagcaggttctgggcaaacgtgctagaaacacggtcgacatgtctgcgcctgtgtcttctaccttgaccggtggtaggtcttatcctgacaggcaagcttcaactcccacttcgtccggtttgtctgatcctgcactcccgactcccatcccctcttccgcggccttctccatgcctttctccacagcccgcatggatgcaaccggcctggatgatcaccggcagaaacggtcgagggtcgtcagcctggcagtcagcgagatggaggcgggcgatatcgaggatctgttggaagacgtatctggcgagcctagtgcggctagtgcggctgatgaggatgacgggcggccccttgcatctactaacgattcattgatcaagtctcccatc

SEQ ID NO: 2820 - DNA, 400 bp, Xanthophyllomyces dendrorhous
aaaggtcatgcatagctgatctcgaaagatgtcccatccgtctgtgaacgagatcgatctcgatctccggcttgcagggcaccaccgaagcagccaatgccggcggccgagccgtcacatcgagcgaccacaggctttgcaagtgtggtgaagcggtgagaaagatgccgttcttgtctctgaacacgatccgatccatgtcgccgctgaaagtgatgcctttgatccggcaaagctggctgagagacgagagatacaagcatgtcggacgacatccccagcacatggaacacatcggtcagtgtgagtccgcactgttcgtcacctgtcgctggcttgctgagcaagctgatctggcctcgaccgacgactttcatcggctggccgttggctacgtgaa

SEQ ID NO: 2821 - DNA, 30717 bp, Xanthophyllomyces dendrorhous
tagacccgattactagttctctcaaactgattcctctgatcccctgattctctcaacaagaatacacacacagagtgagtaagttgattgagagaaccagaaagaagaaaggaaaaggaaacaaagtagctactgtatatacaagatcaccaagatgcaaacgaaagagaaacgagatggaagcaaattagaaagaaagtagaacggaaatgaaacgagacagaagtgagataaagatgatgtagaaaaatagaaatgatgtagagatgaaataaaatgttgaaggagaaagcaaagagatagagaagtgaaccaactcgcatcactttacggttgatgtctagactgctatatccaatactcactggtttcccaaaccatatacacaccacccaggtgtttcagtaaaatggattgagaaaccaggaaacagaaggaaacccgctagaaaatttatagctcttcggagagagagccttgggactccgcgcaaacggaagtcggaaggtgatgcctcaagaatagataaaaaattacagatggaattatatcaagactgctgaaactccaaaaatcaaactgacaacgacaagatactataaatgttgacactattcaattcatcgcagatcgtatagtatagtggttagtacttccgcttgtggttcaacttgtggaacacaactacgcggacgacgggtgttcaattcaccctacggtcaactgtacatagtttttcaactatctcttctctgaggattttcctttttgacgaagatgttcatggtcgaaccacttgagtgtttttgagaaaccattgaaacaatatagacggtatatttgattagggcagatatgattagaacttcaatggttgtgaatgaagagtttgtcttttcgtttttctgtcgtaacatgatgatgagcaatgcagtcgataccactcaacccgtttctcaacaaaaaaaatcatacaagtagacatcttgaacggactgcgagagacatggataacattaatacagatcagagaggtgatcgaggcggttgagaaaaaagatatgggaaatgtaacgaaacatagctatcttcttaaggacaaagatagttagaaaaattattataaaagtccagatttaaggggtccacaaaagcccaagtgacgagaagagaaggataaccgggatgctatctcctctttgagttggcgttgtcgttgacctttctcttggaagctgctccgcctcctcccatgtcgcccatgatttctctctccaactcgtccaaatccatatcgtcatcctcctcctcctcttccgcctcatccttggaatttccagctccgctgctagagctccactgctgctctttggcagacttaccatcctggctcgtcctcatcttcgtggccaatattcttttccgctccaactcttcttgatggtgggcttcgagctctcgctccaactcgtcatcctcttcctgggctaatcgtttctccaacatcggcacagactcttcgcccttgacgaacgatcgtctattggatcggccctcttcggcattcttggcttcatcgtcattgttattgaccggttggtactctgctggaggatgaggaggtttgatcgctttgaaatatgcgtagagtgccgagccggtcacgatgaatgtcagagaaatcgctcgaggtctgtcagttgaggtcacaaaaatcggccgcaaaagacaagatgatggaaagtaaacgataattagtacagagcctctcagatgccttcgaaagaaaatcagcgggtttgagaaaacaaaaaaccaaaaggacaatgacaagacttacacagtgagcacatcaccaaagacagcgatacccaagatggcttgcagaacggatcggacagcctgttgtattgaatacagaaggaaagaatttagatgcactagaagatgaattcacaatcggaaggaagacaagaaatccatacggacggaagagaacatgtgtgtaacaggactggtgatggtgatggagagtaagccagccatgcagatgaagaaaccgaacacgctgtgagaacaaaagtgataagagagaaatttgattgagtatcacctcgaagctagctcatcaattccaatagatattctgtctcacccggtaacaaaagatccaatcaagaacgtgcccaagctaccgtcggtattgttgatgaggtctttccagagccaaatctcaccattgagaatctagaataggcaattaaaatacaacaggtctgaatacgtgtatggttcgacagctacagacaataacaacaataataacagcaacaacaaacacgtacaaggatagggaataataatgcggccgacagaaggtttgtgaggtaggcaagacttccgaatggcaaatatcacatggcaagaagacttgtttagataagcagcaaaagaagtggcatgtgaacaaccagacttactttgtgacaacgccagcgttcatatccttgatgtcgacatgacgcatactccatttgacaaggatagcgtggatggcaatcatgagcgcggagacaaagccataaaggatgccgaggtgggtattggtatcttcatttgtaggtgaggcagccgagggagtgattccgtagaagaaaccaatggaaacgagcacgcaacagaaagttgtcatgtgtggcggtagttgtcggagaagtgctgaggaaagggcgatggtcaatggtagaaccatgcctctagcaatctaagggatgggaaagatcagtatgaaaacatcagcacatcattccagaataaacatgacgaagcgaactgtgactaaaatgcatattggagggcctacttggaaataactagcatcgacgagcttgagacagagtgtgttgaagatcagaccagcgatgttgacgacgacaatggcagcgattgacttgagaagtttgctgtcggtcgaaggtaatgtcagccatccaaagagacagcacatttgaataagaaacaccgcgatcaaaagttggaccagaagaaatgtcaatgggagagacgatgcattcaggacctgtgttgggatataaaccaacgcgttagacacgtaggacggatactggtacaacggccagaaggatcttacccatttgttgctttgtagtcgaacggcatcaaagacgacaaattcacggcgagcaagacagaagaggcagagcagattaatattctcttgttgtgaatgagcaaggtcgtgttcaatagatttgaatagcgagagaaaagaccggctaaaggcttacacaaggaccatcaccaacgctgctatcatgtagaacgtgacgacggcaaacacctgaagcctagtagcttgatgttttgagttttccatgagtgactagatagacgatggatgatgggatgtgctgtatggatggctttaggagtatcgacacacaagtggccaggtgtaacgatcggtgttgatggaagcgaaagaagcaagaggaaaaactctatcgggttttttcagacacacgcccagcgatcttcggcctcgaccgagtaaacagttatgatcattcgatgagactcactacaatcctctgtagtgcatgccagatttttctctattgttttggatctcgcgaatcaatacaaaaccggccggatgatcgtaatatgtctaatagacagacttcttattcgtggcccacaataagcatttcttaattgtatactacgatgtgtcgtatacattaggcatggtctgcactgcttcaatcttttcttgaatcacgtgatggaaaagtgggttctgttcctgttcccctctttcgctttctctcatgtctttcgtcatcttgcgaaaaacatcggaaagcatcataggcgtcgagttgcaatcttcaggtttacatccatacctacatacctgtgctccctcaatctccatgtccaagtctctgtcgaatatcgtttacccaaagatccgctttccggaacacacctctagatcgtttccccctcatctgcctcctccgcatattccgcttgagatgtttccggactttcgtccagagcaggtgcgttctctctttccgctattcgcaacattttttcttcatcctgatgccggtcactgattccttcttaacctttcttaggccttcttgcgatcgatcaagccatttctcaacccgagaggtccaaatgagccatcggccaaagcagacgcaaacccgttcaaagcggtagactggcatgacgaaactctcgagatcaactggaagggattctctgtattaacactcaagtatcaggtttgttctggcccgctcttcctttactatatttgaacgacttttctcgtctccttcaacctgcttctttccggccatctaacgcggtcatctgttctatcgctcgtacgttaatgcaggtcatccaaccgtacgtggtcggtatcgccacctactttgctggcttgctcatcgcctctttcagagcttctttaaactctctcttcgtggatgcgtccagatctgtggcgaaagcgctccgttaaggggaagagaatagatgttcttttttaaataaaaaaaaaatcttggtgtctcattcaaattcaagccgtacttggaatcctaactgcacgcgccaaacacagaaatactcatccgttgaacagacaatgtagactagagacattgaagaaagaaaattatcttccgaaccctctttcaagaaacctttgtcccttcttctttctatccttcttcgcttgacaattctttcattgttcttctggatccggctcacgcgtcatcatctttgatctcttccaccgttgccccagcatacgtcttcctcgttcctccaaccttctcaccatcggcggcaacaatggacgaaggcgtggatccagaagaagcgacggccgaagcaaacgatttcttttccttcttggacgaccttgttcccttggaggatgacttcttctttggtggaatgtcccaaccccacaccggcgtccaggagtccatctgtagattgggagacaaggattctttagccttttagaacgcactcgcaacagatgtaacatatgcaagatagttgagaactcacaaagctgacgtcctcaaacaagcgagggaagatccagattccaggacgggcgacgaccaacgtgatcacataaaagatcaatcggaagattgccagtacaaagaacgcagcgagcagcatgaggattccaattgatagataccacacgcccagccgcatcgtgtacggccatagcgggtacagtacagctgccaacatacaggcgacctgtgaatctcaaacttagttctacgttcgaccaagcctgagagtaaaaaaagatacgaggggcgcaccatgccgaaagccgcgatcatcgtccaaagctggcttccttcatagaaccaggcgtaatactcggatccatcaggagaaaaggcctgttgagggttgatttggatgactctgggagagccttcggccgatcggttgactcggagaaagaacgcgctttaaacaacgtgtcaagatggcagatgatggtaccgaagagggaaataatggggagtttagggaggaaaaaaagatgagcagaaacaaccgtacgagaagctatcagttgaaagtaaacaagtcgctggacgaagaaaatgcctggtcgcgtgagtaagaacgtaccatggaatgatggagtgcagcaacttgacggcctcttcctcggtcgtcactttgggcacgttcttctgttttgcgtacagaggtgaaagtagggctttgatagcattcttgcctggaggaggaccatgagatacaaatgcaaggaaaaagtcatcagcttatcaagtataaaaggtgggtctgttcagagcctacgcgaacctttgaaatagtcggttcgctttccattgagcaatccatttctagatttcacaccgttcttgcttcgtaagaaattaacaacgttacgctgctccgcggtggccttaagatcaaagttacaaaaagtgagttcaaagtttgatccggctcatcggaaaaaggagggaaagtcacgagaaatagagaaaaaggaatactcacttgttttctagtaagaatgacagcaatgaggaatgatgtagcatcggtcagatctggaatcagtctctttaaagaagcaaagaccataagaggaaagagaacctcactgttgttcttccatcattttgtcgacacaacagaagaaatcctgaaagagaacgaataagggtataagaaaacgagaaacagaaagaagtctagatgaacgatcgtcaataattcaagatgaattggagaaggcgaaagacgccgacgtgtctgattcctttaaccctaatcaaagaaacagttcacgtttgcgcgtatctgcatcgtcatccagctgtttcaacttgaccaatttccttgcttactcctttcttccatctacagacaatgcagttgacctgatgaaccaagaatttgttgcaaagagcagcttgatagatctgaaaacatgaaaggaggcactctcatcttcagctagcggatacaacatatacatatatctaaggcagatagtctcttcctaaagcgattcgcttgaggtcgacttcgacttctccagccagacctctaaccgtcagatcctcatccgttgctctcacataaccaacgaccctcgccacactcttccaaatgtttgtttctaccgtctgatcgtcttcgttaatgtccgctcggattgctgccgaaaggaaatataatgcagatcgacgcagaaccggatgttttgggtttgacagtacaggggagatgtcggggattgattcctccggaatcagatcaggcgagccttcttcatcctcctctccgcctctattttcttccacttccgcttcagaactagacttggaagctgataggggtcgaaccatagcaacggtttcaatttgtagaagatctgtacatgccaaaaccagatcgactaggaaaggcttcgctgtcaaaggtgaggtctttaccacaagcgacaatatggccaggctggaagaccgaagagctgtcgggagatcggacgcgcggaacacaagtaacaaacgtggaacgaggacagaaccttgaagataaattgagcggtatcagaaagagaatgatcagctcgattgtcttgatagatgtgttgaacaacaacaataacaacgataacaacaaaagcatactcactatagatgctcagactttcatctgatctctcgatgactccacacagagcctcgcctactcttaaccttaggtccaattctaccctctccatctctacatggccatttcgttcagaacctacacctctgcgcttgcttccaaaatctaacgtcccttcccatccatcatttcccacccctttcgcgtacacaccaaccattcttccgagtacctccttcccccatccgtctactaaaccagctagtcctttgacggcgttcaaataaacatatgagtccgagtcctggatgctttggaggaagacatccaagattcctggaatgagcgcagggggtaaagatgcctctggatttggcgtgccatgcgttggacgctctttcttctgtcgagatggaggaaggacaagctgccggagcatgatcaggccgtgtgcccgaacgggtaccaaaggatccgagacaagtttcaaagcgtctctatacgtctgaagcgccttttccatctcaggggaatctgcagaagacgaagaggatcttgaagagcgaaatgaggttgttgcttctcgtacagaaatgatgagtaaagcttctttggcaagatgacggacggcggggagattagagttgatgtgacgttcgagcgaggccttgatgataagaagcagaggagcagatttaaaggagagagtttcgtttcctgttataagtggtacagatcagcacggttgaacccaatgtcatcttgggagaagcagaggtttgataaaatcacgatttaaaaaacgaaccttgcaacacggccactaggagtccaatcgcagtacctacgattccaagtttaccctgaccaacttctccatcctcgttttcggcctgttcaccgctttctaccactggtttcgattcagaaaggccaaagacgccagcttcaggatcgtcttccaaatcaggcagatcgacttcatcgtcactatctaaatcatcatcctcgtcatcgtcaactcttgctcctggaaccagtatttcgtcatcaacaatttttaaatcagacagagtcaatccccctaagccgaacttctgacgggctgtgatcggaggcggaggatgttgagtcgggacaccattttctaggacaaagctgatgaaactcaaaatccgactctcctcccctttgacgaggtcttcccccatagcttccaccatctgtacaaccatctggcttagaagaaggagtgtcttgggatcctcatcctctcgggaagtcgtggacgatagatgggtcgatcggatattgtccagaatgtgtatgaagaagttcccggcaaccgctggtcggttcagtgatttgaggaaggaggtgaatagattggggggagggtgaggagagataagagagagagtttcagattccaaagaaactgatccagggtcagccgacggaggaggaagtatgggctgaggcctgaggtgatacaagtataacgcaaattggaatttacatgcttcagtgaaaaaccctcgacacaatagcaacgatagtcttaagaaagacacaggtagactcacactccccaagttactctcaaatcttcgcctccaccttcccagaaccattcgccttcatcagtttcacttcctggcaggactcctggctgcccttcccagcccctgcccgctcgaagtacaacttcaaggcccctaccaacgtcggcctcggagaggaccttagcccagcttttcaacatcgcgccaacttcctctttgagtactacatccgctgttttgttctgcagtaaatgccagtatagtccgaacacttgaccgatgatcggtctaagcagcatagatttctgagttgatgtggaaggcggcgagagaagaatgagtgggatcatcgaaagaacagattggagaggggcttgagtgaaaaggttttgactgggctgaagaagtggggcatgtaaggaaggaaaaatcctagaggattgcgcgggaatcagacggattatagtggtcgaaagtggcctgagataagtagtgggcgtattcgacgagatcaagagagacatcagacgaggaataacttttgagaagtaggcctcggaggtttgaccggcaggaaccgaagtcaagattctggcaaatgattctgattttttggtcaagatatctccaccctcctcagaagaaccggcagaagcgttggaggtctctgaggctgatgactcggaagatgcaccaaacaacgactggagaaggccctcaattccacctggacgaaggagcgaccgagtcatcaggctacctgcagtaagtcgaagatgcttgagtgatggcagcgtctcggttgaattcgaggtgagaggggacaaaagcgacaacgtcatctgaggagagtatctttgagaaccggtcagtggtagtagtagtgatgattaccaagtcaacacgtggctcgatcgattagcaataataaccaaagcttatggaagcggaagtcggaaggaacatacgagtccagcgctttaatcacgagccccttcagctcattactgtcgatcaagtgtgagtgatcccaacctaagctgacggccatttttagtatccctctgacgatgcctccatccctaatcagctttccaatatccgttggaggtttactgagcgccaggtagaataatcttatgagaagttgggtgagttgatgccccgcctgctgccgaatagatggcaaatcagatgatgataacaatgatggggagttcgagctactagatgtttttgaagagcgctctagtgtttcggtgccactccccacagaaggcatcgtatcgtgaggatacgctgttcggaagagcggggaaagaacctgggtcatggtatgagacaacatggtcagtaccatggcgggtgtggagacaggtagaagaggtggttctgtgggagattagtgaacatcgcgattagtgacttgcgctggtctgcgagcgaaaacggaggagaacgaacttgctaggtctaccgtgtttcctagatgctcacgagcaattttatccagcaattcaactgcccatactgccaataagcccagctgccatctgatgtgtgcttgatctgaattaaggtccgggtagaaggcttgttgaaaagaatagttttggaacgcgtcatgttgagctgaaggaaaggaatcatagaaagaatcgagcgtggactgagtgattttcggcaaccgagccaatttcttatttggcacaggataaagagctttcaaaccggtcagcaacggaagaagtgagggcaactccatccagatccaaccagtaagcgtgcgttatagcaaacaaggcggttgtggatgatgcaacagcggtgagaagtggaagttagtaagacgagaaatatagactacaattttttctaatgaatttcccaaaccggtttcgtttattgcagtgacgatatacgagtccgcgcgaggcaaggtgtaaaccgacaccatcaacacatacagaatcggcagaatacaattggatctgctctttcaacagctcatggctcacttatatttggtagatactcagactgatgctctggatcttctttgtgagttcttatagtttcatagaggccggcgtcatgaggtgttgcattcgcgtggttgctcatcaattgtttttgtgatcgtgcatacatccgtatgggtcttcaattttatgacatcttgcctagcgaggagtgagttctcgaatgattgcataccagcatgtaatgagatatcctctcatcgttcactcataaattcctttcaatcactatgacaacaacagctagagcggcaagtgatccgacatatgctcatgatatcattctctcatactgttcccgaaagatcgttcgaggcagatccagatacgaaacaggctacaagctgcatcttttggtccgatcgtgctcctcgaatcttttcttcactcttgatgaagcctccttgactgaagaaggcctattatcaccttctgtttcattcaaactattaaaacatcaactttttaggaatgggagctagtcttccgaaaagttagtttttgtattccgatatcgaaaaggacgtatcttctctcttgatcacttcaactaacactattcatctcctctgttcctcacgattgaactcagtatcctattcctgaccttggcaatcagtaagtacgacaagaatgcgcttcattcggatgaatcttggcgtcggccaaaatttatggagctcgttcatcataaatcatttatgtcaccttgattactctttctcaccacttctagagtccttgaggtccgggaaacactaggcctcccagaatctcatatcttccggcgatcatcaaatccctcccaagcggcattaaaccacgagtctatacgcttttcttcggctagtattgatagacgccgggccagtgacgcccaaatacctattcatcgcccaaataacttctctagagcgaccactcctgcctccacctccattgcccgcccgcctcggccacccgtagttcgagcctcggaccgtggggatggagcaacaactcctcctccagcttacgaacgaacggatcccaacccagactctgatctagcttccgctatcatcgccagtctgtcagtcgagcagtcctcatcgggtctcagaccaagttacaatcctccttccggaccgccaccttcatcgtctacagaccctggtttcatctcccggaggaacgtaggaggacggtcgttggaagacccgttgctacttctgtcaacgtaccatacttattttctgttggatgattcgacttccatgcaaaaggacgatcggtgggcagatatggtcaaagccatctcttctgtcgtgccactcgctgccaatttcgatccggagggcgtcgaacttcattttgttaactcgaaagagggaagaaaaggcgtcagaacggaggaagaggtcgaagatgtattcgcgcgagtaatcagacccgagggccatacacgtatgagcctgaaactggacaccctcttaagaaactatattgataggctagaaagtttagaagcaggccttcgaccattaaatctagtgcgtcctttgtttctccattcttacggatgttgggaatgtgcgtgctgagatgtaagatgcttcttctgtgtcacgctgtttgtcgtctagatcgttatgacagatgggttcgtgaagatcttgtacctgctcaatggcttcagtctttcttacatatatcagctgttcttctcaatttacctcggttgctcttcttgacgaaaagtgcatctttgcgggcttcgtcgtcaaacaccaatccattcgtacaatcggagagtcctgaggcaagtatcctttccctctccgctcagatcctcatatttactcgaatcatcctctaatcatgatgaacctattcaacgctcctcagtctattattgcagctgccgctaaacggttggatcatgggaactatccctctaaccagcttggtatatttttcctacagatcggcgtgcgttgcttgtcttctatcctcacagatgactccatacgatgctcgatacaattgataaactgatgcgtttgtatctcatggaattgcaggatgacgcagaggctagggagttcctacaagacatggacgactctcttccatcccggcataatgttcgagtaagcgatcgtttatatacgtatccgcctcaatttcagcctcgaaaggataggcatgtcctgacgatattctttttatgtatctggtgttgtttaggacctggttgacacaatctcattcaatgggcttacctccgaactcaacgcaaatgacattgaaatcgtgcgaaagattttgcttggcggtgtggacaagtaagtcctaagtctgatttcttgaccacctgatttattcgtgataagctaaatacaagtcatcaacgactgctcatcttggcaatttatttttctcctcttttcatcctccctatcgcttagacgaatcgaccgagaactatgattcttttcggatgtctgaattacaagcaaagcttcgtaggcttccaatgcctttctctcaatactcaatatgaactttgaatccgtatatgaaactcgatcgattcattcctgtgcctgttttgccttgtgcgttataattatttatctgattttgctcgcgtatcttatatgtacctatgcaacacgtctttataccctacgatttcatagtctcagtctaccgatcatgtgcgctcgttagacatgctatgaaacgtacttggccccgatgtgtttaggatacgttattcgttcacaggcaactttctggccttttcgccaacgtaattcaattcatcgatacaccgagagaaaacgacactctctctagctcatcagctgaagatgatctaacatctggagcattccaaaacaggaccacaaaggaaagcaaaaagaaaacaagaaaagtattggaaaagaactcgtcccccactcaagcaaacacattcgactcctacctagtcgctcctgtattgcctcccacgacaccttcgagtatgcgaacgacgcccatttttcttttaacgacccatcattctcgccctatctgggttgacggccatgccgacgccagcggacggaggagcagccggtgccggagagcctccaccgatccccggaggaggcatgaacggtggtcgttgcggaagtccaccttggctcaatgtaggcggaggtaagccgttgccggtcatcatgagtggaggcatactctgaccgggtgggggcataccctgaccagggggagggtagaagggttgctgctgctgttgctgaggtgggtagccttgttgaggaaagccttgcggcgggggtcgaaaaggctggcccatgtttgaaggaggatagggcgatggagagggttgattgtaagaatacgggccagggctggggaaagaagaaccctggggtcgatattgtggttgcatctgatgaggagctgcagacgggtaagcaggcgatggattgagaaagccaggtcccatcctgccggagagttgttcgtatcatacaccgttgacatgacaaataagaatcaatgatgaggagggaaacagaagacaacgaagaattgataaaaataaaataaaaaagacaaacctcatagcaggtgctccgcccatcattcctccaccaggcggtccattagcatgggaattgataatctgatcaattaggtcctgggctttatcgtgtcctagagctgtgatcgttccatatcgtaagacagattgcgaatagttcagcagaattcacatatcaagaacgactgttcgaatgctggcatcgaaagcttacaggcatagtagtctcgaacgttttgcaggtggtttcgaccagcattatgagccttccgaactgcgagggcaaaatatggacaacaagcgtgtcagtacatgctacgcgtccgtcgagggcaaagtatagtggagatgacttacctgatgcagaatcatgtgttctgtgttgattcgaatagaaagaatagacagaaaaaggaaaagaatggtgaacaattctatgatgttcaaaggccacatatatttctagatgagcacacgtacaaaaacacatcacaatactgtatgatgtaagtcaaaggcgatattagtatgaaaatgacgctgagtttcaccctaatattgacatgagacagactcacatcacagtagtacttgggcatcctgtcgacaaacagcgaacgctatagatggatggatggatggatggtgtacgacggatgagaatggatggaaagagaaaggcgggggtttgaaaattccctggactttgtttgttaggctttttcttcggaattcctaatgaccgactacagcacttttctattgtgtttctgacgatcaccacatcctccaatccaaccttcacccattctatcacatcatgtctcaactcatcggcaatccagctctgggatcagctcgagtctggcatcacgtctcggcagagaacagaactctcggtatgtttgataaaacatatctcttgatattgggagattgtagaagaaatggtactgacggccaaattgagtaatccttcgatttggttctcatccgcttcgttctatcaggtaaactcgccacaagaatcgctcaggtgcttatgggaaaacacaagccagtgttcgatagaggtagtgcgtagtgatctctttgacgaactcccggtttctaatctcgaattgcatcaattaaaccagtagtatccaaagatatgaagtcttcaggctgacaattgcttgccaaacttggccataccacttggcacctatcttttcgttggatctgactctgctcggtactcgtctcaacgatgttagacgatgttggggattatgtcgtggtcaccaactgtgaaaagttgtatctgtcgggtaacaaatccaaacaaaagacgttcgttccttctctcctcccgtctttttcactcttactgcatatcgtagcgaaggccactctttacatgagtagaatcagaaccaactgacattggacggcaatttgtacaattaaaaataaaagatacttcaaacagtccactttcccgggaagatcgaggcacatccaatacaaaaatgtctatgaaaagcgcccagaagacgtgcgttatcctcatcatatatctatcctctctataccgttctctatagctcaacagactgactatctccttctgtaacgtctgctttttcttactctttctcttctctcttggaattgatatagatcttagctcatgcggtctctggaatgttacctaaaaacgatcatcgtttctcgcggctggcccgacttaaagtcttccagggagatttgaacccgtaccagcaaaacattctcaagcgatacgacctttcgcctgaaggaacgtggtcgggtaaaggagagatccctcaagggcctggaaaggcaagtactgcattcgaacgtgtcaagaagatggaaaggtggtagtcttgatctgtcaaagtgaacgacagaagaagacagtccgagatccatataaaaaacaaatatctatatcatcatgttctataaagtgatcgattgcaaggtatcttatgaacaatacagaccaagttcacttaaaacattcttgaaaagagtaatatggtgacaattatcaaagaagaaagcatcagcctcactcggtatcactgtctctcatgtcaaacacatccgagtttgcgctttcagtccctgttatatctccctcctcggcggtggctccctctttacttgttccttccggccggctctcacccccatccgaatgagagaatgaaggaggagaagaagactgagttggttctggggttggcgaaagtgctgattgaaaggggctgtacgatcgagtgaggacctgatgtcggacatgttcttctagcaggatgcctagagtattgccaaacatgacatccagaagacaagttcagcatacccagtgcggcatattgaagtaacggacaaaaggaaaagagaacaaaccaagagcgattaggctatctccatccagcgatttgtgcatatctaacttggagaccgctctccaccttgtccgtcgtttcttgttctttttggggccagcagagtctctcagaacgacctttttcattccgctcgccagccgaggcttctttccgcgcgttccgctcatccgtggatcacagtcatcagtgtcaatggatttcggtagggtacgaggtgttccttttgttttggttgaggctcttgatggtgggcgagacagatcgctggtggaatctgggcaagattttgaagtctcggcaacggtagattgagatctggttcgtcgaagggccttagaagtttgtgttaagcgggacgaaaaggaagaaccagacgaggacagggttgatgaagaagcgctggatgaggagtatgactcggaggacgaagacgaagaagacgaagagctgcctccatcttcttcatcctgaccatcttgtccaaaattaccaccaccttgtgcaaactgttttcttctcagtcgacgccgtctcctagtttgcttattggcatgtcgtgctagacgggccatatgggcaagatattggttgtatcctagttcatccagaagagggggggattgagaagtgtagtagtgtgtggccgaatggagaattgtcttcagaagctcctggaaagttcacagccatgacattatcataagatgttgtttcaggtgcggatggatataacacgtaagtgcaagacagaagatgagacgtacagaattaggtaggtcataataacgcgctatttggagggaacaaacgggttgaaaaaaaaagaagcctatcagttgagcatcatggaataccaatggtctcaagtaaaagcagaagggacgaacgatcgggatttcgtagaaagtccagggtttgagcctttaactgttctctgtacgactttttggcagacgcccttcttgcaacgtctcgttcgaaccattcctcttcctcatcctcgtcctcaccctccgactgatccccagaataatattcatcatctatttgacgttcctttcccttagctgttattgaatgactgctcctggctttcctgatctgcctgggcacttcgtcatccatcgctccgtttgttcttctctcggtgtttgtcaatcgctggctcggtttccgagacgattgatcgcctacggtgtcccatcctaaggcattcgagaaccatggctgagcatgctgatcaagtgtgagccggttattcaaatggagctgggcgtttctcctcggtggttgcaagagggatgaaattacgtaggccgatgttgttttcgaaggtggaccagtgttggcaatcggatgctcaaaattttttcccgaaagattcaactgaggaatttcgatgggcatctttccctgccgttgttgtcaatactgccttgagataactgatgagactgactgagaacaacgggtgatatggtggattgatttaacatttctaatttacaaaattcaaacattttgtaatgtttacattatcggccgtttccgccagagctgactcttccttctgcacaaacaatcatcttgtccatacgatcatcagaactatcaagtcgttatatcatcctacttaccgtatacaacacttaaattatgcacctcgtatcaatccttgcatctttctctttggtttcctttacagccctagctcaaaacccgtccttcaaacaaccctcaggaggatttgatggaacggtacgttaatttcctcggtgtacttcccctcagcttcttatgaggctgcggagttgttcagggaattttctgctttcgaaaagagttttatgatcaggaaacttacagattgatcaaattggaggttccataggccggaggcgattgtactgttgaatgggttgccggcaactggacaagtaggttttctgtttgggttcaagtctctcttgttccagtccagtagccataatcaacgcctatccggatccgatgttgaacaattttgtcttgtttaccttgcgccatgtctgaatgaagatgcacaactcgatggtatatatgttttccttcctgctctagattctctaagttatgagtctaactagtcagttataatcctgtcctctacatctgaactggaatgctcagttgtatcgggctgtgacaacatgcccagattcttggcaggtaagtcaacctccaagattactcatattcgtttttgagcaggaccctataatcttactctacccaatgttgtatcggtcactttctctgccattcatacagctgtgcggaccaactttgatgcttcgtcaagtaggttcttgtcagaggctgttctgtcggcgttacccggattcatgacctgctcaaatattgacgtgttatattgtgctggtgtattcttctcttgttcgaagctacatcaatcacttacgactgtcctagttcgttccttcttctttaatctgctctccgcgagcataatacggatacctcggtggaccatactctgagaatcttgtgcctttgcattcaaaaatatagatgtcgacacgtcctctaccatatacttctaccggatgactgatatcaactcgacaatcacccccatctacaccgaacgtttctgcgtacgtgactgtaactttctctcgtctcttacttctgcatatcaatgtcacttcgactcttatcggctttatggttgtattacgatgtgtttgtcctcaaaagatcaaggcgaacagcagtgccacctgtggaactcctgcgcatagtacccagccctcgggaactggtgacgcatggggaacaggatacattcaaaacagtcggttagtatcagacgatgccaaatctgtgaaggtggaacgagggtgtatgactgaatcgtttgtcacggatgataatttgacgtttataggctgtctctctacaatcaagaaggcaattccgcctttgatgattaataatcccccccccccttagatgtcctttcttccatatacaaaactgctcttagggtgatcctaaaacctcctgtctttttttttcttttcttttcttgtcttgtcttatcttgtcttgatccttcctctgcttggatacacttttttatacgccttggacgttatcattgaacaggatttgtttaacctagatagtttatcgatttgtttgctattcatgtaaatgtctacacatctatcaacgagaaagttgttcgagaagctacagtaaattgtaaggctaatttgatatccgtcgatcctgtgaaaagagataccttttgataaacttgaaggccaacttcataaaccatcaacctaactattcgcgcgaacaacaaaagacattacttctagcctttgcaaaattaagtggccagactcgatgtctttgtatcttgagatcgttttcttgcatgctctcagcgtataaccactatgatggtatcctttcgttcgctcttatcgtttcgccaagtctatcctacacgggtggatgaagtacgaaggatggacgaatgaataagctcgatatcacataagtaattcatttataatatttgattttcaacctccacgctacccaaccatcatctcataccatccttcttttctcgcctgaatctcgaactctcttctctcacacatcgatcgctttctctctctttctcttgtactctcgttctctctcatataaccccaaccatgtccgatccctcatccagcactcctctcctttcgcatcaagatcagtccaactcggtgcctccaacagagccatcaccggcagcagcatcctctgatgccgctcttcctgactcagcccccactccggtggaggaggactggagtgatattcctgatgacgtgatgaactccagcccagaggagatcaaactccaggcaaggttgattgaaaatgatatcaaggtgtgtggcaaattcaatgagcaagaaattacaaactgtcgttgatgaattggcagcatccaacgtggctcaaatctgttcttacatcaatctgtcttgatgctgactctctcttgagtgatgttttctctgtcttcatcgatttggtgatcaggtgatgcgctctgaaaatatgaggctacagcacgaaaagtccaacgtgagtaatacgagccaacgtcttgacttactgtactagctagactgctaatttaggaagaattggatgatacctcagatgctcgagaagatcacggacaataagcaaaaaatcaaacagaataaagtcttgccctatctagttgggaacgtagttgaggttcgtctattttgttctgagatgattcaggccatcatccatcttctgaaacaaacctaacatccgattttgaattagatcttggatgtggatgcagagaatgacgaagatggagccacagtaaacgaagataacaagcgatcaggcaagagtgcagttatcaaaacgacgactcgacaggtaggcaatacgattattgtttccgaatttaactacagcattgtaactgacttgtaaacccgcaaacgtagactatcttcctccctctggtgggactcgtaccatcagagaatctcaagccgggtgatctcatcggagtgaataaggattcatatctcatcctcgatacgttgccagctggttcgtccatctctgttacaactgatagttggtcgtatactgaactgtgtataacaaatccttcccgatgtagaatatgattcgagggtgaaggctatggaagtggaagagcgaccgacaggaacgtacacagatattggtggattggataaacaaatcgaggaactcgttgaagccatgtgcgtattttgtttagatcttgcgtcaaagcaaatatctgatctttatgtcgtacaatatctcaccctgctcggatggacaattggtagtgtgttacccatgcagcaggcagacaagttcaagacgttgggtatcaagcctcccaagggtgctttgatgtatggcccccctggtatgtctcatctttctcagcgcgatcatggtcgagcgtcagctaatctatttgacttgaattggcatcttctctcctaactctaggaacgggaaagacactgttagctagagtctgcgcagctcagacaaacgcttgctacctgaagctagctgggccttcccttgttcaggtaaggactttctgtcccctgatgcagactctcaggttttcaattttgatctcagtccgaccaaatctctaattcgactttcgatattacagatgtttatcggagacggcgccaaacttgttcgagacgcgttcgagcttgccaaagagaaggcgcccgcaatcatttttatcgatgagttagatgccattggaaccaaacgtttcgattctgacaagtcaggagacagggaggttcagagaacgatgctcgaattgctcaaccagctagatggatttggaagtgacgaaaggattaaggtgcgctatcacaatattctcgcttaagcaatatgatatgttatagatctcttagatcagcgctaatatctatcatcctcatgtgttcttattgttgtcatgctcttgtccatccattttgtctcaatcattcgtacaggtcattgcggcaaccaaccggattgatatccttgatccagctttgcttcgatcgggtcgattagatagaaagattgagttcccattgcctaaagaagacgcacgggcacggatcatggagattcattctagaaagatgaacgtcagcccgaacgtcaacttcgaagagcttgcagcttcgaccgagtacgttttaatttttatcatatagcgatatgtcgcatgaatagatgaaagatgtatcaagagacagaaacccaatagcgctaacgaactaatttgggtttcatgatgtgattgttgtgtcgattgtgcagcgagttcaatggagctcagctcaaagcagtctgcgtcgaagccggtacgtctttttcaacttggtctcgcaactcttcagggttttttccttcgatttttgagacgtctgtatttttgttgcattgtgttcatctgtacaggtatgtttgctcttcgatcgggaagctcggtgctcgaccatgagcacttctaccagggtattctggaaggttcgtttatcatgttcatatacagtctcgagtcaagatttcaaagactaggtcgactgatctggaaattcaacctgtcactttcctgacttcagtccaatctaaaaagaagaacgatcagtttgtgagtatcttccactcttgcatggtgtcaacgtgcgatttcctgatcaactttcttttcatccatgacatctatagtactttgcctagagagctaccacatcctttttcaatcataccacataccctctctcgctttgtccgtctcatagtcatgaatcaacacatcagcactcctctttcacgatcgcctactacattctttccttcattatatgtttttttcttcgtccatcatgtgttcactcttgctacttagagggctggaagagaaaaaaaagggattatgctctgttcgctctttcaatggcttgtctgatgtgtactaatccaaatggtgataagttatatagatagtttcctcccttggtcatgacgggcaaattgagagtgtacatgcaagaatgaatcccaagccataggaacctaagatctttaaatagtcagccaccttttgaggacatgttttgcctcgagcggggcgcccactgtgttgtacactagggagagattgtacgcggtttctcttacgagcgatccagcctgtcacgaccatagtgacaaagtgcgtttgaccgagaaatgagccgcatgaggtgaaacacgaggatgatcataaaaacaataagcaattgcgcaatagaaacatcaatgagcatgacttacgtcgtagatagattcagggtctcgactttctgcgtgtacgagtattcgcttgaagtgctttatagctaagggaaatagacctgtggtaacaatcacgaagatagtacaaaaagagggagacatcaggttgcgaattcaatctgagagagatagttattgttgtgcggttcttaccgagtctgtgaaaaagtgtcccgaaattgtactctacttcgtcgcattctggtcctcctggatgtagctttcggtatcgatcgaggaactctaaaccctaaaaatattgacagaacaaacccaatttgcgaagttagttcaatccacagccttcgacattcatggtttattcagaaaaaaaaaagtatctaacctgaatgataaaatagtttcgattatccgcttgtcgctgaaaagcacgaccgcagtatgatactgcgagtaggagacagataagcggatcttgcgggttcatgtcatatgctcgtaccaaataatctgatggtcagatgtgatatacgaaacattaaggaaccgtagaaattgttagagaagtcaaagatcggaggcacgcaagataagacacgtacatattgaactttgataacttcgcgccatcatcagcatgcacccataataagcgttcagtattggatttggttttgttggaatcttgatgatgggtcttccctcctgtacgatctctgccagtctagccgccgcgcctgatgacacaccctctcttatggtgggattttgtatcgcatgatctgaatctccatcaccatcggcttcgtcatcatcgtcatcgtcctcctcctgtcctgcaggttgctttcctatgctcgaactcttccggttcttggagggcaggtgccatctgaaccgactaggattccaaactaatcccggtccttcatgaagcggtctatcccatagtcgaagctctcgagccattgccttctgctgattataattcgaaaacgcctcggccgcttcaattccagagccgatggcaaacgtagcgatatggaagccgaggttggagaattgttgatacagtagtagagctcgtgcagcatcggatgtgttgagcgcattgttggttgccatagtacaggctacatgccgcgtacagcgaaatgatgttcaatcagattatggttatgcagcagtgactaccaaaggtcttcaaagatggacttaccaatcacgacgattcggagggactcttgtctttgtcgaggaatttggaatagagttgaccgagtgagatgctctgccacctctacggctagttctgcctcgtcgttcttcgccaacaggcagcagtactgtcaaaacaaagatatcccaatcaaattgcttagcatgttgagaaaattcaacaatatacaaaacgatgatctacctttatagctgtcacatgccatatgtcgacactgatcccgcggaagaactctgtttcggtaatcgtttctggaggcgcctcgccgtcatctaaatgaaccggttcgatcatgaacaggtgagtggatttttccttttaaatgaggatatgctatgcaagatatagatcagacggaccaagctccctctgaagacgttcagacatttcgccaacctgagcctcgatgctgacttttgctgctttagctcggcggttgaagtgtagatactgttttcaaaatataaaccaaggatgacaggggttaatataagaacagcgattttgttgatcagatactatattgataaagatgcaccctatcggaggggaagatggatcttgtttgtctaaacccttcgatgagttgcccagccaaatctatccactctttgactgattctgctcgtccagactcaacatcgtcctccagctcagataatcgctgaaagcttgtcttgactcgatgattccacgcctcctctcgttgcagccgatcacgtttagcctcagaccgcttggcctgtcggtcctgatgtttggatgttcgaaccgtctcgtcgaagaacgatccagtcgggtcattggtggacgtatcaactgcaggaatagatgtaagaatattatctcgagatgtagtatttttcggttcagaagggtcattgagaactgtatgagatatacagatgggatcaatggtcagattatgatcaagagaacgctccgacccgtttagatatgttgtgggtgatgctccgatcgtgagagtgcatgaaattagaccaaccactattaacgacctccaaagcctccctgagcatcccttttgactcatagacgccggccaatttcatcttgatgtcgagtaacgccggatcccccgtctcgtatgattcaacgactgtgagatgtgatatcaattaaagcatttgacttttgatcatcagaagataaaatatacggatctctgtcgcaagtgaatgacgcttaccgaaagcatacgattcaatagccccgtcgggatcgccgagggcgcgcaaacagtctcctctgccttcgacatgggatggatcgctctgtgaatttgttgtttaataagacaaagcatttcaaacgcattcgtaaattgcctgtttgcgtcagaaaggaagactagagttgaagacaagtacgtactgtaacttcggaaagtcgttcaaaaaactgtaaggcatcctcaaaaagtccgcgcttcagaaatgcttcacccgcttctccccagaagacatgatagacctcaggattgaggtcatgtataaatttaaaatgaatctgtgtattgagaatgaggaagataaggacatacaaaggcgatagagacaaatatgagattagagcagcgcaatctctaatcggggacaagggaacgtaccctggcttcactcaactcttccatctctagcctagcaagccctagtcgatgtctcagattgacatctagtacattacctccctcggaaacgagtcctccttctcttacaaagtcctctgggtcaaactctctatcatctccatatcgatcccaatgacgctcatcagctcttccatcaagccatctatatccctgtttgatttccctaacggcttcggcgtattcccctgtggaaaacatcaggtcgaataggatgatgagaagagagagagggaatatagtgtcatccgactcatgaagtgcagagctagaatctggatccgggtagaggcgctgttggtggtgcagtgcagagagtataagagtcttgccgagggagatctgatttgcttccacaaaagacggcgccatttcaagaattacgttcacatcatttggagaatgttgaagtatagattgaaacccctcaatcgcctattgacagagcaacaggtggttggagcatcagtgaaattaacttgatatatagaagaagaaactagacaaactttggcatgatttccagtttcacgaagtagatacgatctatcccagatggcatccacatccttcgggtcaacttccaccgcttttcgatagcagtacatggcttgctgagtggctcctacactcctgttgtgtcccggaagttgaaaattgtgagtgaaacgaactatgagcttcttgttgggtgcttaggtcacccgatttcgacatgacgaggaagctacgaacctactcttcttccccaattctttccatgtttcggccgccggcctcagatgagctgctacaacgtcacattgtaagctcttctcctcatttcccagttcttgatgacagagtgcaagcgaagcccaggctgcgtaagtggctggttcttggtgaataatatcttgatacacttgaatagcaggtatgtattcagacgagacataatgcatattcgcttgtcccagtaggcgttgaatctctggtgtaggctcaaggattcttgggccatggcgctaagagcagggtggaatgtcaaggttcccagatagatcaaaatcgagaacatctattacaataaaaatgggacaaacagcttactttacctgtcccctttttggactttccaatcccggaagcagctcttaagccggctcgatattcttcttcggcatcatccatagcagtgtcccagtcctgagtaagtaatgaggcattgttgctcagttctgatccggtcttcatggtctttactagaaggctgcatcaaacaaggccgttatactcgtcagctaagcgtaacgtagccagagcatagagaacgcgaggcttacttgaacttttcagcacctctgtcttctaaatcatcgtctccatcatcgtattctccagaaggttggttagatctactggtttcttgttcccttgcatattcgctctcgtcctcttcctcttcatctgtgtattctgattgctcagagtcatcctcactcgagtagtctgaattcgaccaaatcaatagttcaaacgtcataaaaccatacaaccatgcaacccgaagaacccaaagtacataccttgatcctccgggaacaagtccatgaaatcagcccgtatggatgtatgctgactgtcgttatccttccgattgatgtgtgctgcttgatatatacactgtcctcccctcgttcgaggtaatgttagttggcggtgaagggaatgagatattgagatgcacagccgtcgatgacatgtgcaagctgtcgccacatgcactcatgaagctctgaatcattcttccttgctcatctccagcatcatcaccatcttcttcaaatcctcataaggcgctcttcttacatctgctctgttcaggacagaggcatatcacaagaactgaagttgtttccgcacagattttgagctcaagagtttcaacatatcaatttctcatatcggtcgctcaaacaccatcattcaaatccctccaacattgcttcttcccaactgtcgatttctgatctcagaatgaatttttcttttgacgacatccagggagatttcgatgactttcaggctactcagacaggtcctcaaacacagactcagtctcaatctcagtctttgaccatgactcaagagggtatcgtggattattgtgcgtaatcttcgtgtttctcggacagtcatgccgctcatttattttcaagactaacgcgtttcggcacctcgcgctttcttctgcttccttcctttctctttgcttcacaagggggctcacttctgcttatgtcgagagcagcttcatctcagacctcaactggatttcagcaaggtctcctcagactttacaacacgaaacgcgtctacaaagttggaaggcatcatggatgtgatattcagttcgacgagtcgcgtatcagtgagtgacacgcatatttcaacaacaatagacaaattcccaagctgaacagagcgctcaattcccccttctttttctttgtaggtaacagccacctgacatttacgctgaatgattcagacccatcgggcatcatagtaatcatcgaggatcttcggttggtatagctggtgtttcgtttgaatacaatcatctcgtacctaattaacttaattgatgtcattttccgccataatcagctcgtccaatggtacttatgttaacagtacgttttattctctacctgtttctagcgagcatggctcatgatgcgtttgtttgtaatgtatagaccaacgtctacctccgaaacaaaagcgcgtcctcaaacatggagacgaaatcttcatcgggcagcgtacaggtcatacggctggtggtggagtcaaattactctatttgagtgtacaagctgagaaacaaggagaggtcagtgatagcagcgttctcatcgcgctctgaagctgatcgattaattacattcttgtttatgtattgtacagtgcgaagtcttcaatcgctgtgagaacactttcttagttcctaacatatgttttgttcctttactcatatgatgtgcattcatttcgtcttccaatcagatcacttcatgtgagttgcaatatgtttgaacgatatcagctatatgggaatactgacgaaagattgcggttatgacatctacttcttagcgaaaagattggctcgggaacctttgctgatgtgaaaagagccatcgctctcgatacaaacgaaaccgtcgctgtcaaaggtttatccagttcttccccagatgaggacatgtgtaccatccattctatattgaggctgacgagatttcgactgttttccggcttgttttgggacaactccaccatcctaatcgtatctgaaacaattgcagaaattcaaaagcacaagttcctgtcaaatccaaagacgctacagctatttgaacgggagataggaattttagaaaagcttcagcacgttcgtgtattccgacatgtatctgaggtatactatagccgacgcgtcgccactcacactaacgataatgcatcgttgttctctatcttcccattcgtcgtgcttttttttatttttaggaaaacatctgtcgttatgtcgagtatttcgaagactcgcggataatctacttgatactcgaggtgagtagtttatcaaggttccaatgaaatcatccgtgttcatgtcagttcgatatatctgacatctatcatagtatgtggatggagggaatctattggaatacatcatggatattccaggagaagctgggctctgtaagttctcatttcgcgttcccctcaagacgaacgctagttgaatcaacttttctcctgttgctcttggtgcatcagcggaggaagaagcgataggcttgaccagacagatctgcgcggcgatggcatacactcataagcaaggagtcacccatagagatttgaaaccagaagtacgtcgtcaagcacctctgttctgccgttctttga

SEQ ID NO: 2822 - DNA, 7750 bp, Xanthophyllomyces dendrorhous
gttctgccgttctttgacttctcactcatgactgtttttttttaataaaaaaaactatctttctgtgactaaatgattacctttttgcaaaaagaatgtgcttctccaaaatacaaatccgaagatggtgaaggtaagtcatacagatttggactggtcttgttcaacgaacttaattttatcaatacttgcgctctgacttaatcgccattcagattgcagacttcggattggctaagatgattgacaatagcggaacgttgtaagtcttcgtttcctaatggacgcaacaagtgtcatgagctgagtggacggtatcgatatgttgcatgaagtttgaaaagcatggttgggaccccacaatacttagcacccgaggtaagctttttttgcctcatcagaatggtatctcacgaacatggtcactctaacactcctcattcaatcgactcaggttgtactacatacccagggggtgggatacgatcaggctgttgattcttggtcggtgggtatcatagtgtatgcaatgctgaccaaatgtaagtctgctttctatgatttgataaatcaatgtctttggtatcaacttcgaggattaacatgacattcatcctgttcaacgttcagtactgcctttctcggaaacctcggatgacccgatcgaggtcaaactgaagcggcgcaagctagaactcgttgatttttcaccgttcgaggatttcggcatctctgacattggtaagtctcataataactctttgacaaagatgccttctctaacagatgaacaagcacctacatacggatattagccaaagattttgtgaacagattacttagtaaagaaccccacacgaggttgtcacttgaagcagcgctcaatcatccttggcttcgctcgtcgtccgaggctgaacgccatgcaaatggaagttccgctatggccgcatcaaattcctttgtgaccaacacttctgttgatggtcatatgactacaaaagatcagcctgatgatctcagcgaacagccgagagatacatcaccaaatacgacacgtgttgacaacgaaatcgaagaggaggatgaaggtgaaatcgaagcctctcagcagttcagtcagctccgtattaaacagtcccccatacgatccgagctgctcgtagaaagcaaggtgcaagatactggagtaatctctcaaatcatagatgagactatgcttcctcctcagagtctctcgcgaccgatatcattctccaaatctcttccgacgattcccccaactccacgaaggatagttgctcatccatccgtagcaccgaagaatcctcgtcctcgagccaagcatccatcctctttcgtcatatccccttctcctcctcccccagctgttcagcattctccatcatccgcttccatagagaactctgcccctgctgcttctctccctaccactccacaggccgcgtccccgccacgtgctaggatctccacttccaaaaagatcttagttcgatcttctccaacgccttcttccaaaccgacacctcagaaacgtaaactaccaccgtcgccaccaagcccatgtgactcatacgtttcttcttcttcctccgaactgtcttctccacctccgtcttcatcccaagggatgcaacgttcatccgagccgacaaatcctttcactctgagagagagggcgccacctcaatctacaacgactaaggcaactcctgttcgatcaagtgctcggattcgagaaagggccaatggtacgcctggaaatacgttagacagggctacatctacggttgagaaggatgagggggatagaaggagaacaagacgaaagacgacgagtccatcgaaagtttaacgatgagaaaaattcattcctttcgtcttagagacgaaaagttgtgcaatcatggacatattgacgtgcagaatagatatgtattagtttaccagcaagtatcgatatagaaagaaaagatgagaattctaaagagaacgaatatcgccgtagaactccagtatttgtatctaaatggcaattgatccctgctcagactatacatctgagcaggccatgatacctagttcctagtcaacatctggtcagaggaatttgaattatcaaagtatcaagaaggattgaaacagagaaggattctacgaaacgtctggatacgatatcgatgaggattaccagtacgcgtcgatagaccggtttcgtagtactcgttgctcataattcccttctacaacgtatattttgacacaatagtagaggtcagtccataaagttctggcctatctctgtagagacagtggagttgcattgatgagtacagaagctggtgatagaaagaagtttaaaaggtatcgtccaaaagtaaacaaacatgactgttttgtggttgaacagcgaatctacagatctagattggcatttacctgttgaccgcctacctcgtttgatattctgttgttgttcccacaggtctccctctttcttccctttctagaggacaagatggacattcaaatgccagaagatccatattccgatcaagacgccataggggagcttgaggaggaagatgacgagtacgacacgtatgacgggatgtacaacggcgacatccatcggcctacctcactggtagagagtttcatcgatccagtttgtcctcaacaagctcattatcaagacagaatcttttcttgtaacttactgaatgatctgggtatgttgtttgttaaaagtcgttacgcgatcctcctatagatcagccggagaaagctctacattccgttgaggaacctgctactggcttcccagcggtcgaccccgacttccatttgggttttcatgatcaagcattggttcaagagtcaacaacacctctctctatcctatcaaacgagcatctatccgagcaatacccatccgagtaccctgcttctgttgcttctcccgctaccgatgtgtccaatgaggatgtatcttcatcatcaactcaccatcgaccaaaaagatcaacatcagttctcaacggtacttacatcatccccaaagccctcccgaaaggaaaagagaaaatggttgagaaaccgttgctcaaacagaccactgcttcttcgtctgcatcgatcaagaagaagtcgacaggctccgattttggatcaggtgtgagctccagggattcttccatcgttcgaattaacgctggtgatgcaaaagtcgagagaatcagaaagccgccgataccgaaagccatacccgacatcgactgctcgttctgtggaggagatgaccagatgaataaggctggtattccggaggatatgatatcgtgtcatctgtgcggtcgatcgggacatttatcatgcctaaggatggagaacaaggagctcatcgacacggtcagacgctatgagtggatgtgcatcgagtgcaaaagttgcgagatatgcggggtcaagggagatgatgtaggtttttaataagtacgtttgctaacagtgccattcatatcctgacacttgtctgtttcttcgaactctttttgcagtcaaagatcttgttctgtgataaatgcgatagagggtaccattgcgactgcctcacgccggtacgttaatctatcgatgttgtgtcatctgagtcataaaccaaaagcagcttgctcacgttgttacttaactttgtgttttgtccggaatagcccctgaaaaggcctcctaaaggtcagtcttgctatcagttctctcagtagtaaccttgtcgactgacccagtccgttcttgtcaatacacagatgattgggtctgccctccttgtcgaccaaaaaagaaacatcataagatagtcaacgaagacacaccagctcgatccatcattcttcacacttcgggttctacccctagcacatcgactaatacccctaccggccctcgaccacggggccgaccccgactgaatactacaaacacgactactccaccaccacccacaatcttgagactcaatctgggtgccgtgtctagagcaagtggagcggcgctccggttgacattcaaacgtccaaatgacgaaggactggatgatgacgatagggagaacggagagagtgagagcgaagaggatgaagaggaggacgaagcagagttgtattcattcgggtcgatactgagtgaggcagaggccgaatcaagttggtcgataccagataagtgggaccgagaactgttcaccagtattgagtctagacttaaggtagtgtttcggttttcctattttcttacggcttttcgccatcaaatgcataatctaactatgaatcttccaactatcggctttttgttgggtaaaaggcgagatccagagcagccttgagcatcagccatgtggattcgggcgcgtctgtctcaaacaacactccttcatcgtataaccaatatcttcatcgttcttttagagaccgagcgatggcggcgtctcagcctctgaatatgccctccactagttgggtttctggcaatggtttgagtgcagaagatactgtgccactggaacgagtaaaaaagatgcgattcggaccctacgagctagacacttggtatgatccgccgtatccagaagaatacaccatggttccggagggcagattattcatctgcgagttttgtctgcagtatatgggagacaagagagtatgggaataccatcgagttcgtaacttctgtattcttgccccatccctatctgcttttgcgaggtgtttggtcgtaggttatgatcaacaaagtcgcctgatacttttctccaatgtccattcatcaaaccgactaggcacgctgtcatacgtaccacccaccaggtgaagagatttaccgggatggtccagtgtctgtttttgaggtagatggacgaaagagcaaggtaggttttagttgttgatttgcattatcatctaaagccgcgctttggattcggtgttgactttggtttttccttgtctaaaagctctactgccaaaatctctgcatgatggctaagatgtttatcgatcacaagacattgtattatgatgtcgagccctttttgttctatgttctaacaacgaagaatagaggtgtttctcgatttgtcggatacttctcaaaggagaaaagcagtccgctaaatttcaacgtcagttgcatcttgactttgccgtttcatcagcggaatggatgggggaatttccttatagacttcagtgagtctttccattctttctttctttctttgtagctatgtgtgttatatgcgattctgatccctcgaagcgtgttcttaggctatctgctatctaaaaaagagggtcgcgtgggatcgcctgaaaagccattatcagatctaggactgctcagctatacgagatattggaccatatctgtatttaacttcttacgcacagcccaaaaaccactctctatacggagtaagtcgacgctcctggaggctcagtcactcactacccacctaaacttgatactgaccactttgccttacaaaaaaatcagccataagccgagcaacttctctcaccccagaagacatcatttatgttcttaaggcttacaacatgatcaccatccatatagatgcctcatcgggtgaagcttcacaccacatgcgcgttaaactccctcaacgtcaaatcgaccgatctcatcttggccttcacggccaactttctgacgctatcaaagagaaccaggccctctctattccatatgattacgatatttcgtgggatcctgaagtcgtcgaacgatatctgaacgatatcgaaaggaaacgatgggctacgatacaaccttcgtgtctcagatggacgccatttatcccagaaagaggaagacgtaagaggaaaaagaaggctggtcccccaccaccatccgatgctatcgagctcagcccgagaaaggcgagtaatggcgcgccgaccgaaaagaatgaactgaacggcgtttcgaataacatcactcgttcactcgctctcgcaacccattctggctatcatactcacccttccgcctcactccagacggttccgactcaggtcgttcttagtgattccttggcgatcaacccgacggaacacccaacatctatccgggcatcgacttgagctccttctcatctaaacggtgtcgcatatttcatcggcttcaactcctccatgactctgagatagggatgtcgactgggtgaactttataagaaatattcgcatcatctcgttgaggagtgataagggggaagagttgatctccttattaggcttagggttgtaaatctagatatatgtgttaatcatctaatttcacctctcttgcttgttgtagattacttgtcttataataataattcattccatcaaatattgcagctgatgttgaattgtcctacgttcaacaaggatgatacaagtgatgtcggtgttcgcttaaggcttgtctttaatgttcttgacgatcaaactgaaaaaagagaaacgaaaagaacagagtcagccttagtaggtagagatcagtaaaggcaaggcatcaaatagactggactcacctcttgtatgcgctaacatctccgtagaactgttgatcaggaagagaaagaaagatcagcatgcccacccactgacaatacaccctctttgttcatataaatatatatatatccatttgcgtaccttctggacagttccgtctgcacaaacccagagctccttggcgactatagtgattccgatgtaaaagagcatcagtctctgatcttcggcgctctcgttatatctcttgaggcgcgacgcaaagatgtacgcgcagatagattgaaaaactctgaacgaaccagtagtaatgaatcgggtgtcgtgcgaaattaggatgactcctccgttccacttctgaatagcagccatcaaagcgtcgataccctgcaaaacatcattggccgagactagattagtcaaacgctatcttcattgataatgatggaggaaaaaaagatcaacgtacttcgatatccaaatgattggaaggctaaacgagaccattgtttgatttattgattggttgatgatggaagattagtgttcgtgttacgccggcgttagagaacagacaaaagacagacctcatcgagcaagatgatgtgtggcctctgcatactgagcacagcgaacgccactcgactcttctgacctcctgacaaggtcgcgatcttctgcagaccagtcaaaccagtgattccgaacgctccaaggtgctacaagagaacaaaagaagacaaggtcagcttagctttgtttgcttgcttgcttgtatttgtttgagaagaaggggatacagaatagaaggatatagacaaacctgtcggtactcttgttccgattgaccagggaattgagcggcaaggaaggcgacaggcgaggcagttaggtctaatgagtcgacgtgctatccgatttacatggtgaaagcagtgaccagaagtcatgaacaacgtaaggctctgaaaatatctcgctcatgatacctcagcaatatagggacgtacgtgctgagcaaagaacgcaattcgtaatcgaccgtttcgaacggccgttccttgcattgcttctaagtctccaacaagaagtttgatcctatttgaacccgcattatcagtcccgactgtcttcccgaagga

SEQ ID NO: 2823 - DNA, 10151 bp, Xanthophyllomyces dendrorhous
cccgaaggaagtgatatgagtgataaatactactcacagagtagatttaccagctccgttaggaccgataacggcgattctcgagtcaagtccaacatcaatattcacattcttcaggatgattttttctttagtataaccgaatgtgacgtcgtctagctgaagcaacggtggcgaaatcttttcagtctccgggaacctgttcataatttgttcatatgatcagaaccagtcagtatcttgagcgtttctaaacaaaacgcttcgaatgatttctaaaacaaaacgagtaaagacatacttgaatgtttccgaatcatcctcctcaggtggctccaactcgggaagcttctccaagatcttgatcttcgactgagcctgggcggctgtagtggagaaaagaaatgagttatcgccatcaagtcagccaactcgtctgactattagacagacaaacacagagcatggagagagagaaaggggtacagacctcggttcgcgttgtatctccatcggtcaatgaaagcctggagatgttgcctgtacgccagctgggtctcgtattccttcttctgagtcttgagtcggtcggtctttgtcgcatagaactgggtaaagttacccttgtaataatcgagtcgttcagagtgttgccaaattatactattgtgccgaaacagaatggagaatctcagcaatgtcggtgtaacccaggtttgataaaacaaagagaagacgtactcagtagcgacagcgtcgaggaatgatcgatcgtgggaaacaaccaagagagtcgactcccaagtttgcaagtagtcttcgagccaggcaatctgtcaagagatataatttggcactgttaatttcgcgcttgacaaataccaaaagtgtgagagtactagtgtgaagaatcgaggaaacgaacggcattgagatccaacatattcgaaggctcatccagcatgagcagatcgggtttgacgaacaaggctcgtgccaacgctaatctcattctgtaatcataaacgcgatgcattcagatttgattgacatgaatatgatcggttagaaaagcccaaaaattttgaagaaccgtgaatcagaaagagaagaaagacaaacctccatcctcctgagaaagctcttgttggcttctgctgatctgccacctcgaatcccaaaccaaccaaaagctgggcagctctcgacggtccggtctcggcttcgatctcgatcaactttgcctggacctcgcctagacgcttggtcagaccctcggcatcatcgtccgacaaggtggtagaattgagttgagtcgtaagagtagcttcctccgtgagaaggtggtgtcgccagacatctgcttgtaagacggattgaagagccgtagtgtcgtctcccacgatctaagttagcaacataggaacaagtaagagactgtcagcaagagaaggactaagagtcacaaaaacggatagaaggcatggaacgactaacttcttgctcgacgtaaagcactgagatatgttgtgggatggcaacttccctgagcgccatgtttcgaagcaatgtagactttccaattccgtttcgaccgatgagaccgtaccgtcgtccgtgagcgagagtaagagtagctcccgaactgttgggtttgaatatccaaatacggggatgagtttgtggatacgaaagttgccgtcgcagcagaaagatattagagaactcacagaatacggttggatccaaaggagacatcgatgttggacaagtggatatctttggattttcccttgctggaagacatatccaacgggttgacctgatcaagccggacgagaatcatgaagtaagcgggcgtacttgaaggagcagaaagaatgaaagctcttatgacgcaccttcatgaacatctcctcgtaagactcctgttgagaagcgttggtcgtgatgtgtgacacagaaatataaaggataagtcacaaatcttttggactactaagagaaacgaagagagcaggataagaatcggacgaacctgtttcttctggatgtccataagtttggaaccttcgtatagggcgtgtcggtttcgtttctcaagctttgcctagagggaatagtagaatatggccggactcaagtcaatcgacagaccagagtgagtatattgataaatctagcacgttcataccttaatcttggcctctgctttctcaagcttcttcaagtcaactcgactggcctgtaaattcgagagaaacacgcgaaggtatacatataaatctttgaatgaccgagggagaaaacagacagagaacgacatacctgaccctttccgtggtgctcaagatcgacctggccgttcagtccgagtgtagagctgagagcggctcctgctcgcttcatgtcgatcacctggtccaacgccttgacagacgactttgtctttggtttctgccgggtcgtcgaggcttgaaggaactcggccatctgggcgatgctattgaatttcccatcaacgaggcgtacagacatcagccatacattgacacattgttggaagccaagagagaaagaagaagaagaagaggaagacgaacagtcggtcgagctctgctaactttgcgtctccatcgggtccaccttcgagcatacctctcgacatggacaagatctctgcctcttcttcctcttcgtcctcaagaagaccgacgatgtatgacacaacggtctcgtctgtataaggcagagttgtcctgatatcttcagctagttctgccatcgatgtgtatgtatgtgtgtgtgtgtaggtgtgttgtaagtttgggcggtggtggctgtaagagaaggaaggcagaggtgagccaaaaaagaccggggcagacggaattttcgccttcactttctatcgaccatcgtcttccctctttccatcaaccttcaaggtttcccttcctcggccctctctttcgcccacgatgctccgtcatctctcccttatgtctctcggccggacggctcctgtggcgtctagctcaggaattgttagaagttttcacctctcggctcctacgtttgaatccaagttcaagcgaaagattagagaaaaccgaaagcgacttgaagcctctaaggagagggtcaagcgcgattggttgaacagccagcctgaccctttccttggagttcctctcgtggtacgttttcttttcctactgtaggagagagtgttggggacttttctctcttctttctctttgaaggaagggtgaaaagggagcggtatgacctggtcggatgatgtttgagtttcgtgcatggactaaacttggtcatggcttcctctttctttccttctttgccttcttcctctcggttttcattagtacaaggatggtgtggccgagcacgagaaacaatggagacagacaaagatagcgtcggctatacttgacccgcaagcactctggatgacgggtctgaacaagccaaagaacgtgtttacctcactgtcttcttcaccagcaccgacagtgaccattccgaatgaagaagatgtagacatcattgaatctgaacaaccgccctcggatgctactgccgatgtcactactggggctacgatctatacaccgtcgaacccgattgagtctttccggttgccggtgtatatggcacaccacctgtcgaacgaggagaaggagtttttgttctctaccctgccatactttactacggatgtcaaatcgttgacgacctcgccgacggatacgttgactgctgaggaacaggccaggcagaacgttcaagcgagagagtcgatgaaggctgaggaacaatcgctcgaggcgatgggtcggatcttgagcttgaggaacgcgagtgcaaaggtgattttgaaggagaacatgaagagggtgatcaaagctttcgaagcaccagaataccagtccttccagcagaatgctccccgatcgagaaaagggacggacactggatccccagaagttcaaggtatatccttctttgcattctcctttgcttcttcctttgctctgcttgcattgcaaacccctcgctcaccccatcgccctttgcaatataagccgcgatatacacgctccgaatccgagcgcttcgagcacacctgatggtccaccaccaagacacagccaacacgacgaaactccgacatatggcccacaagcgaaaacgggtgttggaatacctaaagacgctcgatcgggtgaggtacgacaaatgtctgatggagcttgggatcgacaagcgagcggtcgaaggtcaacttgtcatccacaagttctggtacgtcgctttctttgctctcgactgtcgtcctcctactcttttcttcgtcagcctcttaactttctttgttgacaaacatcactgcttcactctgttaaaaaaacgcacgaacgatgactgaacaaaaggcgacaaatccctcaaacgcaaaacaaggctcagaaagatgttaaatatatcggtcaggtcggcaaacgaggatcgatctctcaacgaaaacgacggggaatgcagggcaagcggatgtgggagaagaacccggaggctcactactagatgtgtctcaaatgaatcaacaacaacaaaaaagaatccgatcagagactcgaatggatttgtagcagaagccagacagaagaggaacgggttctatttatgtgtctttttgtttaaaccgcccatcatctgttcttgcaaatatagacagaaggcagacgttttttttctccttcctctccctatgtttggaagtttgtgccagaccgatgaaacaggtctgaggcatgacgatggaatgaatcagtgacggatcgagtgaggtcatcagattacaattgatatcaactacgtaagacagaggagcacgggatgataaagaagacggagaaatagaagcactactcaaagacaagcgaacaaacaggtgtacaaaatgcagagtataaagaggcctagggctggaggaagaaatccgaaggagcctgaatcttaaagcaccttgtcaaggaactctaaagcatctttgaacgcatcctccttggtctttaactcgtggtcatccgttagatcacctctgacggcgaatccatggacagccttatgataaagcttgaggtcgagtccttcggaatggtttgtttccttccgttcttgaataatctgtttgatctgttcgacctgagacataggcaccatatcgtcctcctatgtggattggaagtataagaagagtcatcagaggcgttgggagtggtcaggatggcatctaaagtacgggtgggtgtgccgtataagtggaagaaatgctcacatctccgaccgcgatgaatgtgggtttcatgatcgcgttgatttcggaggggacggaaacttgggactagggtggaccaaaaaaaaaagtgtaagtacaaaaggaagcactcagcattcaatgttagcaagttgactatacaaaacttcagactcactggatggtaggcgacagcggcactgtaagaatatcacaaacagaatgatccgtcagtcaaacccaaaagagtctcattgcaaagtctgcactggtacgcactcgatcacaccgtccttatcggcggcaaggatggcgtgtctacctccgaaacagaatccgacggcgacgatcttcttgacctctggatctgcccggacggctttgaggtaatcgttgatgatgggcagaatgacggagtcccgatgagtgaacgtccacggaccgaatgtggcgcccaactttacggtatcgatcgctttatcggccagcgtctttttttctcggtctcgaaggttgggaatagttgtctgatgaggaggcaatgggcatgtacagaggcatgtgaacatggacataagaaaacgtgagcatgcgagcatgtggaagaaagataggaataagatcaagatcgaaacgacaagctgatacgtaccaacaaatcgagagggactgagtcaccggcaaagatatctggaataagcgttctatagcccttggcggcccactcgtctgctacgagtctgatgttggttgtctcccatccaaagatatccctgatagaatctcgagatgagttattttccgaccgaggcgtccgaagagtgggagactgctataatttagacgtgagaacaagatgatactcacgggataatcatcacggtcttttcttttgatcctccttttggatttgcgatataagtgggaagtccatagaccgtggtagcctgtccaccgggtgttccgctatggatgtctagatgcgagcaagcgaaagatcagagggagagagaaaggcatctgaattgagtggaacacagttcgacgcgaaccagacgcaagcaagtgatgtaatactaacggccagaaacgcagcattctttgagttctccagacatgacaagtataagtatggctgatggtatgagtgttgctacaaatgctatcacggacgtggacgtttaatgttcccaagatggtgatggaaacctggacagggcaacttctgaagccgattaagatgccctgatgtcctgatgccctgatggtcagtaaccctaataatacgtcatcggagaacacgtgtgggtaggtgtgaccacgattgggaaacgtattacataatccaactggcgtgcccttcgatgccgaattcggccgagcgtgccgagagccggacggaaggctcgctttgtggggaaagatacttgattgctttatgaatcacggtgaattccatttatgatccttaaacaaccataattagatctattacatgctctttcttttcaccgttccccccggaaagagtccacttggctgttggtcttcttggctctataatggcatggatgggacggatctctggatgctcaagtgttctcttggcctctcgggtcgtcatgttggaaaatggttcgaaaatgatatctgactcggccgccttaagtctgtgctgtaggagacaccaccaagaaggcttaggctctataggctgtccaaagaccgccttctttacacagcgaatatgcttgccggtcttggaataaagacacggccgagaacaatagatagagcatagagtattctgagcacaacgagaggagtgagcgacataaccgacatacatcttcactcagtcatcctctcttcctttggcaaaagaaggtaagaaaagacaagacaagacaagaagaaagcataatccggggatgcaaatcatagttcttaccccaaggcggggctagatttgacatgccgaccggccccggctatacagaaccaaatcccttccgccctccagaggggcctcagctgggacgtcgatcgttcttctcgaggggaccaaccagaggaatacgggctaatgtagtcggggggaagggaaattatcttgggctctccgcacaagctgtccccactatccccagtggagcccagtggtgtagaggtaaatctttttcttttagattctcgctttgtgggactcctgatgcgcatccgcttcccaaacgtccgcttcccttccctttccgtccgtcctgctttgccgtgtcttgcccggatgatccttcgtttccttgtctggtcctccgcgttttttctccatcccgaagatgttggaccccctggaaagagttgggcctccgttgccgattctattaaagggcccaccccatgattgccttctctcttttttctctttcccctcttctccattctccatccaaacttttcattcatcctacaatcccaacacatatattacagtccttcctctaggttatccttaaccacaaccacaacagccctttccctgtagtactcaatcgaggcattcaaccatgggaaaaaactttacccttactctatgcttcttccagtctcttgctggtctcctcttcggatgggagcagtctgtcatttccggagtaagctttttccttctttgcgctcgtttctctctttgtctgcgcgtttctttctttgcgcccatgttgatcgcttgtcgttctctctccagctcatgctcatgcccgacttcaaagagaggttcggaacatgtaccgataatggcacttgcgccgttgcctcccagcgacagagtgtcattactggtatcttctctgtcggtcagtaatttttctttaacctttgtctgaactttactcgatgcgatttctggttctaaccttttctttcctgtttttccttctgctgcaggttgcttcattggagctcttatttctggagccttggcgtaagtcacaagggtttcaatttttcttgatggacaaaatgacgcgctcgacaggaaaaagtcctcagttcttttagttccggatctgacccgtttcaccttcaccttctcttcttgccttcctttactttctcttgccttctcgtctgtcttcttcctgccctcacagtggaaagatcggactccgaaatgccaacttgttcagtttgatcctcttcatggccggtatcgccatcgaggttagtccccatattgtttttctctcccgtgctcttcccgtttccattccgttactaattgcctccgatttatccgacttttaccagacctctgcccagaacacctacgcccagctcgtcgttggtcgagtgttgaccggatactctgtcggttgcctttccggtttggttcctactttccaggccgaggcttgcccgccaaaatggcgaggagtcgtcaccggttctttccagggttgcgttactctcggtattttccttgccaacgtcgtcaacaagggtatgaacacctacaaaggagcgacctcctggcgagtccctatcgctatccagcttgccttcggtcttctcctcttcatcggtttcgtcttctcccccgagtcccccacgtactttgccaagcgaggtgagaccgagaagtgccgagccgccattgccagacttcgaggaactgatcttgactctgctgagaccgaggagttcttccagaacatccaggtccgacagcagcaggaggccgccctcggagattccacctaccgagagtgcttctcccccaacggacgaatccttttccgaactgccatcggctgcatcatccagatcggacagcaggtcactggtatcaacttcttcttctcgtacggtgcccagttcttccagaacgccggactttctgatcccttccttgtccagatcatcctctctgctgtcaacttggccatgactttccctggaatgtacgtcatgtacgccgtcggtcgacgaaacgtcatgatctggggagcggtcgtcatgttcatcggtcagatcatcgtcggtttcatcggtcacttcctggctggagagtccgtcgccggtaaggtcctcatcgccttctcctgtgtcttcatcgccgcctttgcatgcacctggggtcctgtcgcttgggtcgttaccggagagaccttcccgaccaggttggctgccaagtgtgtcaccatcgccaccgcctccaactggggaatgaacaccatcattgccttcgtcgtccctatcgtcactcaggaggacggagccaacctcggaccgatgatctgctgggtctgggctggattcatcctcgccatcggtgtcttcaccttcttcttcgtccctgagaccaagggtcttagtatcgagagcatcgacgacctttaccacgcccgaatccccgcctggaagtctgcatcctggaacgcccagcgaagggccgagcaggacgccggcgctcacgacgagtccgtccacgcccacaagctcaagaacatggtcgaccagccagtcaagatcgaccacaagcacttgcccgattccggccatgctaccccgttgcacaacctttcccctaccaactctatctgagcggtggtgatagtcttttctgtgtgatttcgggttctgtcttgcttttctttctgtcttgcttttctttctttctttaatactttcgaacctacataccaaaaaaaggagcgatcgctcctgaccttttactcttttcttcggtggtctttcgtgttttccctcttttcctaccgtctaatttctttggttatggtgtcttgaagtt

SEQ ID NO: 2824 - DNA, 20390 bp, Xanthophyllomyces dendrorhous
gtcttctcttttattccaaaccaagaaatcgcatggctttcttttaatcaaacaaccaagaacgacacatatacacgcacacgcacaagctagaacaagtctacagtaccaaccgctcaactgatacagaaaatttgtcgtcttaagctgcacgtgatcgccatgttggaagccagaacttgtactcacattcgcgtcgtccagacgttgctctatcttttttgaattttggaaaaatagtcctcttccttctttctacgttgctcatcccagctttagaacctcaacaggaggctcatgtacaaccgagttctatcattctacagattacgacccgtccggacattaacgtttctctccacccgctcgtttcatagatcacctcttctcttttctgctcttgatcaacctaccaaagacaaccagtccgccgccgagtctgaaagtcgacccaagaccgaacatcgttccatacaaccacccaggattcacagaccgcgaacaatgttcaacacttccattcgaccggcaattcccaagttcccgggaatgacaaccctcgacaaggaggcgttcaatatacagataccagtcgtgagagcaaaagtgccaacaagtgctatgaggcaaatcaatcggaaccctcttttcaaaatgcaagtccttcttccttttgatttcttcttctctgatttctatatatattctttgtcctgttcgcgtgttccctggcttgatctgatacctccgtcttcttcatgggtcttcctcttttcttcctagcaggactaaacaatctggagtgacaggtaaagggttggccgtagtgactgacgagaaggatagcgatatgaggtggattcctctacctgctcatactaagggtgagtcttgttatactatgctgcgtctacctcagctgcctttgcaagaggaaacgctttttctgaatctgactatgcctcttgttcctactgctaaacgactgatcggatcaaacagccgacctgcctcaggagacgcttgatgcgctattagagttagccgggtttgtcgaggtcgaggattcatccgtcacccttggttggaactactggaccgtccgtgagtgttctcttctctctttgggcctctttcttcccttggcattctttcttgtcggtcgaagattggctgccgaggatacatcaaacgaagaaaggacgaaacggaaagaagacggctgatgaataaatctgatggttcgcttcgtccacccccgcagaggaaatcatctcggccatccttcctgaagatgcagatatgcaggatggaatcccttcgagtttcaccatgaccggccatgttggtgcgtctattcttctctctattcggaaggtgctagtaaaggtggtcgttccggagctgatatggatagaaaacgtcctgttttccctcgctttgctgcttcactatttctcgtcctaactttcctcttctattggacagcccacttgaacttgaaaaagtcaatgctgccgtacagattcttgattggccagatcttgctcgacaaagcacagacaatcgaaacggttgtcaacaagttggatacgatcgaggaccagttccgagtgttcaagatggagttgctcgctggaaaggacgactatcttgtttcccaggctcgttcttctcttctttccctttcttgcttttgttccatctgaaaatgtttccctctcggttcgactgacaatctcgggtttgcgccgctctagatcgagcaagaatgcaaattcacgttcgacttttcccaagtatactggaactcgagactaacgaacgagcatcgaagactcgttaatctgttcaacccgggtgatctcgtggtcgatgtgatggcaggtgttggcccgttcgtcgttccggccgcgaagaagggatgttatgtgctcggaaatgatttgaaccctcatagttacaagtacatgcgactcaacaccgaacaaaacaaggtacgtcttgttctggtccacagcacatggcggatctactcagcgcacttcgacggctaagcccttgattacttaccgtaccctctctctttcctctcaaggttgtggataacgttcgactgtttaacgacgatggccgaaatttcattcaaacgatcgctttcgaggcatacatgttcccgttcctggaaccctccctcgagagacaacttctttgtcgaccagacataccgaacatcggcaagattcccggcagcatgggcttccagtcttcgaacgaaacacacccgccggtagactcagcatcgcgccagactgaacatcactcctcccatacctttcctgaccttgccatccttcattcagatagtcgttcagcagtttctccttcagatcctacctccacaaccacaaccacaaccactaccactactcccaacactacagtacaacatcccaatcccgatgtagccggtcgatctcgcaggagggtcaaagcacctaagccgatctacgaaccaactctgttcatcaaacattttgtgatgaaccttccagattcagcgctcgagttcttggatgcctacagaggctgttacagacctttggtggacgatgccggactgtcggaacacaagatcgagatgccgatgattcacgtgcattgcttcgctccatctattgcggagggtgctcataaagagatcttccaggttagccctttttttttctttttttcttttttcttttagtcaagtttctatgaaagaagaggtttagtgagaagaacacgaaactaaacatgcctttgtttctgggcttttcctatttccttcccatgcacgcttctcagcgagcgagcgaacgactaggatacaccatcgatccggctaacgacccaacggtttacatcgagcaggttcgtttggtcgctcccaagaaatggatgtactgtctagggtttactcttcccagggaggtcgctttcgcatgcaagggatctgtcggaacccaaaaagaagaggagaagaaagaggccgtggaaaagggagagaatgattctactcaggacctatgaggatggatgaaacgaagttagagatcaagatcaagttatatttcccccccccttcggagacctggttcggtcctcatgggatatgctcgaaggcagatcacataaatatcctcgtataagaaatctcaaagctagaatacatacgaaagaaaactacaaactcagaccacgagacatacaaaaataaacattaggcatacttaagatataaaaaaaaataagaaataaaagagagaccgaaagcatgtccaaggaggattagacggcagttacaattgagaaaagaccttgtatcgagttttgtaacctacggcccaaccgagccatcgggctatttagtcgtgcgatatcagatggggtttgagaaagttagcagaaaacaaaagaaaaagaggaaaagacagattagacccgactgaccaccgacgttcagagcacgagcgataacggttggaagatctccgagtacgacatcagcctattttcatccaaactccgatcagttacgatagaccttatcttgatcttaggatctctagtcgttcttcatcgggacgattgagacgggaaacaagatcaaagggggtgagagaacgacgtacagaatcaagcatcatgaatatctggaccgggtttggttcgacgttttctgcgatgcaggaagaaacgtacccaaagaacgaattcagaaagtattcatcaaatccacctgctgatgtgctgatctcgacgtctaggtcatcgtcaacagaggtatctggccagaactattgtgaaaaagaagatgcgaacaaagacgttggacagatatccagaattgaagaagttagaagacggacgatagaagagacggagggataagatcggtggacagacggtatgaacttgtcgaggcaggatcaagatctcttccccagggttgactgaaccctgctttccatcacgaatgtagagcatccttcctttcaactgaaaccagtctccgcgttcgattcatagcacataaacatgctgatgagcactcgagctgtaggattaaagatttgagcgaaacagatcagactcacacaccgaaacctttctttctgatacaggtggtaatgtaaaggaggcgtggccttcgcctccctcgagttagtccagagtgacgatcgactgatgatctgacgaatcatcgtgctctcttctccgtcgatcgtcgtattaatcgaaggaaatgagactactccgccttcaaagaacagaagcgcgcctggatgggtaggggacggttctggagcatgcagggtctgatccacgaagatggatcaaacagtcagttctcgtcacaaagctcggggttggtacgagacagggaaagactcaaacagtttttgggaagaatatatccagcatagtgcaacagaaatcaaaaaatgtaggtaacaaagtatgagatgatgaaaagaaagtttgagggttcaatgtatgaatggttgatcttgtctaatacgtgtgctctgaatcaccgtctatcgcgccaaccgcaattaacgcatggcagtatccttctcttaacatgttgtacatcaatgcttccccttccagccaagccagccgacaaactttccaccagcgccgtcaccgtcgccccaatcaaatctgttgacgatccagtgaactttgtttccgtccgacttcccattttgcaaccaagtctcgagaaactctccgacgacatcctcagctcgaacctccatcactatacaaatgaccgttctgccttcctctgcctggctgtcgaatgtctggacgagtccttttatcacattagggttataaacgcaatccaagcaaaggatcaaatcgtatgcttcggtaggaggaggcgtagagtgaagccaatcgacttcggcaatctcgatatttgtcttgtttgatgggtcaagcgaagatacgttctgagagatcaatttgaggcagtcaagtctagcgcggacgaagaagagatatcagactagtgaataaccttaatcaggtgctcacttgtcatgagacaagtaaccgtcaaagacagagacttactggtctgaacagacccatcgtctgacgaatttcgccaagaaagtagcaacgagacccgtacccgaccctaactcgagcacgttcgcttgttgaagtgcttctacgttaaatagcggagggtatagtgaaggcatagaagagaagtataactgaggaagcagatattccaagaaataaagactgacaaaacagaaggtttgattcctaagtgcattcagtcggctaccacgacaaagagaaaatcgcaaatgctcacctcgttctccagacaacacaacccgtcccgccagcatggcccttcaatcgtttcatatcctgtttgacctctacctcgagttctacatcctttggtcttcttccctctttcctgactttacctcttgacggccttttccttctctctgctgttgatatcgacgtcaaggactctacatgacctgaagcctgtgtgatgtccacgtccgataactttggaggagaaatgacgagccgaacggacatccgatcctcgcggtcgttcaaaattcccagatgagactcttggctgtcagatgaatacctggaagaaatcgctcggttggttataacctcaaaggcctttgtttcaagaaatgaacgaaaatagacatagtaaatatgttaccagacaagaagaagaagaatgttttagtaaaacacatagtcagtttcagcagattcggaaagagcgaacttcttgatcggcatctgtcactgaagttagtatacttgaacgatgcacaaggttgggtatcatttctgtcatcgccatcccggatgagcagcgatgggtgtaaacactttgggcttaatggtagtgcggagtgaggactgataaaattgatgagctaaccctaacagtcatcctgacggttgaaacttcagcaagccattctcccacacagccaatcccatcaaaccctttcttttcattccctcatataccagatagatctgttgatagagccagcagaggttcgattcctcatccagaagccaaatccaagataagtgagtgtgtgtgtgtttatctttttgaagtctctcgatcgggtaaagtcgtcgagacacttgctccctttggaggaattctttcatttagtcaaaatgttttctaagaactgtatgactcggattcttcctgctgcttcttacattggtcattgtctcatccgtaatattcttcgctattaaactggtgctgagctctgactttcatctgttgctcctttgttttgctctgtttgctctccctccttcctcctcgctctcttatgaatcagttgaaaggcaatccgacgcgtcgttctcgttctccttcatttcgactttctctttgccctgagcgacctctagactcgattttaacgccagaaatgcattctggaatgtccgagccgagtggatcgaatttcaagaaacgtaagaagaccaatgatgatgatgacgacgagagatcaggcacgagcaccaacggcggcggtggaagtcggagaggtagcgcagtgctaatgccgatgacgaaagcagagaaagagagagaaaaagagaaggaaaagaagaaaggcttcagttgtagcgagtgccataggcgaaaggtttggtatgttttccgtcttctgatttctcatctctgcgtctacttttcgatagaggagatcatcaactgacctttactcactacaaattctcagttaatgttcatgcttatggtctttggaccctccgaacacgagagaaactcataggctgatatgatcgagaacattgtgtggtttggactgaaatccgtctagcaaaaatgcaaccgagaaactccctgtcgtacgtgtgccctcgtatatctttttgtttgatatatgagcgaatgcaaaaattgacctataatatacgcttcgtcgcgtggcgcttcaacgtctatcctttggactttggggctcaccagatcattgcgtggctcgaaaagtaccagataggtgtcatcctttcagtaaggctttctgtcttgttcaacctactcgtactcttctaactccatctatccctcacttctacatagctccgggcaagcctgaggatgagcttctcgcacgattactccggacagaaaaaatcttatcgcttcagtttccacagtataattcctcagacgcccttcccgactatccactcccgacaaaccatccgttcgtaacccaatctggcggacgatcgaaaggcagcgaagaggagagtgaggatgaagagttgaaggaggaggataaagacaggggtagaggacgactcacaaaagggaaatggtttggcgtggttcgtataccttcttttctgatatctgcttaatagcatctcaagagatagcttagaacacgtctgatgttcaattggatttcggtccacacagagcgctgtccagtccatgtcggaggcacctcttctagacaaagtacgcccttgtcatccaaccaggtccttctttcttcctaagcgcaaaggaaactcatctgtgttgatatctttcaattcatagctacgagcagagaatacgacgatgaacttattacaagcagaacacgtcgcgattgaactgcagttagaagataattcatcaccgggttagtcaccataattctccttaggatgttccttgtttcatttcatttcatttcgttttttttttctttcatatttcattcaactaacgatgaatttgatcactgcgaattgtcatgctacattgatctggttgaaaacgtctagctgaaaacctacaggtatgttctgcctgctctgttttaaattcgaaggagagttagttgaatattcatcatgcttgttgaaccttctctttctattaccagcgcctgattaccgagtgtggagtgtcgcctacaaaagtagcagaactcgtacaagagctccctcctaaggactttgcaaacatatgtatgtcttggcactctgttcctctatctttttgccaatattcgactttccgaccgttggagatgctgaatgtgttgcgaggaaacagtggtggactggttctttggtaagctgtccaaacaatctcttgtccaatactctcaatgctattctgcctgttgctcaaattgtgaacacatcatttcgcagccaagataaatttcacgagataccctatccatgagggcatgttcagaggtgcgctttattacttagtttgtttctaccataatttgcatcggcactaaactttcatttggtcaatataaaattctgtcaacagtttgtaagtcgtgagagctcacatacaaccgggccgtcagctgggcccttacattctgtcttgtcttctcgctcgtcaaacgttcttacacgacgcgtatagcctacgaggcgttatacgcaaacggactgaagacagatccatcaaacgttcggtcgttacctctcgtattcataattcttgccaccgttcgttccttcttccctctttctcaactatagaaatccactgacacgtgcccatgacgcgtcaatatatattttccccaatcaacaccgacatgtggcatgactccacttaggctgtccgactctcaccggaacatattggaggtgatgaccggacgcggagattgacttccctccgatattactggtccagtcggcgaagtattttaattgccacagccatccaaagtgagagtctcgagctcgtgatcacgagactattgagctcgcggtatctaataatggttcacgacagacgacttacagtacgctacctgaccttcccttgttttcgctgatgtacaatatgaagaagcaagtcatgaaaacaagacagaaagctaatcagtcagcggtcattttttttcttctataggaatgctggagtcaacttggagccagtctgcgaaccgctcaggcgattggtctgcatcgggatggtacgaagcttggattggagttagtgtccgttatgttttggtcatattgttttctttgtaaactgatcgtttttgtctttttttcttctgcgtatctcctctttcacaaagcgcgttccaaacggaatatcgccgtcgaatctggagttatctatatcacgccgatcgaacatattctttgatccttggccgcccacctgcaatctctgatgtctacaccgacacattacctccctcaaatatcgaagattctgagcttgttcctggtgttgctcccgaaccgaggccattaagcgagccgacgccagtctcatactcagtattaaggcatagtttaagtaggatcatcggaaaaatcacacattacttccaacaattggcagagccaagtcattatagtgatgtcttgaagttggacgatgaactgaatatgtttgttacgggtttgccggctcattttgagtaagtatagttccagttgcccatctatctcaatctttcaaggatatacgcgcttcggtgacgatcaacagttgactcttccatttttttgctggttgggtagtatggagaatccggacaagtctctagatgggtaagaaatctagtttcgtgttactcgcatatgcttacaaactcaccaaaatatttatatgggatatttgtttcttcgttcaacagtgtatattccgcgttcttgcctatgcgtatgttccctcagacatctcaatatttgatatcttatgttaaagacgatcgagctaacttctctcctgactctgtcctttcagatcgattcttcctacataccgaaatcctttttgtcagaatcactctgcatgtacgtctgacctcacttgtactttcgtctgctgatccttagagaagcttatactccccgatgacttttttccatccagcgaccttggctgttacgaaagttaaagtcggataagttcttggtctcccgaaatgcgtaagtacatggagtctttcgcttgtctgttggccatgtgttctctataccatgagtgtttgagagctaacatatctgagttgatacagctgttttgagtcggccaaacgagattttgtcatcgttagtatcggatctctattctttgtaaagccaaattcacgtaggaacttaattttgactctattcaaccaacagagacaagctttcaaaaaagaatcttcggttgatgtctcggccgtcatgggtggacgtgagttgtgtcctgtatctctagctctttgtgttatattggagcactgattttgtaataatattgtcgatgtttcccgatgcagagttccgagagtttaacgctgctatgattgctggttggttgtttttaccatttccttatcgatcgtcctcgtatatagttttaacccacctttggtttcttgaaacaggcataagcgcgattgtcgatccacacggatctgaaggtccagatatgagaggtatcctagctacgttcttggatgaccacccgccggcatccgctatcgatcctaccaccaagaaagaacgaaacatcgtgggttgccttctcttgacgtctcaatcatttttctttgtccacaacttttcaatcagaatcaactctgatgtgtcttgctctacctccttgcatgtcagatcgaaaccctcttccatcgatctgtgcaattacttaacaaagaaaatgatccgcaagttgatccagcacgtactttactcgacccaggggtcgaaaaagagaaccacgctcgaacactactcaatctttccggccatcaagctaccaaagcctcaccaacagcttccgccgctgcagctgctcattacctatcgaggccaccgctaggcggtggaccttcggcatctgcttccggttcgaaccagacgggcagtaccagaacgggtcacggcgggatggatccagattcgaccttctctcccggaggaaacggggctgcccaatgggtgatgcatagagattcaccacaaagtagttcaaggatgggagacacgccgcctagcattgaagacgagagcgcgcaaaacttacttgataaattttggcaggaagtatgtcttccgttaccttcttctagatagggcatcccatgctgagtgagaaggctaatcctttgtcatcatctattcctttcagaacttagttttggatactgtacgtctaacggatttgagtgtttctaaaactctctgctcacctttatcggaataaattttgatcaacagatgggaaatcacgaacaaatatttccttccaacttacaatcaacgtcagtcctgctttaacttaatttatgcttcctttatgtctataatactgatcttctcatgagttaatctgtcggtgacatcgaatagggctacagcttctcttgagtttccggggtcgggcgcgaatggtaattatgcgagtgggacgtcaatggccggcccgtcaaatgacccgctagattttgattcgggcgttcagccggcgacacctggtgatctcaattactggaattcgctgatcgtacgtttcgttgctcgacatctgattcgtgatgactgctcatagatactgatgactttctctttcccctcctctcagaactcgattttgacacaaggtggagataccaaatcgaatcccatgcttacgggagagaacggcagtcgctgagagccaaaaggcgactatcaatcatctaccaacaactccttatgtgttccaactcctctcgtttagttctcatccatctgtcggctatctatgtttgaagctattgtcgatgatatgtactcactcctacttttcgacaatttccctcaccaatagttccattatgaactcagttgtcttatatatttaataggagttttctttcttatagagacgtttatgcatttttatctcattcttcgttctcaactgtcgccaagttcatatgttgtctgctgtgtcagtctgctctaaaattgaggtcaaatcataatatcgataaatcggccaagtggtctcatgttctgtatgtacaatctcaggagagtagggcttagtcaagtcatcagatgatggcgaagaaagtttagagatttgttcgacctacaagacgtcttccaagcttccgtcgctgcctgccggccttgatcaaacccgtgacctgcgagattgaaaaagcgaaagataccccagaaggctctgcatgattagtacaaatagatctgagtctgtacaaatactacacgggatgtgacctaccccattcccatgcgaattcaccagagcctcgttgagcgatgtgttcttcgaatcgtctaccagccaaagtattagctaccaagcagcatgttctgcctaacttcaaaacatggatacaagaaccgcgctgtagaatcatgtgaactcaccgaactttccattgcccgcctgctgcaggtatctctgctgccggtccgtttccgtacacagtacccgagctcaagaaatgtagggcatcctcccagcctgtcgtataacctgactggaaccggtcatgttccatgggtcgacggactgccttatcccaatattgactatgtgcatctgttgattttattcaatgagatagtaagagttcattcatgcttatccattgagttggaacagaaaggctacaagaaagaggcaacaagaggaaagcgtactggttgcgaattgtcgtctctgactcagaagatcaggggaaatctgaacattacccttgtgcttgggcccaaggaagacaggaatgatttctgctcgacaagcatctttgaagctccctatttatccaacggcagtaccaatcaaagcgattaggtttggacccgaccagcagaaagtaaacagtgcagtcgaatacataaaaagccgattggatagcatgggttgacggggaaaaaatgagtgatggaagaaaagagaacgaacagccagcatcccatccatcttgctttcgataggtccaaaaaaagtatccgctggtcttgccctcgaatacctgttactcagagtcaacgattctcacaaactgagtacttggggaagggataaatagactatgcgagttgcaagaaagaaacacacttcgagctgagcgcgcacaaaatttcgtcgcttggcatcttgttctccaccttgagaaccattaagagatccacttaagatcccagaacgcgttgcaaaaagtaagtagatcgagcgcgggctgatgaacatcgactgtctaatacgtacggattcagcgctccactccactctccgacgattactcttcctcccccactttctgacttctgcacgaggtccgtacccaaacgacccgatagatcccctcggacctcctctgcgtgcctttcagctgatttagcgcaatcatccgaggtgaaacatcgatagacatgggtgtcgagtagaataaaggacgaagtagggaagtaaatctttagaccagcctcaagctgccaagcatcggatatcatcctgttctcgtcatattgtataaacccgtgattttagcttagataaccttggggtgtattatacagcgaaatggcaaggaagacatacaaagggaaatcaggaccacaaatcgaacgaagtcggttcagagtgtttaaatgaaacttttgaagctgagggcaggccgcaggctcgttcattagctccagtctttggtcatgagagaaacaagcatgtatattcagtttcataagtcagagtacgctaagatgatctactgagacgaggggatactaggtttttccccactcaagacatcgacagaaggaacttacccaataacgttttcgacgcccgctatagcccttagtaatacttccaacgtccggactgtctgagcctggtacttctggtgagtgaacaagagagcctcatgagacgctccggcatgagcatctgggttctgttttcccggaaccgcgtggagatctataccatcaataaagcttgtgagccgtgcgatggtccttgaggaacctcatttctagatgaagaacgaaccaacgagaacacctatatgatatctgtttgcccactcaaatgctctcgtaattctagaccaagcgccctgatagatttcaactgtaaaatcgaactcagtatccttaacaagggatggatctaggccagatagatgatagtatgatatctgctctctcccaaagcaaacaaagaagtactcaaattcagcaaggtgtagaccgtcgagaacaagcaaagaaccttatagaaaagcagcatagatgggacgaacgggtaaccgaattgagttgatccctctttgggccagaaactcgaaatcgctctcgacgatccatgtatcccaatgctgttcaagcttccgtttgatctcttctttcggcctgcctgatttacagatatcaaggtcggatcctcctgatgatggaaagagatcataaagctgttaaacctctctccttagtcaatatgcatatcgaagaagagagaagaaacagaccgggaggagcagcgccctcgaatggactacttgagatccatttttcaagagtgaaccaagaacctggagtcgagaccgtccaaacatacataatggatgagtctgcagtactatctctcaaaaaatcgatagaaacaatcttgacctagattgactcctgcccagaatctaattccatcattcacaattcgtcaatgtatcgggtttctttgaggttctctatatatgacttgcgaaagacgaagaaagagatgggaggacaaatatggtatacagacctatatcgcatgatctcgctctttgatccattaccgatggggatccttcctccagcttccgatccaggttgagaaaagctttgttgctgttgttgactattgacacccgtgcccgggaatgatgagcccggaggcttggaatcatctacaagcgacctgaccttgttagataactttgcgaaaatgggcatgtccagagatgatagtgtcaagagttgatggaggttggtcggccagaaacaccgccagtaagcggattagataatggattaagcagtcttacgtcatcgactaccctacagatcaactaacaacgacgcaagcggccacaacgacaggagatgtatgatcaatcatgtataacatgtacaatctacaaggtgtatatttgtaaggatacagctgggcaaatcaaccgactctaagaagaaacgcataggaaaaaagagagataaaggagagtaaacgttctaagcggcgtctttgccaatctaatttgtgtacgacaggcaagcacatcattgttagttctttcaagcccatcgttggagaagatatttcgaatcgacgaacctcgattccaggcttggctcccaaggcatccttgatctccgagtaaataaggaattgaccagcgaccaatccagcggctgtttcgatcgtttttatcattcatgttagctctcaagcaagagtagtataatatgtcaataatctgaacaaaacagtacgtactcatcagcatcctaggtccaagacctgcgaacaaccccgcgaatccagcttgcctgcctagagtcaacagcctgcccaacataggacctttcggtccatctcccttattgatctgtgagagaagggtgtccgcaggctagcaatggatatgcatcagagggatgtacatagacagttaaactgttcagttaaccgaacaacgcgactaaacaggaggacaggcgcgatagagaagtaaactcacgtgagagagcacagcggcgacgataccagcggtgataccagatccaaggttgatacccagtctttttgtggtcgatagattctcctgctcctccttcgtcattgacttgtaagcgagctcatgcataaactcgtttgttgctatcgattgccgagagagatcattgagaaagtcgtcgcgtcaaatcccatgtctgcttcggcaagagcagaatgaagcacgaaggacacgtccgacttactgaattgaccctgatataggtagaccagactcaaacaacgatcagcaaaggcagagtgagaatcaataggctcaaggaactataactcacgatagtgtacggaacctgcttgcacacgatcggaatgaatccagaatacagtccagagaatccttcggttgaggccaacttggtgaatccagaaaccaagccggatgcgtactgtggttccaatgtgtgaacagaaggagaaaaaccagacaaaattcaacccgggtaagcattgagttgtgcatatgtagccaaacgagatgacaaaagaaaagcaaatcattaggagtcttcgaaccttcggattggaaaccagccgaatccttgtcgcctccaatggagtcaagaaaatgtctgcaaagaactcggagacggaagctccgaccaggtagatagttgttcggttggcaaccgcggcttcaggggaaccggcaactgtgtttcggagagttcagaattataattggaaggtaagcgaaccggatggaatatggacagagataagggaaaagataacggacgatcaaccagcctcttcttcatgtactcataaccggcaaacttgagaccacctagatgttccgacgataccaaatgggattttgataaaaccaaggtgaatacatatacaactaaaactgaaaaaaaaaacagattaagaaaataaggccacaaaccctgaataagataccctacggccgtgggtccaaatctgtagcggtacatccatcgatcagtttacggtgagatatttggtaaagacggaacagaaaaatggacaagatgcgtcatccttacccggtcattaaaccggccgctccttcagcagcaacaatctttcttcctgcagtcaacattgagtttcgcttcaaagcagggtcgatttggatccttgtcttgatgatatcgatcggggtcatcaacccatgagtgctatcagtttcaatcaatccacgataagagtcagctttttgtgaacacactatcaaggtaaaccgcgtatcagccggagcaagaacagttacccaaagaatgatggacaaacatggtgcagcaagaagcacccgccaggaagaacgtgctgtaatcctgacgggtgaaatttggtgtaagcgagctctttacggtctgtggcatgttgaatttcttgattgagacaagagatgaacgagtgtgaatgcaatcaaggagaaaacgagaagcaaaaaatcggcatcctggtttattcttataagaaacaatcattccgactgtttctgacccccggccgctcatctccgcctccgttacgtcatcaccagctttttttgttgcactcaaatccgttgtcaccatccaccacgtcccagtaatccggagggacaactgattggcttcgttactcatcgagtttatctcgtaaagtcctttcatgtgttcccacacctcattcgagagagcaatcaagcaacgaccgagcgtgctgtcgaccgtgtttcgcaagtcattgactggcaagtacatttggaggtgatactttcatgatttgtattatagataaaagacggttccccgccgaaatagccgcatccgttatatatgtaatgagaagactcagaaactggctttcaccacaaacgcacatatgacagaaacaaggagaaagaaaaggaagaaaaatagagaagacaacggaaaagaaaattggaattcatgctgcaagctgaatttcatggtgtagctttgaattcaggtccgacgtctaatgtggactgacctatgtgaactgcttgatgagttcactagtccgaactatctatcttggttcgtttgggcctccaacacataatcaagctcagttcgatatattatattatcaatcgagctgtcgtctgttgagtcatcacgtgcattttcctgattcaagtccatatcttacggtacatcgttgtgagaagctcactcgagatggacatgaatagagtctccggagcggatgtccctctagatttgtgacgggtgcaggtcttgaccaataaatgataatgcatcggaacacgggcagaaaagccggcgacagataggatggaaaactagtaagataggtatacaaattgatgtgaaaccaaaagcacaagatttgatacttgagtttaccggttattacaacatattctcctctccatcttgatgtacgacccacccggacatgaagtttcgaccctcttggagaatcttctgtaccagattcttcaccacttcaagtgtctatatcggccggaaggatcaccaagcggaccagtcgaatacatccgatacttgatcagaggtgacgctcaagaaggagtcagaatgtcggaaagaaagatggcagggcgttctcgagtagctaacaacagaagaagcgagagactctgaacaagcacctacctttcattctttcccaactgtttgagatcaatgccggcgatcttgacaaaatccaagcagaatcgaattttatattgtatgagaaagaacgagtgagctcgacggccaaagaaaaagaaacctttcatcgaccagtgatgttggccgctgcgttgcctctattcgttgtgtttcctggggcctttttaaacactagaggccacgttcctccccggaggctgggcgggagaagctttcctacggacgcctggccagcgatggaaggaatcgtgaatttgaacggaatggcgaaagtatcttagacatgggtctagttgttcagaaggtctaaagactatatagtgcttgattccctatacttcacatcataaaacaaaaatacatcgatgagccaactgtgatgatcgatctatgaacaaagcagatgatgaacggcaaggattcacaaatctaatgacctgttattcaggtcctcgactggagctatgtatctgggtttgtacaagagcatcaaacaaacatctcaatcttgttagatcacaaccatcgacagctagatacaaaaaagaatctctaacctgaagagcccgaatcttgaccgtgaattccgcaataccattcaaccgacaccattgtgtcggaacatcaacaataccgcagacgaccgagccgcatgtatagatatctcattgtttagggaacgagacgccaaacgaagagccatagaactcggagactgccaggccggtgacctttggagaaaaactgggcgagcgataataggtgattatgagatagtaaatctggctgatgtttggtgatatctttgctttgttgaagtatgcagtctagacttcgacgcaattttgatgagtatttatctatcacgagaggtgccaaacgagcagaggtcacacaaaatcttcttccgatcagttccaagtcagttcctctctttccacttctgtttctcaatctatctgctgagcatgtggatcggcgtgtactttgggtcgcagtttggacgcttgttgaggacaaggtggctgacgatagaagagagagttatgatgacatattgtggggttgatagcacccgacagtcatgatcatgggtgagctcgttcgataagggagatccagcacagtagacttatctgcaaggagaaagcctgctcaggcaaaacagcaatccacatactataagatggttgtgtaaatctcatctaatctcaagccaaggcttttttggcggcatctcgcttctgccgtcgtttctccagagcggccctgttcttctgtttctctccaaatccagaatcatgtaaagcctagaatcgtaccaaaagacagcccaagaacatgatcagatctcaagtgcatccaagcctttgcttgataaaaagactatctctcgaaatttttaccatcgcggccactcgtttagcggtggaaactttgttgagcgattcaagaactttgtcttctggaagggtgtactctgacaatgtagcttctgaatgttattattaaaaataaaaaaaagaaagaaagagagaattaagaatatacagagaaaaaaattattattgggaaaagctggatgggacgaaacgtgaacacgtactgatcttcttctcgatcacttccaccaactctgtatctctctcagtcaccattgtgatcgccacaccaccccttcccgctcgagccgttctaccaactcgatggatataatcctctccaacccttgggcaatcccagttgacgactaaagcaacctctggaatatccaaacctctactacctacatcagtcgctatcagtac

SEQ ID NO: 2825 - DNA, 17841 bp, Xanthophyllomyces dendrorhous
cagtactggtgccctaccagctcggaaggtcgacaacgattgtagtcgttcgtgctgagacaaatacgaatgaagcgcgacagaagggatttctagttcggtcaatagagcctggacatgagcagccgtctgacaacgagacgtaaagatgatggtcgatggaggccagggacgggtctcgacgtcttcggaaacggcagtagtcgcagacgagacgggtgggttgcgcttccgtttagatgaaatgggcttggaggaagacgttggatttgggttcgctcggataagatgcttgattgattccggggggttcaaaaggagatagtataggtatgtttctcgtatgtgggaagggatgaagagataatgttgtttcagcgtgctgacggtcgttgtactgtcgagtacacccataaagcatcacagatcgatcagtcaaaagaagaggagaagaaaaaaggtcacggacgacaaaaggtctcggcttactctgacgcgactttgtgcacaaagatcttttcttttcctttctttggttctcgttgttccaaagttcggatcgcgtctgactctgtggcagtgaacaaacaggtttgccgctcctctggtatccgagaaaagatgtaagccaaatcggcagcgaatgtcggtgtcaacatccgatcggcctcatctagcacctaaaccaaggtgaaaaaagttttcagtaatgttcagacaggctctctattcacgctttatacaatccgagccaacttgggtagggtagtacataccaatgtctgcaccttgtccaatccccactccattccactacccttcaacagatcagccagccgtccaggagtagcaactatcacatgaggcctgttcactagctcctgagcctgtgcaatcacgtccatcccaccaacaattacggaagtcttgatgtgcaacgggacaccgagaacgtggaactgctctgcgatttggaacgccagttctctgatcatcgagaaccaaaccgaagcgaacatgataaattgtgctgaacaaacaaaagaacgcacggcgtagataattcatacagtaaaagagaacgtaccgagtaggcgtaaggacgacagcccagattccatacggatcgcgagaaatccgttgaaggattggaagcgcaaatgccaacgtctttccggaacctgtttgagcaagtccaatgcaatctcgacctttgggtgtaagaatcgcgcatgaaagcttatgtcaatacttgctgaatgaggttctcaaagaggaaaagagaagagaaaatacacataccagcaaggatagcaggtatacaaccctcctggatggacgttggtcgtcggatggacattgtacccattgcagcaatcaacgcgtttgatactccgatactcgagaacgttttcttcttcttcaattcttggataatagagtctacttgactatcctgatcgttttcctgttctgccgccaaagtcttagttagactttcagccgacggtccgaaagaggatgatgaggatgcgggaaggctcgacttgactcttgacacaggcacccgagaaggaagtttaattcgagaaggcaaagccgtagtggtgatcgatggcccagattcaggttctggagagggagaaagttcaattcttgtgcgttggtgaaacgaatgttcgtccggaaagtcggcatcgtcgtccattacctctgggtcatcgtcctcagagtcagactcgtcgtccagggagtcagttgagaaaccgtcgtggttgtcgccatcaattccctgatgctttttttctgtaaacgacggctggaagttcgtgttgatggaagagtctttttgagtcttcagcttcttagatataggcgccatttgtctagccgagtggtcgtctatgtcggcaggaatgatggtccgatatgtttgctaattctatcggacaagaaagtggagtagttagattttgtaagttaggtgagtaaccacaccgctttcgagcaacgacaaacacgtgatttaaaatccgctcctgccttcttctatttgttgaggatactcatcctcatagcaccaccgtctgagaaaacatcagcaaggagcgcgtatctgaccagaagacgaacaacagagaccttttcgaacgtagtagcattcaaaataatcgttttcgcagagcattaagttatgggcgctgcgagcgcctctcgacattgggatgatgttccagaaattgcgcgggcggcggcggcgacggcagcggtagcagcagcagcagcatcaacaacagcggcagcagaagaagcagcagtagtcgtatcatcattgtcaatgaaacaacatttgataaagagagtttttctaatatatatgcagagactatccagacttgagatagcataattctcgacaaggtccacgcttcctttgtaaggacacgtttctttgtctggcttctggattctgcgcgaaaacagaatgtgtttatatacaaactgatcatgaagaggaaattgttattcactatagaatataatgcaactcacgcaacatcaatgaatccgaaccaccagatattcgtctctagaacaagcatgttgagctctgaatacactgagaccgtaagaaatctatcaagttaaacgaaccgggctaataagctataaccggtggattacatcattctagtgctaaaaccccgaacccctccactttcttaatcagatcgtatctctcttcgatcgtttttgttgttcaagtagacgactatagtcagctccatccttaccatcaccatccattcgacttgcaacatgacagtctcacctctatctgattctattaccttcaagaaatctggctttgtggcaaaaaacaggtctgtgtttttcccgtcgttctctccgaataaatcagccgtataaatacatgctgccgaactgatcttttttcggcacccaacggcttttcacataggtttctcaagtctgctatgactgagagactctgtacgttttctcaggaggaccacggcgctcggtttgtcttcttcatcgcctgtgcttagattgcatgaggtcctagatttgacacagactgtctccgcgcgttgatctctcatagagggaagtctactcctgaatatgtgcgactatacgaagagtggggaaaaggcgagatgtacgtccatcagtttctgctcgaatctaaatttcttgatcattcatattgacactcacccaatctgtccagtggtgtgatcgttcttggaaacattcccattgatcgaactgctctcgaggctgctggaaacatcgtgatcgacaagcgatcgtctttcgatcctgttgagaacatcaagcctgtcattgaggcctccaaagcccacggaagcatcatcattggtcagcttactcacggcggtcgccaggtaagaccttttgattcaacgttcgtcaacttttcaattgtgtgcgatatgcgctgaagctttcgtgctgttcgactggtcgatcgtgcgctagacctcggagaacatcaactcgcaaccgttatcggcatccgatattcaatgcccttcttttgccggcatggccttcgctgagcctaagcctgcgtcgcttgaagaaattgacgctatcgttgagggtttcgcttatggagccgaagttctttacaaagcgggggctcatggggctcagttgcacggagctcatggatagtacgtttgtgccttgaagactgtcgacgctatttttcccgttatgataagtttctgatctgtcattgtttttcttgagcgcatctacagcctcttgtctcaattcttgtccgctcggattaacaagcggactgatggtacgtttcgctgtcctttattgagtcaagttttatgcttatctcaaacggctgatgcgtttaacaaacagattatggtggatccctcgagaaccgaatgcggattatcattcgaattatcaatgagataaagcaacgaattcctgaggacaagttcattttgtccatcaagatgaacaggtgcgctgcttcataaaaagagtcggtgatgagttgacgtgaacggttggttgctgatctatcacactgatctgtgtatgctggaaatggtttacagtgccgacttcgcggacggaggacttacccctgaggaatcttctactggtgagtttcagaatctagtataattgctctgatgaattcattctgactttgctccaaatgtccatcctctcgtagttgcccagcagctggataagcttggtctagacttgatcgaagtttgttcaatctcgtcactttgtttcaattcaaagcatttacccacgttcccttccatttatataatgtttcttctgcgcactcatcagcttagcggagggtcctatgagtccatggctttcgaacacaagaaagagagcacgatcaagagggaaggatatttcattgagtttgcggaacacattcgttcgtcattcatatgtctctcttctcttgatagaagctactagatcgtcgatctggaacctgtttctgttctttcgctcctttttttttctttcacaaaataggaccccacttgacgaatgccgttttggccgttactggtggcttccgaggaaaggctgctatggagagagccgtcgctgagagcagtacggacagtgcgttccgttctgaccaattctctagcagcgtattcttcattattgaaagaaaactgatctgtctgattttggatcatatcgcgtcaattaccattgatctcgaccgaaacagtcatcggtctagctcgacctcttacggctgaaccgtgcttctgcagagacatcctttctggcgcaatatccgaggccaagcccaacaaagttgttcgtcttcactctcggcctctttcttatcttgttctcggtatcataaatttgatcacaatatgcatctgtttactattcctagccaaccgccgttcagactggaacctccatcgctcagattggagcaatcgggcatggaaagtctattcccgacctctcagatgagaaatcgtgagtcctcctttttccaccaacataaatatttttcgtgttattaaactcaaatattgtgctttactcctccttgatgtcaaaaacgtgtatcacgacaatcagagctcaagaatgtttggacgccgtcatgggcaaagctcctcctaaacaaaaagttgacggccacaacaccactgagtacgctggtcagaaggaggaatagagtttctacagtcatgctgtttcttcttctgttatattctatccttctgtttaagagtgtcttctaagtgaggtttcagactgtctgtatttccactctgtacatcgagtagactggacggtgttcgttagtctcttctcatctttcttccacttcatcaatagagctatgtcgttcttgtgatcaatcttaaaagacgccaaagggtatgctcgatatcagattaggaacattttcagcatttcatcttaacaggctaagcagcttagttgcaaatggcaacgggaaacaaaaacatatatcattacgatgttataaccagaacgagagtgatagtaagagtggtacaagtagatgaagcgaaggtatggaatattagaacccaaccactcagattctcttttcgatcaacgggattccaaggcatttactacaagcattatttttttgagttttatttaagtagacctatattcccctagaaggctgaggcggtttcgatggtagcccctctggcgctacaggaagggtagaattcgatgccgaagtagtatcggatgaggatgctgctgatgactttttcatttgagcgagttttgcttcaagagccgcgatttgggcgtcggctctgattggaatattggacgtacagcgtttaacgaatagtactcttgtcagtccgttacacaaaacgatacattcgaacagaagagaaacggaagaacgaacccttgaggagctcgttggtttttgaccatactcaacgtagtcctcctatcgtgagatccagaacctgaattcgagccgtatttaccaccgttcgatgaaaacgagcttccgtccccattttgcatcttttgtgacgtttcaaatccatcgcggttcattaaaatgaagggtaattttcagaatgttagctattagtaagacgatcttcacgatgatgatgatgatgacgatgatgataataagaggggacaagagaagaatgagaacgagagaatttacctgagaagcgaacgtcacgaccaagtttcgtcctcgaagcggcttgtcatgtagtcccgtcaaagctttcatcgcgtcctgtgcacattcattcgagtgacacagaagaagaatcaacaccacgtatagatgacgatgacatagtattgtaggtagaaacgaagccagacaaactaacctccttagtagcaaactcgacgaacgcgtaacctctcggtttccctctcatcggcccagatttatggaagagaaagtccaacttggcaatcttgccgaaccttgagaagatcttgatgagagcgaatcttgcgcaattagaaagcgaatatgtttcaaaggtttcattcaacgagttcgataaggcaattgaaagggaaagcagaaggtgcgatagtgttagggccgacggtatacatcaataaggagagtagagagcatccataaaagcaaaaacaacctactcatccacagtaaactggagattgccgacatacagcctcggcgttgcgttcttagatatctccgaggtagccatagttctatgctgggatttcttgtggccagagaacaactggtgagtgagtgttggtggagaacacggtcagcgtaaaattcatatttactttgaagcccaaccgatgacgctctctcgcttatctcctataaagcaaccggccaacggactcgacgacatcaatccaccaccgtacttatcacagagaacatcagtatcgtacgtgcacaactaggatcactccagagggtgaacaatggctttcttgatcccactccttgcgccttcaatagcagaggcgtcggccaacttgggtgagtttctcttatggcttatggatctataccgtgctgtctgagtcacacactagacgtcctgttgaccaacccgttatgatctttatgttcatcaaacgatgcacaccacagcaatcggtatatccaatgcagttcagggaacttcatcctcggtgtcgattcaaatcgggaagaaagtgtttacgaataacaaagggttcaacctatctggcttaccatacgaacttcgagaaaagatcctgctcatggcactggatgaaagcaagaggtttgttgatctggtttgacaaaccgtcttcatcttcatcttagactgtctgatcaagctgacatcttccatcctcttcgaagtcttgttgtacctatactgaagctgacgaatccgtatggagtgacacctcaacaatacgccgcgctggaaaagcgatcacctttaaatcgctcaaacccaaactaccgatcggtcatgaacgagtatagatcggccaatggatatccactctcgagttggcgatggttgagagtttgtagagaatggtgggctctgttgaggagggaattatggaagagatgtacgatcgatggatggaatccgttagtgacgcttttcttcttctttctgacgttgctcttccagagagtgtgcggataaagcagtggactgaaatagacgagaaacactgtcgtttatagatatcaagtgtttctacgtctgctggaaagcgacgactttcatgccgctccatttatcagaacactcagtctgctagatggcttttcttccccttcggacctttgtacgtgaactgttctagccaactgtgtgcgcacgagctatcactgatggatttcttgatgatcatgccagatacaatattgacatcaccaaaaatgaaacacttggagacgctcaacattctcccgatctatctagagagctctgcgtttaatccttatttgcctccgcctcgcccgttcccattcggtgttcatctgatacctgtcggaacgatccgatctgtatctatcggtctaccactcgatcaatgcacaaatcagaccaccagacgtcatctttcgtctctccaacttgattttctgggggtcaccctaaaccgacctagcgagcaactgtttgcagagcttgccgatctcgtcggtaagaccgtccagacaatctcgataagatacttgccggacctcacggtaccgctgagagcctttgtggacccgggggtgttaactggcccgtcgataaggtcgtttgagagggtggtgatcactttgcccaaaatcacttcgtttggtagaataccttatcagaaccagccggaagctaacgaattgggagagagagtggcgttctcccaacgattgatcgatctattggatatggacaacgaggggccaacggtcagggtttctggagcgggcgacaggtttgaagacaaaggggacatgaatagggacgagcaactcgaaagtagaggaggtttaagaaaccggacggtcgtctatctaggaagaagccacggagacgaagaggagcatggtctgtcgacaggccgacgaatctggccgttgaccgatgagtttgcgtttgagcccatcgagaaacgacccatgatggacaagaacaagtcgggatcgaggctaagtaacggccaatgcgagggcgggaatgacgagaaagacgacaaaccggacaatacggttgagtcttgggaacgccagactgatctccggttgttcggtgggttgattgggattcgaatggagtccaagaagcgatgatgtgtacgcgcgttgttttacatgccgttatctgctctgtatcctttgtatcgtctacatgttctgtatgttctatatattgtatcttacccaaacgtcctatcacatctacatgtatcatttatcctttgaattcatgagccgatacatctcatcccaggcgggatgtttctcaactgcgctagtcactcggctctgaccggcccggggtttatcttctgttggtagtgctcgaccggacttccttcttacctgcttaccttcatcccatcaacgacctttgtttgcttgcttgcctttcgctcgttatatctctggtctagtgttcgtgtgtaggacaacgatcaagattgatacactgaaggaaactggagttttcgtccctcggtgtcatctctggcacgatgaatccgacggcggtctgttctccgacatcaactccttcctcgcctagattgcattcatcacattcttcaccacagacaacagcgattgcagcatcaacaacagcaggaggcttctatatgaagtctccctcctatccttctactccagctcctcattatcggacaagtattcattcgtctcacttcccgcctcagacgcctccgcctggttatactcaccctccacctccaccttcgcactcacacccgtctctgtcgaatcgtcagcagggacaacgccatgggcattcgcgatcgaactccaattcaagcatctaccattcatatcagtatcaacataaccaatcgcatccctatccgtttccgtcgacatcgatggtagatcctgtaagccctggcggcttgacaggtttaggtttcgattcggccaatcctgataggcaggttgtccatctagataggctcgatgtatcagaactctcgagagccctgcggagggcgagagccgttatgggatatcaacagcttgacggagacgaagaggatatcgaagagggagtagaaggagagagggaagaaagtctacccagttatagatccagaggcaggggtggtacgtctccgatgttttcgatctctttccttctactaactctaatttggagtgtatctgacctcaccctcatcatctgcttttgtctatgaaatttcctctccggcgcagtgtacggctcgtctagatcgacccttcttacttcgttctccactggtctccctcatcctcttccttcctcctcattcccatccgactctacttatcgtcctaaccctaaccacatcagttcaaccagcttccaatctggtccttcccgacgagtatcatgtcttccctcagctcaaaccggtcccttcttcacagaaggaactagcccaattctctgtccactagaagatgcccaccgatcgggcgagatcgatctcggggacggagaccgggatgcggaggaggacgatgttagagtcagtgggtcatgggtcatctggggacttggagtcgggctgggcataggttcgattggatgggcttatgtctctcatggttgaaagtgaaactccaggtcgagtccggtcctgaatatcgagccaagctcgagcggggtaacaggatggtgtatctatcctttcttcattcttttctttcccataggtggagcttccatatatgtttggtatttgtatccgtactgttgtaggtttgtagcattatgataagggacatttgcgaggataacaacaacagagttcctcttcggtacataacttgagggacgaggctacttgaaactctaaggagaataatagatctagacggactatacagacaagtggcttggaaaggaaactctaacgagaaacataggtctcaaaaggcatgaaccaacccaaacggtaagagacagataagtaaaggaatgagaggaacgagagaaaactgttaccaatccagcagagtcttccctggatctctcctcaaattacctcctcctcttagatgttcaggaaggacttgacctctcaatatcgtcttttccaccacgtccacacatgccttcggggtcactctgccgtagtaaaggatggaacccgatgggaaacaaatctgttgccggacaataagaagaggatcaagaggtcgtcgtcgtttgatgagatatagttgggcgaacaaatggaaaacaagcacaatgggaaaggaaaaaaagaggacgaacgatcatgacaccggcgtatcggtgtccacccaaatggctgattttgaagacaccgacttccttacttccttccccatgcgatctagtatcagaactagctccagctgcttttctcaacaggtccttcaccgcctgatctcctccctcgatcgactcgagccgttcggagcgtgggaggtcgtgtaaagattcaccggtggtgtccgctgtgtagccgtgtatggagagagtggaggagatcacctgttcaagtaagtttgccgcgatatgacatttcttatcccttgtcttgtgggagcctatggtgggtgtgtatgattgatttgatgcaattcagtcaagtggtcataagcgcgcagggcgagaagaaaaggacgaacaaagcagaacgacagctctgtacggcaagacccaactctccattccatctttcaccgtgtcctgatcagtactagcaccagccaacccgacggtgggactcaaaatccgatcgtagagtctctgagcgccaggcttgttcacattcacgttagaaacgactttgaaatctggaaagaccaagacgctcgtcttgtttgtgtcgtcttcttctgtcgggtcgtcaaatggctcgacactagaagcaaggacggatagtttaccggattcagaggtttggtacactccggggatctcggttacagcaggtgatggagaagatgagggaggcggtctggtccgggtaacagattctaaatagaatgctaacgagtcctgatctgatgagcttttaaggtaagaatgacaataaaacgacataaagggatagcgtaagattcaaccagatccggacaaatgaaggaaagtaaggattaaaaaaaaaaacaaaaaaaacgcacatatctcgaggccaatccgatttcgagctggaaatcaatgccaaccgatgcatcggttctgaacaagattttagccattctacctacctctctctttcctctgctctcgcgtttgaacaaagaacgatcactcactcgtggaacccaacatctcgctgtcgtaatccactccgaactttgccgggaaaccgtcgccttcctcctcttctccttcctgcccgccgactctaatggcctgtccgtcgactccctctccaaatccggtatcgcacccatcacactcgtcagggagagagactggaacctgtgctttcaactcgttcacccatttctcggctggaagtgtaggacccgtggccggagctctgtcagccgatgagctgacaaatgattttagcctattaagcatgatgtatccgtgtggttgtatgagtgggagagatgtgactgatggatccgacaagttgggtttgaaggagaaaagaacgaagagatacgattattaaccgtcctcgttgaatgatgttcactttctcacgttagcggcgcggtcacttaattacgccgcgtcattcaatcgggccggtcccgatttgcttgcttatagttgccacatgtgttacagatagaaaagcacatgctgattcataaacaggtagagttggatgataaacaggaaattagagtaagcaaaggaaagagagaagcatgaacggagagggagagattcagattggaatatatcgagtgaaacaagtggagtgacatgactgagtgatgtgggagaagatggaaaagaggaaagaaaatgcaagcatgtctaacagagcgactttatatacacttgaattctaatgataaagtatctacagaggaaaggcagccttaaagctcagaaacctcgaaagtgcgctctctcctgtttttctcctcggtctctttcaaccgcaacctttcgacttcttcctctgcagctcggagggctgcgttcctctttttcttgtcgagttctgatggtcaaagggagaaggaatcgttgtcagacaagatagaaatcccgttcaaaaaggataacgaaaactcaccctggaagaagagagcaacattggaagaaacaacgttgtcgtcgtcctgctcgtcctctgggatttcgttcaacttctcctgaagcattctagcgtaagtctcactagaaatttcgaaatagccgccagtgcagagagggaaagcaggtagaatcagcaaactagcacggtcgactaatataattgaaaaaaagaaagaaagacacaaagctctcacctaagctcctccatcttcgcagctcgatccttctctgggtcgtaagccaaatgtcttttcaaaaccatcgtctcccacaagctcaagtgtcgtttgtgaacggcgattccatggtattctccagccttaccagcccggacgaacgaccagtatcgctcttgctctctgtaaattcagacatgcgcgcgtcagagcaaaggtcagtaagtgagggtagaagagaaaggattttttagagaccgagaaaggcacggaccgaagatcaagaccggtggtatcaggaatgaaaactacagtgaggacaaaaccgagaagaccgaaccaggtgacgacccagaactttgttctcacatcggccaactgagtagagtcaaatgtttatacatgttgtgaaaacaaggagaagagtaagcgtttcctcttgagtaagcccatcaaagtattgaaagatatcgacgaacgtagttgtacaagatcgcgggggccaaagctcccaactttccagcggcagcgctcagtccgtggcaggtagcccgaatagaagtcgggtagacctcggcagcaagcaagaaagtggtagagttcggaccaaactggttgaagaacgaagaaagatagtagattgcttgaagaccgtgaatgttttctggcttgatgagatcggtgtacatggcagcggctacaaggataaggataaagtccatgatgaaaccaacgctctgcattcggactcgaccgtacatctacggaggtgggataagaaacgaaaagagtcaggatgttgtggttagaaaagaacaactccggaagagaggccgcaccttgtggtcgatcaagaaggcggcaaggtagtaaccagcaagagaaacaccaatgttgatcaagttgtacaaccaaccatccatcacggtcgattttccaggcaaaagaacggagatgaacgtcctttgatacaatagaacaagttgggtatcagactaggatctggttcaaaccaacagaaaagaaagatggactaacgactggaagagcttgttaccgtagaagaagaaatcgttggcaaaccagattccacacgttccgatcatccttcctccaaagtgacccatggcaagtttcaaactagtggcatcgtaaccggtaaccgcgccctgtttcttcttcttgttctgaagctttcggtcgacggaatagtctccatggtagaatcggtggtaggctagccagagggtcatgacaccgacgacagcgaactggactcggaaggtccattggacagagagggtactgtaaggtgggtttcctgatccatggtggaagatgatcaaaaggacgctaaagaaggaggagaaggtcagtatattatgccttcttgtggttgagagaaacatgtggatagcgacggacatcaagatgacttggttgaagagctgaccccatccttgcactaaagaggccgagagcatagtcaagaaggaagcgacgttcagtccaggcgctcatgagggcacacggaatatgaggtcaaagtcaatggaagacatactcaggaaggcaagtccgacgtttcgtcctcggtgaagtcggtcatcagtaagggcttcggcagagactccgctcttagcttccaaagcagaagtcgacgtcatcgggtattctcctcccactccgattccgtacacaaacagacaccatccgtagcaaatctgtagtgaggaagaagacagtagatgaccaaaaaacaaaaaaaaacaaaaaaaaaacacaagcggttaagtgctgagaagatataaaggtaggggcagaggcaaaaagagaaaagaactgacaacccagccgttcaggtcaacaccccaactggcggtcaacatgaccaaaccgagggtcatgatgagagcgtcctggacgagaccccatcttcttccgacccaatcaccttcaaacccgacgaggatctgaccgcagatgataccgaggatctcaaggtactcgatggcattgatccagcctttgctacaaaccttgtgattggagaaacattgcggccaaactgcggcgtacaatggcttgaggtttccgatggagaacaacgttgctccctgatgatatgatgttgtgtattaaaagaatatacatgcactcaacgttcattagtccgaacgtttcgactatgaacgtgggggtttaaaaaaaacctcaaaggggaaggcaggatgaagacgatgaagcgatgacgaacctcggtaaagagacccattccagtgacgacatagttcgagaagtatgccgagaagggcgacaaaggatcctgtaaacataaagggatgattcatccgtgtgtgtatgcaagtgtatcgcagcatgtggattggcaggttgcaggacagaacatgttgagttgtgagcggagaaataaaaaggaaacttttaatgatcggagattccacaccagccggatgaggacgcggaaggacgaaccttcttgaacatgccaccgatgacagaaagctctcgtttagcctcctcagtcgactgtctgaaagcaaactgaactcgacctatcgaatgaatcgaacaaatggcatttgtggtcaacggtcaagacttctctagcctctctgaaaggaagggaagaattcaaagtaacatgaaacacaacttaccggatctgggcaaatcagcccagtaagttccgttgtgataactatccgctgggaagaactcttcaaccaacaattcgtgaacacccataggagtcttgacacccgaaggttgccagtcctgttcttgaggcttccccttctccttcaatgttccatcgttggatgagtcggacgacgacgaggtcgagttgttgataggtcgacccttttcgtctgttatcggagcgccaagtgagttgtgttcgaccgagaaaagcgggtaaccttgcgcgttcccaacgggacctcctgagcgaggcatttcttttttgatgatgagagaaagacgaggagagaaaacgagactaaggagagagttgaaagtagaaggtgttggaccggaaaggaagtcaagaacgggaaatcttatgctgtttcgttttggggtaaaaaaatattgaatgataaaaaatgatgtaaaataataaaatttaaataagcccaaaaagatcttccggaaagatcgtcaccggctctccgagccgatcaggtactagacggtggagtgttgtttttgtccgcagctggtctatttttataccctgcacgcgacctggttcttatagtggcacacacgttcgtgggagaaggagagcggagtatttgatatataagcgattcacatatgtgacacactgcgatttacgtatctatctaagtgttgtcttgctcttgtcggtgtctctgtcttggactgtttgtttacacatctctgcttgcgtgcatgtgtatattctcctctgaatagacgatgtaatggactcatcgtttgtacttttgtacagctcgtacatacactcacacgactcactcttgtgatgccatttttcatatcagatccaatctactacagcccgagctgcgccctcgcctctctcagcacggcatctattgcctgctccacatccgccagcccagagccctcatcatcgcccggttggttcttattgttgacggcctgagcgactcccttttggacaagggcccaagcctctggctcggtgtgagcctcgacccaacggacatactctccttcactccatccgtgttgctggtgaggtaaagaaagtggcgaccgaacaagaatatgatgtgatactacgagcgcagggagatgaaccgtcctcgccgggtcactcaacaggcaagtctccaagaataagaatggtcggaaagctcgcaagcaaaggtacgcctctccgatatcttgaatcttgagcgcgttccttcggtcgttcccgctggcggccaacaggaaggtaccgagcgagaactcgagctctgtcatgtcgctcgtcaaccggagctttccgctctcacccaaaggagaaacgatcgatgcatgaaggacgaacgtctggatgatgtatcgaaccaattcgaccgtccattccttcttcagaggaccgacattgtaaggcgcaagaattcttgtccggacgaatgacattcgttcttgaaggtctttcatgtatggactgctcgctccgcccatcgacatcatcgaaccatcggcttccttcgcgccatcagcatagtccacccggtgaagtcttcccagcgtattgctgaactctcgacggatcgcacccagcaagtcggccgtatgtttcttgtacagtttctcgagttcctgccaatgagtgattgaatcaatcgtaagcttgggcaaaaaaacctcatatcgcatgcttggcatcatatcaaatataaattagaaaaaaaaaagaggaaacgaaacgaaccaggattgagggtcgaagcaaattcatcacgcgttcattgtactccccctcgatctttcctacagcggaatggcaatgataaagcgcgctagtcagctgcgcgttcaacacctgagcactagtctcc

SEQ ID NO: 2826 - DNA, 8734 bp, Xanthophyllomyces dendrorhous
ccgaggtcccggtcatcgtgtaagccgcgttgtccgtgatcaacagattgtccatcctcgatcggaatccaccgagagcaactccgacgttccgggcgacactcctcaacaacaacggatcaaactttgcagaatctaactcgtttgttatcacccgagctattgctaggccctcattcgcaccaggtggcgatcgaatgccaccggcgaacgcgttggacaccacttcgttcacccggcccgtcgaccgcgttagatattggttttcaaacgtcgagagcgatcggagtaataacaccgtttctgggctaaaagtatatatgtgttagacgaagtttcttctttttctcaacgcagaggacaagatatggcaaggaagaaaacccttacctttgttggttttgggtatagaccgtatcggtgaggacagaaatttttgcgaaaaactgatggaacaatcgaagtagtcggggataacctgcgctcaacgtttgctggatgaatccagaacctatccggtttcaatgagaagttaaagcccagtggtcaactttcatcgcgcaatcttttcgacgacaattctttcagtgaggatatcatacttcgagctgcttctttactttgagtttccagcgtacgggctaatgtcgtccagaatgtataactcggtttgttgtccaacacctacgatagatcaagaactgtttttttagaacttttcccacaacatatccactatacaaatcgaattcttatgaagacttcagaactaaccttcatagcttcatcgaggaaagcaactccagaggccggatcctttttgaccttcaacaccttttctaagatatatacctgactcaaagaagacaggtaagaacagagacagaccgaaagatcaacatccggtcgctcaggtttacaaactttacaatccagaggtatatgaaacagaattcaccttgatacaacactcaaccatgtcctcaatcaaattactcattcgggcccacagagcattcgcccaaagctgggcattttgcggggtcggctcatttttcccactcgcatttccagaagaccgatatttgtatccagacgtgtcagacggggcgacttctggtttaaagagagggaacaaaatgaagagtaagaaaccttgtcggcgaggatgtcgcgccaagaatcggatgctcgcctttgagaccggcttccttggccaattgagaaggatcaaacgtctttttaatccgagactcgacagcttcagtcaggtccccaagcaaagaagacacaagtgatggcaaaagcccaagattgaatgctgtttgaagagccgatgccaagatcggttggttctatcatgatcaattggagtcgatcgaaatgagaatgatgtctactgatgagcatagagctcaccgcccatgatcgcaagttagatataatcatcaggagtacgaactaattttgaaagtcctttaaacacttgattctccatctcactgacgagtgtttccttggaaatttgaagaacaggaaggtatctggtgacctggttgatggcagtaagtggaatcggtcgctcttccgttgaagcggtttcctgttcttccgccgaaggcttcaaaggatatgccagcagggattctgtacgttcccccaaccatcaaatgttctatcagcttcctgccagcttgcagtcaagcaacacagttgtcgaatatggactgacccatctctgctatactgattgcagccttgttcatcgctcgttctttccttccttctccctcagccttttcctcctcgtcagccgtgctgatcatctctccgatctgtagttccaaccgtcgggccacaaggataaacctatgtgtccgtcggaggacgtcttgagccttctgaagatgtgataaccgagtaacagacgtctggagcgtttgatgaggaactcgaatcttgagccgtagtcgctcgagtgaaagcgatacttgagtcagaccgtgtcgaacttgggtgagtgaagtcgaaaggtgggtcgttgtagatgagagcgagaggagggaggtatgatgcgtcgtgatctataaccagaagagagagatcagccacctaaacccagtaaggaaggtcagaagaacgagtctgacgcctcgaaagaaaaatactaacctctgctttcagctgcctcgtcacttcatcaattccaaagttcaacctggccagcgtgagcgagatatcaactttggactctcgttctcgctctagcccagacacgtttgaacctcttctacttgtcggtctgaaatctgagcccactgctggagccaaagccgaagtcgaaggcgtcggatcagaaggatggtaagactctccagcgagaatgctagctgagagttgatgaggagagaaagccggatgaagatagacctggtggtctgatcagaaaataatggatgcccaagatgaagcttgatgtcagccacatttaaattgagtattctaagcgagacaggccgactacgatctcacccaagtatggttcggacgacattgtggtcaatcgtgcaagagctgttgatggacagaacgatatttagagatggaggagcgagtgaagggatagaccgagagccgaacgccacagaaccaacccggaagctgtgcaggctcctattcgtcctgctctctgcatgataagatcatcttggctttgtttctctcatcaattgtctgcttcttcctctcgttcaaaccggccaatgaacatgatacctatataggaattcaacttagacagtggaccagagtgatgtacagcgaggcatatataggaagagaaactggacaattcagcgaatgggtatctagcgttttaactgtgttctcatagccagatgagcatgtcacttgttctacgagcgcatagggtatatataatgtcttcggtttctggtacaaggagataatgaaatgaagagtttcactttgaaagtaaaaagatagagggctgtgcgctcaaggcaatgatgatgtatattgcttcatgagtctttctagtctgttaaacacgacgcgtgtgacataagatggaagaactatcagtcgataacaccaaaaccttgataagaatgaaagagaaaaaacctgtttttctcgtatgtgacatgatctagttctcgtctcaatgaactaagccaaggaatgcaagaaagaggaaacatgcaggcattcgatattaacttttctagtcaaaaagaccaacgtaagaagtaaaatggcttacgcgttttctaaccgaagcgcgtttcgatcggctttagcaatttgaagatctcgtttcatcgccacgttggattctgcgcctggcaaattcatgtcagaatactagatagtgcacagttcggaggaaatccaggtatcagatttaataagacaatataggcggttcaagatgcgattatgtataattggacgcaccatttgttcgagctcctcgttaaaagcctgcataaatacgtcccacaaggtgcaaattagacaaacataaccagccatcgaaaagaacaaaaaacctcggtctttaacttacgtcatacaatgttgcgttctcactcttgatatcaacaagctcaaggccctgcctttcgattaaactgatagcttcctgatgtgtgactcgtagctcctccagctctcgcaaaagcttgagagtgttcgacgagaccggcgtctcagtgttctagtgaggcatcaatgttaagagttagtaagtgtttgttgatactaaaacaatgtcaaagacatcagaataacgagtcacgaactttgatagaaccaacacgcgatgaactcggtgttgattgatttatagctcttgaagacccgccatcaccggtctccaaaggtctcaatgctgatctcggactgtcttctccaaaatgtctcggtttcttgtctaaagaaggggatagactttccattgattttgcgcgatctcgcttgaggacggttgatggcgaaggagaatctgcctcgtcatcttcatgcttaaccgctgttgatttggctgaaggaagcggtcgtctgggtcccattggacgacgggaatctgaagtcgatagcgttcggccgaccgagggggaaagaacttgttgttctgatgtaggggacgccatcagatcaatcctgttagaagctttggaaggcgaaagagattgagtaggaccaaatccattcagaggttcgaatcctgatgaagaaggaatttggggagtcttgttccgaacacatagcggaccagccgtagcgaaagaaggggtcgatggaggtttaggccgtgatgaacttcgtgtcgaaatggaacctcctcgatctgatgatagagagtcttttagacatcacaaggaaaactcccgagccaagttagcaacagcaatggaggcagagtcaaagggataagcgtaccgaaactgagacggttgacttcgacaggttgtttgacctcgacctgttctactttctgttccactgcttctgaagagatcacttcctcaaccatgttctgcccattcttctttgccaactccaatcgttctgtcagctcgacctcggaaccatccagcagttcatcagttggaactggttttcgagcactatatggactggttgatcctccccgggatcctatacctggactcttcgaacgaggactttttgaagtcggacttctcggtgtcggggatttctctctagggtgatagtcgctgtaagtcgtcatggaagacattgtcgatcttgtcgttgatctggtcgctgtactattcatagtagaagatttagaaccgacagatcgagaatgtcggtgcgagactgatcctttggaaccaacagagccagaaccgaacagatttctggagatgacatccaggcccaggattggtcgccgactgacagcgtgagaagacggagtattaggagcggaacgaggatccagtcgaggccgataaatatcgtgttgatggatttttttgatgatattagacattacagttatcgtcggtgtgatctcttcctccgcgtctagcccagatatcttattcgaaaccctagcaagtcctccgacgagaggttgaattctgaagaaaagtgacggggctcgctcatcatccgtaagcagcggggtcgatcttccggattcgtccacctgaatgactactttcgacttggccatatcctgctcccattcatttctcctccaaacgttataaaatccttttgcacactctcctgcactgtttccttcacttgcaccgatgagtctctcttcctcagtgctcgcaaacgccaaacttttcccgcctcgagcacggatgagcgtctgggcggcccaaacattctggatgaaatggtatctgtcagaggctatcgaggctggatcgatcgaataggggagaggaggatgaacgacagtgtaggatcggaagggacggttggaccaacgatcggactgatcgacaggcggatatggtaggtagacagagaaatctatcagattgaggaagcagagaggaaagagttcaatatcgtttttttaggctgaaggtctgtccttcagattaccgaaagctgacgagaaagacgaacctcctccacctgaatcagtgacgacgagatccaacaatcctaccaaacctttcgaactcatcttccccgttgacccgtctgaactatctcccgaccttctgttcgacgacattgacattgctgacgaagagttcgacgagcccgcttgagaaggcgcgacactgcctctccagagtcgggctacgtcgtccaacccggtaagttttcgcccggacgcgcctgcggatggtcgcttggcaatcaagatacgatctgagaacagataaagtgtcgaatgaagggtagcgatgtttccaagaggtgaagccggagaagcgtgggaatttgtgatgaattccggtgggagatcttcgacatctactgaggctagatagtctcgattattgttgatcaactcggcctgtatgagatacggaccatgagataaacaaaccccgtcaattgtaagtaacaaacttggttgcaatgaggatttacaacgtcaaaggaagaactgatacataccgggaatccatccacgctcttcgacaaagccatcatgaccatcatccgcttcgtatgcggatctttctcacatgtggcaacggcagtagcgatatcggtcgcttccaccagtttctgcctctgaggatccgacagagacatgtgtttgatcatcactatgttttttttttttgcaagcataaacgaccaaaatgattattagtcaagatataaattcgacggaacactgtgaacacggttcttgacatacgttgccaaatcatggtgtaacgaggtatgcgctgcacgggctccatcagtaattccctcaagccgacattcgagattccctccgtcttgtattttgaagcctgacggcgcgacatgcatttcaaaacaaaaaaagtagatcagacttgaaagcttaccaagtgaaagcacacgtgaaaacgtatgagtcgaacagacagcgaacgtacagaaacgaaatcggcaaactgttttcgtttgacgatcatgtctgcaaacatagtctgcgcatcttcacatttgtcataatacgtcttgtaacagtcgaacgcgcgaagatccttgaactgatgagacatgcgcgagaccaaagggaaccaccgtcaagaacgacattaaaaaacccgaattgttaggaagcacagtttgagaagaggagaatatatgacgaacatgttttaaggctacatccccgataccccattcgtcttcagtgtcgaccttatactccgtactatgttgcccctgcccgatgacagtctctagatctgccaagaaagcctcattcactttgataataacatcaatgtttccgaacagctgattcgcgttatataccggaatgattgccgtcgagggatctttagaaaacaaccgaagcgggtcggcgtaagtctgtttgagcgcgcgaagtcggcggacatatgtctgttcagtcgacagcagttcggacaagagcggaggaagcttggaaagattcggaagcgaaggagatgtctaggaagcgtagggtgatatatgagaagcatgatcagggagtcaaaaccaatccttatctacataacacgatatggatgttgcttgtatctggagagcacaacttaccgacatgatgtccacgctcccactcctctccattcttcctggaacattcagatgtgacctctctgtttctgatgaacttcgattattcgttggcggagccgacgatgaagaaagtgggacggaaggaacagcaggatagggtatagcatgtagttgatctcccaacgtcgacaagaacaagtttgtctctattggcgacagagcgaccgaggaagaagatgacccgtatgagcatgatcccaggacaaacagtgcctaactggagaccaaagagcagcagtaattggaaaagaaacacaaggacgaaccatcactctctcttccatcctccagaacgatatcacagaagaaagctcttttcaacagccttcccgaacccccactacttcctccagaatgtccgagcattgaactcgttttgaggcctcctggggttcctccttctccaccagctgactgaggtcttcgcccagatgccaagggtttcacaggcgatgacccagtcggatgagtagatacagagccagaaacacggccagatctggagtccgaagcatgtgtctgttcggcaggaaggccaggaagagatttatgatagatcggagaggcgggctgggtagttgccgcggcaaaaggcgaatgctgacggtgttgttgtgattgatgaggctgacgaggatgatctacagtgtcaggatatggagatgaagtatgcatcttgattcaagaagaataccgtctgggtctttcagaacaagaatagcagaaggtcgtttactggatgttgtggatgtgactgagaaaaggtgaacgatggaaaaacaatggaaattccggttagaaaactctccaaattcattaggccgaaattctgatgctttcgactgggatcagtacatgtttcgtcacattcttaaacagatcttcattcatagcatcacagagggtgtaggaaaggaaagagcaaacgagacaagatatatggcagcatgttcaaaaaagaaaaacatatcagcgtcgaagccattaatcccactcgtcgtcactctcttcttcttcatcgctatcacccatgtttccctttctcgtactcaacgccgcagccaacgcgcttgcaagatcaccacctccagcagaattgtcctcaggggcagcgaccgagatcgctcctgcgcctacacctgctcctgctcccaccgccgctgctatggccggtgatgccgaagtaggagcgggaggaggcggtgctctggccggcggaagcggcggtgcacctcctcctcctgcgtcttcccttgcagaccctccgctctttgatttgaggttttgtattcctactccttggatggaagccaacagatttgctcttggctctgtgacttcagggagaccaagactggtcgtgggaaccggtggcgcagacccagacgatggtggcggcggaggaggcggtggaacgggtcctcgagag

SEQ ID NO: 2827 - DNA, 20140 bp, Xanthophyllomyces dendrorhous
gtgccggtgggggtgctcgtttttttggttctggcttgaatggctatattcaccaaacaataatccgatgttaacgacgaatatgatcgacgacttagttgaaacatgacattcactaacaggtggacctccactcttctgaacgaaatctcgaatgaaaccttcattctccatgatttgtttctgactgattccctgactgcctagctgatcaagcaatgcctgccaagatggatcaacacctgacgaggaaaatcctgattcggaggaataacccatatgtgcgacgtgcttgaacgatccttccgactgtagcgcgcgacacgaagaacagtttaaaaaatttggtatcagagtagggagaaactcgtgagatatatagaaaaggacaacatacaggaccagagattaacgacttgtcgatcttgcctcctttcttcttcttgacggatccagtagatgacgcaccgctcggcgcctttgtctttttcttgtctttgtctacacggattggtctgatgagtacgttccgatgtgtagagatcagataaaaaagggagtctatcaaaacacgtacaatactttccacgagcgtgaacttttttgtacatctcacccgcctcaccctcatccgcaaacacgaacgcgacgtttgtgtcctgatatacaacaagaacctcgatcacgtcagctgaaaggctcgagatgtagacaagatgtcgaaagaagagaaagaggagagagaaacaacaagacacatacttcgctaggaaaggtatgaaagaatcctcggtcttggttgtatgaccacgtagatgacgacggcagttcgtgttcccagatcacgcctctcgtacccttgatgggattcccgccgaaacaagagacacgatgtctttagtacataatgcattctcctatgattaacatgaaagaatgaagcaattcggcccgctcaccaagagatcaacgaccttccaccagacacctcctctttgcttgtcgaacactaaacaggctcccccttggacgccagaatagacccaatcgttcccactttgatagaatattctgacgacggtagcagtcaggatcttgtttcccgacgggattgctttcttgatcaacgccttatcctcggctaggagtgaagatgtggatggcattcttgagctctgtcgtttggttcaccgagtgatggcttgaatgagagacacactcgcagctcattgtctcaccgatcacagatggaagacacgaggcgatgacgggacgagagttcgctcgccttacctaagcaaattccttagcggccgttctcccactcctttctctactcatacctgccccggctctctctttcttcaggtggatctgcgccttggatctcttgaagaagaggccatgtgcatcgtttgtgtcctctccattgtttgttttcgattgttctcacggctttgcgagcttcgccgaattattcgtgaagagagatctgaaagaaacgagacgaaacgaaaagatggatataaccttctgatattgatatcatatgtaagaaaaaaagccaaagaaacaaaacaaaatcacatgaacaacaacaggcaaggatggaaagataaatataagaagggaacatcctgaaagaggtgaagacatcaagataaaggagaaagaaggttctcttttgtgaaatgttcttgggttccttcaaagcaaaagatcctcgaacggatccttctttgtcacaccctgagtcccagcgttcgatcctgtcccaggagaagccccgggagagactccaaccccatactgtccgttagccagtccattcgaactccagaaaccactcgatccaccgggcccaatgttcaaactgattcctccacctcctcctcctccgttacccgacgagaattgactgctgcctcctgccggggctgacgacatgccccaacccatctgtgatgtcccttgagcttgagactgagattgagctgtctgttggtatgattgctgtggtggcggcggcggctgctgctgctgctgctgctgttggtaaggatttcgataaggttgggcatatagcgaactcaggtctgcccctgccaaaaattttgagttgacagggcccgaagtcgagcccccaaggttcaaactgggcgctgccggagcggaaaacaagtcgagaggaagtccagagaacgagggtgggggtgaaggtgctgcagttgatgtggctacagatgctggtgatgtcgatgctaatgctgcggatgaagagacaaacgactcggaagggggatcatcggcaaatgcgtcaaacgagattagagagggttccggagcgggtggcgcagtgaatgttctgtgtttcaagttaagcatcaaaagggatcttctgtcactatccgtcgagagaacaataatggaggaatagggaagctgataaacgaacgagaccgcaatatttcttcctttggaccaatcgcccttcctgcacgcctcgtatctttcgataaccccgttgatgagatcgttgattaaaagtagccgatctgttcatcattcggacatgaaaacgagtgggggtttgccggggttagtccgaaatggcgtcttgaatccatcaaagatgatcaaggaaagagagagaaaaaaagtagatggagtattcagtcgactcacccatcgaatccggctcatcctcgctcacttcgccaatccacttttgaatctttggcctagcctgcatacacacgagcgcgacctgctgataagcgtcaccttcgagtccgattcgctcgttctcattggcgctgttgagcatatcgttcaacaggatcgcctttgcctggactttgtcaagctccttggcagtctgcgatcggtagtctggtgctttctccggctcctaatcatttgtttgttttcgtttataaaccgatcaagccaagacatcaggatgagggttcagaagggcatgtttctttgggacaagtgattcagatcaaggaaaacggtcacgtacgaagcctgagagatccttcatcagttcttgcgctgccaacaaatctttcggtttccctcgacgaataagctcttgtaatttctgctcgacatcaaaaagtgttccgaaaagatcacatgagtacgaatcacctatcaactcaagtaaagcaagcatgctctcacagccgatttcatttgacgatcctcctcttcgagctcttgaggtgatttaagattctgttggtacaagtttgatccaacagatcccaaagagagtcttcgttagctaaatcatgaaaacacaatctcttgggtgaacccgacaaacctctgtttcttgagacgtgatgctggtagagtttgctcgagagtctttgaaccgataacctggtgtcaccgacagatatgatagttcatcaagatcagctgattagtcgcgaagaagataacacaaatatccgtgttggcagaatcttacccttatagcttagcaagcgatgcatatctcggatgtggactaggtcctccttccacttggcggtcacacaaatggtattcttccattcatgaatcaactaagccacgtagaacaatcgactcagtgttcttcagcaaagctcaacgatctctatcaagatgatcctgataaggaagaatggaaggagatatataagaatttgaagaacatacctccaacgtcttttgcatggtatacggcggatacactggcggtcgttccggaaactttcgaacaagctcgttgaggaattctttagtacctacttgaagttgaaacgggtatccgcagttcttgaccaaagtgtcgagtaactgtgatgaataaagtgaaaaccatgtgccgagagaaagagataagcaaagtaaccaagacggaacgaattggatacaggaattggatccaatgtcgtgtgcgatggcggttgaagcaaacgaccgacagagcggtccgatcagacttacgtgtagagccaggacagagacgtgagggttccgatgattcaccatccgaaccacttccaccgccgcctctctcggtctgtttgtcaaggaagacccaaacaaaagaagaaaaacagatgacagggacgtaaggtcatcagttcgaatggcgatcgatgtccatacgagtaaaggcttgtctgtatacgctagaaaatcccggaccaaaaatagacgaaggttgtggatggttcgacgaatgaacttacgtgttggccttcttctcatcaatgtaatcggccagctccaagttgagagtataggctggctcttgaagcgatggttcacatgcacgctctgggtaccatatgtaagtgttagatagaaagtatggacaaattcgggccaaataacgaaagtaatattgagcaagaccgacgtgaaagatgagatggagaagttgcactgggaaggcgagtacgggaaaggagactgggcatgaaggaaacgtgggcacacatacctacaagagactgtacaggagatacggatccccaagtcgatgggcctcgaggggcatacatggcaaagaagatgagttgagagagtgagcgaagtggatggttgataggttgatggagccaacgagagaacttgttgaggatgaacatatcgcgagcaggcttatgtcagcatgataaacagtcatttctgccgccagtgttcgtcctcccttcggtctgctcatctcgtttggaatgtagacgttgatgagaatggcatcgaactggaggaaggctgaatatatatacatgtgtatggaggagagtgtgttatatgattacaagaatgatatctaaagatagtacaagtgaaggcagcggcaacgaagttgaccacgtcgtttcgaggagaagatggaacaaagaaacggcaacgaagaatggagttcccatcaatcatccctccaagagacctcgccacggccccatcgttcggaccagatggcgcgtttgtggtaaacctttctggcgcctttgaattctctggtaaagtcctccaatgctctggcctgaagattgagtggatgcgaaaacgagtcagcatgtatcttatacgtcaaacacgaagacggatggacagaatgacgtagacttactcctctatcattggagccagcggttcccgagacgtcgagagatggagtgtctgctctagagccttcgatgaacgcattggcgagtgcttccgaagtgtcgtcttgatctactagcgcgtgtcggaggcgaagattgagaaaggaagccgagaagcgctggacagatagaattttatgtgtgtttacgtcgttgatgtttcagaagacagctatctcgtcagccttctctgtacgaaattaaacatgctttcaagggagcaaaagggacgaacttggtataacgacgcctgctctttttcaatctccttccaacgagcctttagttgctcggcttccgtgaaggctgctagtgtttccgatcggagttggactaagccgggctgtaaactctgatttttctctagagtacagaccacaaaacagccgaaagatgagcatcggttccgacagggtccgatcagatgaacgagctgaagcaagggaacctaccggctaacgtctcgttgtcctttgcgaccttggatatgctctcgatcttgtctgctacctgagggagtgtgttgacgaaggcttctctgtaggcttcatctgtaagaagctcgtgcagatcgtcgttcctgttataaggttgaccgatgagagaggatgatgagcgtgaagcgttgatgccgtacacaatccgggcgataacgaacttacgagagagcttttgtctgtggaaacgcctgatacagagaagatacaaacgttgttgtcgttgtcatcgttgagataggtgtatgcgtatgtctgatgggtctgtcaagccggttcgttctcgatgatggtgatggtgatgatgatgcgatgtgttggctgtcgtacagaactcattacaaacacggactaggcgggcattaggaaggcatccggaaaacactacgaaaagcggatttacagaaaactacaaaagacgactagaggaaactacagccatgactaggaaaagacagcaaaacgggcattacaaaaaagactacgatattctcacaaactcaatacaaaaaattcgatttttttctattcgccaggaattttccattttctctccttttttccccgccaaccttctttctctcttcattccatcttaagtactgtcggtcaacccgttcgatcgtcttctatcggccagagaatcaagctcaaagctactgatcgatagtcctaggatagcttcagctctgttctctctcgcttcccttttcttttcttctctttccatacctgtcatacacaatgttcgcctcgacccgggctacccagcatctgcacctccgtccggcggcagcccggttcttctcgtcaaccttggcaactcctcagtcatcgggtcccaagtcgtcccagcaagccagtaagcaatcttttctttcaaagtagaagctggagcgaatcatggatgattccatgcttcaccttgctcatcgttctgtctaacggatgtctttactctgtcttactttttttttcccctcgttccctgatttgccgggtttctctccttctctctctccatttcatcttcttcgaaaccgtctcacgtcacgagctagatcccgagaatgctgccagcatggaattcgtccctcagggaacgccaccagtatctagagcgagcagaggaagcagaggccgtggagacggaggaggatccgtcaaactccgtaagtgatacatcataggcctaccaacgttcagacacttgaactgtcattgaccatcagcgtccactcctttgtcctaaacttgtttctcccttagttcgtgtgtactggaacaaacaccgatcgccagatcgaattcgttcaagccaagctgctcacggtcaatttgacgacgcccctgctcagtttaaaaacaagccgtctggcaaccgagcaaatcgacctagtgaatctcgacgatctgatgattcggtcaccatccaactcgacagtcctacccgccgccgaatggaagaacgaacgccacaaggccagatcatcaagcattaccaagataaagctcagggaaaattcgctaggttcggccctggaagaggtggcgctcccaactcgagtggtgaacgaagaccctatgtcccccgggagaacggtccgagctctcgatatggtggcgctggtggtgctagagatagaaagccgtccaacaagtcggcagctccaaggaaacaacagtacactggtgatccttaccgaaccatcagagagcttccaacgatggcaccttcaacattacccggtctccacttgctttaccaatcggataatatccttgccggcgaggaagacgcaccgacgactgctcctccgaaaatcacaaagggccctaaagccaatgtgttccctcctcaaacagctttccagcagaagatccacaacgtcgtcaacgaccaagctccttacgccggcatcaagatgctccgaaagaagaaccctttgccattccttcccgacacgctgtctggaaatcagccaaggttgatcaaacaacgcgccaaagagtacgacatgatggtctctcccgagtttgccgacgtcgaggggatcaatgaaaagattgataacgaacgggttggtggtgattattcgcgatactacgatcgagaaaggctcgatcaagatgtcaagactctcaacaatggtgacaagtccgcgaaggagaacggaaagattctggccgagtacggagtgagctggaatggagatctcggaatgagagagagagagatgatcaagagcttggtcgatgaattcatgggcatgaaattgacaaagcccaaggagacagccaagtagtggctgtttgatttggagcaatttaaatacaatgactattgttctgctatgttttgtttcctcttgccttaattgaggactgtctcgtatgtgtgtgagaggagcagacttctcgaatgaccaaaggatggggttgggtcgttcgtatcgaagatgattgtaccaaaaaaaaataaaaaaatctaggattgaatgaagaaaggaaaatgaaataccgttcccctaacacagacactttcaaggtcaacgaccatccaccatcaatcacttcgcatgccattatctcttctcatttagcacacatacacacagacgcacacatacatagcaaacatagcaggctcctatgtcgactcccatattcaaaaagctcaaaaagacttcgctccgacccacgtcgtcatcgtcaatccgggatacaatttctacccccgaaaacgacgtgtcacctctttcacgatcgacagagtccatcgcgaacgcgtctgtctcgtcggataggccgaacggaaaggatggtcaagaagaggatgacggagattttagtccgtcagcagcaatagcagcagcaaaagccaggacgaagaaggaaaagaagaagagaccggtcgaacggttaagctttggaggagaggaggatgtatgtcttttcttttctagactctcatccgttaggactcaactgggatcgactctgatgggtcctctaactgtttcttgttcttttcttcgtttccataaatggttctacctaggaatcatcatcaacaaccttcgttcccaagaaatcggctctctcccgcgctctccaactccctcgtccacctatatcctccgacttgactctatcccagcaaacccctgcctcagcgatcccttcatcatattcatcaagctatctatccgagttgaaagcgtcgacccctactagacctggtccgcttccaccgtctgcaggagatcgagatggtggcgaatatgacgcgatcacccgcgcaaaatataatatcaccgcagacgaaggtggtgtgcctataattccgacgcaatccgctatcgacgctgcgaagaacagacggtcaaagttgcgatcaaccggtggggacaaccaagatcaagacggtttcatctccatcagagaagggggcagaaagggagcattggtcatcagagatgaggaggttgaccttggaagaacagggttgatgagagaggatgatgagttgggagacggagcggacggtacgtgaatctttcagtttccatgaccttttttctttgctttttctttgtcaatcgaatcgctcagaagagggttatccatagatgttgacaagctttcactctcaatctttgacagaatttgccgagtttacagaagcaaacgttcggatccccttgggcaaagctgccaacaaaaaggcagctcgattgttgaaaggagagaaacaacaacttatcgaagaaaggtcagttcaacctcgcggacgtatttaattacctgttttcctacctgaattcgtatctgattctcttaccaccatctggctcgactgggataatcgtatcaagagaggaagaggacgaggaagagagtgacggggagggaatggaatgggaggatgcacagatccggcgggcaaacttgtgggcagagtctgaggatcaacaggatgcgtccaagacgccctaccgagcagctcacagtatgatagtttcatttcctttctttcgtattgtaagattacagatcataccaagctcatccttccgttttttccttggttctcttacgttcgctcgttgatcaagttcccacacctgtgcccctgccttctctatcaaacgcctcagccaggctgtcagaagctctttctacattgacaatgtcccacgcggaacacactgcccgtttggaaagcgcggctgcagagttgacagctttggatcaccaggagaacgatcttcggagagaggtagaacgagtggaggaaaagagagagtgggcagaggagttcaaaggatgggtggaggaggtcgggaaattcttagaagtcaaggttcgtcaagcgctgagctccttttttttttcttcgctcgctttgacaacggctgacatattgatctattcaatttttgactcattcgcttaaaaagtatcctgagatggaaaagatcgagaaggaaaacatagaacttttaacggaacgttaccggatgatctcacttcggcgacttgaggacgattccgatgatctgtgcctctgtcttggaacccctctcgagaatctttcttctctcggtcccaagctgtcagcatcaatctcctcgtcaacaccaaacacactggacttgatttccccaccgatgtctgatatccgaactcaacgccgggagacccgtcaagctcgactcgcgagctcgacgtccgcgccgtcatcactcgagacaaccccgttcgtatcttcatccgatcaaggatatttgaccgactcgaccctccctccatccgaagaatctgactatgcactcgctcgggccggtctagatgagaggagacggcaggtgttgggtgatgtaagtgctgtggacctgagagatccagagctcggattagtgcgcagatttaaaatctggcgagaaagagacggaggagaggagtatctgaaagcttggggtggagaagcgttagtgaccgcctgggagttttgggccaggttggatttatccggttgggatcctttgactgtatgttcaatatctgtcattcgagatgtccgagaattttcgactgaaaatcttttttttttcctcaacaactgtatgtgatcagtcctcagaaacactcgatcacttcccattttatacctctcttcatcactattctcgcccgcctataccccatgatgaagacgatgacgaccttatggaggatgagaaacctccgttgggtcccgaaggggatctcgtggcttccatcttgaaaaacactgtcttacctaggctgaccaaagtgttcgagtctggaggcgcgttcgatccgtattcgggcgtgcagactagacgggcggttgatttggttgagttgttggaggagggtgttggaaaagatagcgctaggttccaggtgggtggcttatcgtcgtctctaccatcacaacataccatttatctgactcggaaacatgaccccttttttttgtgttgtcaacagaccttcgtcaaagctcttctcacgtcgttcaatagcttattggaaaccttgtcttcccttacaatggcttgtagacaaggctcgccccctccagcattcaacccgttatctttctcctcacgaacgcgtttcctgtcgcgcgtattgaaagtgatcaagaacgcgctcgcctttcactcatacgaaccgagccaagtcggtaggcttgtagaaggattagtcgaggttggcaggatggtagctgagttgggatgggaggaggaaggcggaggtagagaatggggagcgaaagtaaggagtttggtgccgggtggtttgttgaacatagatttggagaggagactggcaagtggaccgcctcagggatggtagattttcttttcctgagaataagggaagactttgatgaagcatggttctctttctctctctatctcgtctacctttctagcgttgtatcgatggggtgtgtacgtgtttgcttgcgtgcataacggtggtgtttgatgaaagtcggagagaaaaagaatcaaccctttccatccatcctccagcatacacaatgtcggacaaaccgtatctacccttcgacatctggcaacatgtcctcccacatctggctgattcaccatcgacacttgtttcactatctctcgtgtgtacttttttagctgagctgacgaccaggtcgttgtacacacatgtccatctggccaagtcatcgatagcgtaccagtcgttcttcagaacgttcacttccccgttgtatgaccagccgaaagagcgagaatctcctctcaagttcacaaaaaccctgacgttgggcgcatatggagaagaaagcatctcaaagtcggcatcaacatcaatgttgacatccttgactacgacaacaagaagttcagcgaagatcgaagagctcaatcttccgccattgccaagatcgttgtttcctcagttggagacccttgagattggatgcacccattcggatcagatcgcatccattctacccatcctgatcacattgaatccagttcatgttcggttgtgtgcttccgcccctgaacctccgttctcatcaggaggcgaacaggtgatgatgaaaccacaatcaataaagttctcattcataccacatttcacgtgggtgatgtacaaccgtctagaatctgtctttatttcaaagtgtgatgtccatcccccgtcgtcgtcagactaccctccatactacgagtttccatttccttcgacatgcacaactctccgatcagtcgaatgggattttaggggtgcgataggaaatcctccgttgttcagagggttctttagaaatcagatcggtttatgggattggaagacaccgttgcgagttagcgtctgggttgatgaagagagtgaaggggaggggatgctcaaaagcagtctagcatctgttcttggagatctggtctatgaaggaggcgaagaatgtgagaaagagtgggtcgattcgaaagtaaggattgggctcttcatcaacggagccaagtatgttggatttcatgaagagtcatcctagacggagagggagaggtatgtgagagagcgatgatctagatgcatgtacaacatcttctatcagacaaagctgtagttctcttgccatcctccatgtcggctctaagctggacacatggaaggacgaagaaagcaaagaaatcgcgatccgatgatgatggtgatgatgacaacacatcaaataagatggagaagaacatcgatttgtttcatctcgaccatcaacagccagatggatcatccatcgtctctcaccattcctcccatcaccaagcgttaagttgatcccgatggctcgggaaccatctcaaacagatcccatgcgggcttacagagccgagatgaactctcgtcgaaagctcgtcctcgatagttatctaatcctcggtttcatctcctccggaacatacggccgggtatacaaagctcgactcaagccggctttcaactcgttcgacccaacatgcccaaccagacctggagatagaataggcaaagaaggggagctctatgctatcaagaaattcaaaccagacaaggaaggagaggttgtgacgtatactggaatcagtcagagtgccatcagagaaatcgcggtatggtctttgttgccttgcgagtgaaagaggatgtcatagcactcaccatgcttcttccttgttctcttcagatcaatcgagaagtagaccatgagaacgtcgtggcacttcgagaagtcatcctccaagataaaagtatcttcatggtctttggctatgctgaacatgactttcttgtaagacttctctccctcttctccttgatgctttcccgaagctcacttgtttcacccatcaatctggaacaacatctgataccatcttatggtctgaagcaaatcatccatcaccactctcaaacgctgcgtttgccagttcctcctcctacactcaagtctcttctacatcaactccttctcggcacgctttacctacatacccatcatatcctccatcgagacctcaaaccggctaacatcctggttaccaaccagggtgtagtcaagattggtgatctcggtttagccagggtcagcagagacccactccagccactctggcaaggtgacaaggtcgtagttacgatttggtacagaagtccagaacttcttttgggcggacgacattatactggcgctatcggttagttttattatcatataactttctttcttatttcttcaacaaagccaaaacattagaagaaagctctgatcgtcggcagggggattcttgttggattctatccactagatatgtgggcagtgggatgcatctatgcagagcttttgtcgttgcgcccgatctttaaaggtgaggaagcaaaaatcgacagcaaaaaacaactgccatttcagaaggatcagatgagtaagatcctagaggtcttagggagcatcgacagtaagttttgctgaggcgtcccggttcttctgtgtgatttctctcttcgtggaaagattagctaacggtgtgttggtatcttgatagaggagaaatggccaaatttacatcactatccagaaacaccacatctagctcgaatggaacggtccgtttctcgtttttcaatgtctctgcctgattattctacctattctcacttgccgttacgctcatcaacagatatcaccctggactagcgcattggtacaagaccaaatctggcccatccttttcacccaaaggatttgacctcctctcttcgatgtttgagttcgacccagaacgaagaataactgctagggaagcactcaaacattcttggttcttagacgacggaggcgttagctcgaagtacgtctttccacctgtttcgtctcgtctgttcgttttccatcgacattaattcccattccatcgtctcgcttatacggaaaacacagcgcgtttgcttcgtctaacttggtctatccagatcgtagagtgacacacgacaacgaattatcctctcagccccttcctccttcacaagcccagggtcaaacatcgaacacaacaacagcaaacaaccaaaaccgatctatccatcttgcaggtgacccgtcgagaatacataattcatcaatccctccacctgcaccgcctagtgtgatcccgatgcctgtgtacccagcaagctctagaccaggtagtgggatgagaccaggggtgggaagcgtagggcctggtggaatcggaagtgcggctggaccgggaagcgcagggaacagtgctggcagaatggttggtaaagcggtagatggcagtcggaaaaaaagtcggatcatataattcttctttccaatgatccgaccagtgtcgcacgtttcgtagatttagtttctcgcagataatgtatattcaattcgagaaataaaaacatcaacttcctttcaaaagatcttcaagcagatatcaatagatataatggagagcagaaacccaacatatatctcatcaatagattcattcgttcctcgacagacaacttcgcagtccagcaagatacgtttcagatatagctgaaaagtaataggaatgttgagcgttatgaggagagacaagattatgagcaatttcgtgcgcgagtgtaaagtacctatggtatatgaacatcgatttgcatttttcagtcaagtcacagtcaaagcctcaaaaagacgagttgatacggaccaagatgtcagggcctcatcgagctttccgtttcgaacgagatcagcgtgccaggcgagatagtatcgcaagttcataaacacttatcgtttacaagaccataacaaagatcgaatcagaccaataagaaaactttaagcatcgtcatgctcattccatattgaatcaggagaagattgatagcttacaagaaccgcttcgattaaaggcaataagaggtccagatacgtcatggaaaatgtgctgagaagaaccatcaatcgaccccattgacgacaaacgttagctcggtaagagaacacatcgagattgaaaaaagtataagaagactcaccaaagacaaggagctcattttgaaaacgtctgaaagtggtaaaaggactcttccagcgaacaattcgatatcaacctggtgtctcgcaagaagaccctttggattctcctcgctcttgtcggcatagaactgaagcttagacttgtcatcgtttccgacaaagacaaggtttgtgttcacgccggtcgtatcacagaaatctttggtctcttgaacagggacagtctgctgtttagaaataagagtggatgatcggtttcctcgggaggcgttgacagccttctcgacattggacctacagagccgagtgtcaaagagatgtaggatatgaattgcagaatcagcaacaaatcaaacaccatgaatgcaaaaatgacaaaccggatatcttttgtcggtgtcacgatacttgtccgaggttctgtttgaccgatttgcctatgaacggcgggtattggagtcgatacagtttctttgaccgagggcttcttcagtccgcttttgaaagaactgaagaagcctttggggccagaagtcgaaggagatcgggtgagaccagaagaagaagatggagatttcgataacgaagactcgctagatggggattgaactttagaatgggaatttgtagctcgtttagggtaagatttttccaaaagctcgtttgtggcattgacaagatggttctcggtctgagcgcgtagcctacgctgaatttctaagggatcacagtcagggaataacttcaaagtaaaacgatgtcgcgtgagatacaaaccacctttaactagaatcataatggattgatgatagatacctcttctaattctacacccattgctttgaacttttgctcctcttgaagacgtaatttctcagccgactcttgagctaatctctcaatcttcttttgtttgagaacccgatccgtcgcaaaccctcttctgcgctgtacatcctcaaatcgatataatcagccacatcaaaaaacaacattgatgaaatacgtcgatgcatgaaaacggcctatacgtaccaaagccgataaaggtgttgaaaggattgtcgagagtagcaaggcgtccgtggagcgagactgaacaggaaggtgcttgatgagagccgacgcaacctcgtatagctcaagatctatacttgaggacacagccaaccgaatcttaccccctctatcctcggaagcagcagcagacacaggctcgatactagtcttgacaattgtgcctatacgcaaagttcgtttcaactctaatttgtgtacttcataaacctctatggaatttcgaagtgtctccgtcgtgatcggatgctgtttctcatgaaggtagatgggaagccgttcgagaataagatggttcgtttgataggcgagtttggattgagagttgacagctccagtagcactgtagtcctctacaaataaacggaatggaatcagtatgatgacaacgaaagcttataccagccatatgcgatatgcctgatgttgagcttaccttttacctgtctgcttagcttcatagagccaagtttcaaatagaatctaacatcaccaacttagtgatcttctgatccaatcccttcatatgcagagatacacttactcttcgagagcgggctcttcaggagctgccaatatagattcttggaaaatcaagtggatcactggatcatcgaggatcataatctctcgggggtacgctaacgtccaaatgttttctgaagaaacaagatagccaatcggggcaacaagttagtagatcagactatactcggacgcatgcgcaggttgagggtcgaaacagcataccgtattcctcgtcatcttcagcctttgaagcaagtttgacacgcttgaaaccgagaagtacttgattttctcccatcgatcgcaaaacactattggggagattagatatacttaaattcctcaaaacgtcgaggtacctatgaatagattcaaacaaatcgatgagagctgtgtttgtatgcagaacgtttcctggacttacaattcaggagtgccagccaggtctaatacaacgcgggggctgaaaatggacgatacagccgtcgttaacataacgagaagaaggctaagcagttagattgtcttactctttgataaccatcttggcgacttctgtaggacttggttcagcttgtaccccgatagctcgtagaaatgtgtttcctttagcgccaaagtcaacgtagacaaatctaaagaaaataccaggttgaaggtcagtgatatgaacgagtagtagcgatgccatgccttacgcacagagctttgtacattgatgagctgctcgcgtcatgattgacgaagtagacttcactgttttcataaatgagagaacgacaatgagacggagagatccgagactaccaaatagactgacaaaggagattcatactttgaacgatgaagcttaatgcttccggtcttatgagcagggatgaacggcaccgtgttgagcctctttaacgacacatgatcaaacgtggacagtcttgaggccagatactgcaaataacacaatagttgtctaataagcttcacacatggtcaaattaatcactcagatacacatacttcaaatatctcttgagcatgagtaacattctgaggagctttgctgatgagtgcatcaaccagcgcagaggctatggtttgtcgttgaagtcagaaacagatggattggagaagagagcggtagtagggaaatatagagtcgtatcagtaaatcgatgcaccatagtatatcgtggtgcaagacacgaacctttaggatccatgtcaactaagagcggaaggactggtacctctcggatggagcttgctacaactgaaaagcctagaagtttggcatccagatttcggtagacgtccaagggagagcctagaaatgcagatccatcctgcttgatacaaggaatgaatgcgagtttccggttttcagatgcgggatctagcaaatcgaagttgagaaaaatgtaaacagtcaaatatttcattataatgtgtcagatatatgcttgaaatacagagacttcgagaaaagaactcacaagtttgcgcatagtacttcgtaaagttctcaaatagaaactcaagagctacagttcgaacggaattaacagaaccagcggctagaggcaaaagagtgtcgatggatgggtacctcatcaatccaagagagaataaaaatttggctagtttgtgatcacaaaaatcgacactgtgagctctaattccagattgcttctagcagaagtgtggaagacgctcaccctcatctgaattcgatctccacttagctttccaatctaagataggaaggccgagcttccgaagcgaatctgatggttcgtatatctgtctaggtaagaatctcgaggtagaaccttcgacgggaaatgcagccgtatttttcaaccggttgatctcagctgggcggagattttcttggacagagaccaggtatttcgtcactgttggagattctcttgaaatgatatcagtgcatctcctagagatagcttgatcaagtttggtcactgacagtccatcacactccatccacctgcgcctagaagcctgctgaagaccaactgaagttcaacatgttttcgaacccccaaagccatcaatagcttttccatgtttccctttaacgaagatcctttcgggaaagcaataattcttttaagccggttccgaaacccatttagtttctgcgtttcgttgtggcgaaggagtatacaggaaaggcttacgggagatccgggaagaggctgacatttggaaagtaagcctctccaggagaaacctgttcttccaacgaaagatgtaaagatacatcatggagtgatcatcaactttgtatgtgaagtagaatagtgaagtcgactgtgcagtgggaaacaggaacttaccatcccagatttagaaggtatgatcttctttcctgacaatagtccaaatatttttgcctgagtctgcgcgtttgcacttgtccaagctctggcgacaattcccagaaccctctccgcgaaagtagctgagacttccatatccaactctggatcatcttttgcccgttctaaaaggttttctaaccagaccgggagagaaatctcctgtaagccaagagcgaagggaatacgctgtatatcaagttgttttgaaatagctgggggaagcatatccaatgggaaggggagatcggatggaatgaccgagcgaggttgatgaaacgtccgcatggaagataattgagctatctctggctctcctgtcttcttcgattcaacgttttgatggggccgaatggtgaatat

SEQ ID NO: 2828 - DNA, 8795 bp, Xanthophyllomyces dendrorhous
aatggtgaatatagcgtaatcgagaattttggacctgagcgacttgtcatattccggggcttgactaagttcgatccaccatttgaggcaatccaccatttcttcttctgtcaacaatctactctttaactcgcctgcgatatcgtctaacgacatatctttaagcattcctctcgttttcaaacgagtcaccattgatgaagcaccgtccaggactggtgacggtacaacaggaaccttgcggatgaaatttgtagtggcagcatgaggcatcctgacctcaagcattgcatcagcaacgccttgcgtagatattatgtggaaaggtctcgacctgccagagcatgcaaagaacgcggcctccatatgacgagacacgacgcccgatggtgtcgaggagaggaaagtgaaaaaacgtaatgcatgaagtgctcgggaggtgaggacttcttggaattgaggggatggagagtcagtcagagatgggcccttccataacgagcggatctcggaaagctctgtttcgtagactgcacggcacagaaatcctatcattgcccaaaatgatacatcagctatgtaatcgatcctcgagatgaatcaggatccttaacacatatatgaacagtacctgcaacgtataacagctgtacgagccgatcaagagacaaaaacgccataagttcgtttcaaatattataatatattgcgcattgagatagatgttgactaaagacatacctccttgttccattggctgacatatcgatctaccaagtcgatgctttctctttctacagtgggtatgaatctaccagctgatgatgtctccatggtgagtgttatcagcagtgaaggcttcatatgtatgaacatatatttgacctacatatatgacccccaattcctgtcgtctgtcctgtggcgtgtccaatgaaaatctttgcgagtccttgtctggtgttatcaagaaatgcaagttgttaaacagtaacttccaagtttgataagtgaaacgagcaagaatggtcgatgagaacaaacatacccttctaaatccgctcggagccctctgaagatgctgttttcccccgtaccttctttctcgttctccccctctttctcggccgcatcccattcgtctttactcgtccataccaacacaactttagtcctgcttggtggctgcttcttcattgcgcgttccatctcttttccgaaagcctgtgagattccgactttggcgtcagcagcgatgaggttgagttctaatccagtttctatcaactcgaatggatccttaggttttgcaatagagggcggaggtagagcaacgggtacgggagaagatcgaccgaacaaggccgacgatagcatcgacgtaaatgaagtcgtaggagctgctgaaggtggtttgagaagtttcggaagagaccttagagggggagtcgcactattgtatatcgctcgaggaaccttcgcagtgatcttgatggctgcaaataagagtagtgaggttaagaaacgcttgaatgccctttggagtgaacaagaaggagggtggatcataacgaacaagtgctagctaactcgtcaacagtcatcattcctccttcactctttctccccaacccgacagggacctccatcaactttgaggctctcacatccttctcgatcaacgctgctctcatatcgtcgaagaaaagctcggctcgcttgatttggaccataaatgtgatgcttgttgccaagaatctggctagatccaggagtgagttttccatcggtgcgggtgtacgaaggtcaagcgtaaatgttgtccacggctgattgaaataagaaacagaaggatttgaagaaggaggaagggaacctgctctcgcaaacagctgtattttaaggacgaacagaaaccagtgcgttgaacataacaaagatccaatttggagagtcaagaagtcacatacctgatcgccgccacctttccaatgaaagcccatccatgttccattactctcgacgtgaggctcctcagtgatcgaaaacaacgcatagaatccaacaccatatgccccgatcttgatcgagtcgttatttccgtcggcaatctttttgagtcgactccagtcttctggccggaaaggtatctaggatatcgattcgatgataggggaatgtttagtaagctttcaaatcctgaggaacaagtaagtttgtagactgaacataccccatcatttcggaactctattctcacaacctaagaatcactccaatacttgtcaatattgaatcattgtcctcgcggtcaagaaggattgtaccaacaggatcatccttgaagttcggaggagtcccgtctgtatcttgctccttgtcatcaaccacctgatttgactctgttggatcttgcttaagccgagctctctcacggtcaagccccttttgagtgaaaaacttgatttgaaccgaagaagcctctgcatcgtctgcattctgcagcagctctcttcattaagagcaacaatatataagggccaacacgatcccaaatcagttctgactgaaatctagagaatgataggagggtagcgaactatggaaatagatttgtagaaaggaactcgcctgaagatcgtgtgttctccactgtaacgagcaagcaccttatcgatcaacgctctctggttcacactaacagcttcatcttgacccgagtcccacaaattctttctatccatttctgaagctgtaatggttgatgtgatggcggaagatgtttggaatgattatgatgttcaagcgtccaagcggtggaaggtagtaaccggtctgctcggtcttagccgcgctcatttgacgatgaaccgatatacaacatacatacacacaaaataagcacagaataacattgagaccaaagattttatcgtggcgtctagcattacattgtgaagtaaggtgaagtatgacaacgaaataagtcaaaacaaacaggcagaaacttgaaatacaacatgattggatatggtatgttatggcaatgacctcagaggaagaataacaaaaaaaaatgaagcgagaccaaaaactaacagagaatatggagatgaattccgatagatacacgcaaagacagtcaaccgcccatctcgatttctgtcttttcgtctggccgctcactaagacttccaaccctgcttcgtttccctatcaccccatcctctccctcatcctccgcacccatgcttttggactcgtctccttctgaatcctcgatctctgttctctttcttcctacactcgagccgtccagccacccatcaggccctgaaactcctctggacgtcgctctcgctctcacaggcgttgaagcgccagattttaaaggtgaacgatagccacttcttgtgtccgtcccttctggtaataagtcttccggactagagcgcgagaacggactaagctctaaagaaaggtcttgagggtgaggctcgagaagggcttgacctcgattcgcttgttggcgttgtggacccaagatccgaagtctttcgatccaactatacaggtgatttgaacgaaaattcagtctcttataagcaagtgaagacaaagatggcaaatagacgaacgcttcggccctttctaaactttcaccaaatacctgagcaagacctgtgatcatatccagactttccactgctaatgtcataaccctgccagccgcaccccttgccatcccaacttgtactcccggcacccctgcttctagctcaccagactgaccactctctctgttaagtcgctcgttcgccctttcccaacgttccggtaagccaaggatgaatcttcgaacggtccgtcgggcaggttctggtaaggctccaccagcgtattttgatacgacatcaacgaccttgcggatggtgtttaccacgtcagctttaatcttggaaagagactccaaggccgaaggagagatcaaagcttgagatgaagccgaggagtcatttaaggatgcgatgaagtttcgaaggatgctaatctggttggttatatgcgatgtcgcgtactgtttgtttcgaattgcgcaagtcggagtgatcagaaaatgagcctatggaaaaatagaggagaaagaaaaaggaataggtgaagatgataaaaaaagcctacttgtagccactgcagacaatacgtcaaactcttcatgctctcttcgcttaccgccgctcctattcctccagcagtcatacctgcctcgacaagcatcgaagaccatcgcccagtgtttcctccagtcgttcgttctacctctttcgtctccgatggaacatggacgagcgcttggcctggttgagaagtcggtcttacccgagattgagaacgcgaagttgaacgatgaagaagtgggaaagaggatgaacctaaaatagatgtatatcatataaatgatcagaacggaataagaggattgctgaataggtgactcctagatgttcataacctcaccctgagcttgaggatcttcctctcgtttcactctgttctctagaccaggactatctctggagctcatatgatcgcttccgcttaaggaggatgatcttattgagctcgtcgctgtcgaggttgacctatatctttcttcaatattggttggcggcaaggaagacgatccaggtgttgatagcttcatatcgtcagcacaaaaacgatggtccaacgcaaaagtggttaaaaagtaagaaatttagaggcaaagtcaaggaagcgaagagatataaacacaaagaccaactccaactcgatcaagagtccgacagccccaatcatccattgcacccgtcagtctaggatctattcgatccatgaccggtcttgagattgtcttgaccgaagactcgacaatttctgctccatactgcaaagcaaatcggatgaagatactttgtcaaccaacgatattcaaacaaagaacgaatggcaaaacatactttgacaactcgggatcctcctttggctgtttcataagcttttaacgcagtgttgacaacaggcatcatcgatactctagatacgaagtcggcctcattctgggatggtctggtaaactcatcaaattggttgatcgataaataggaacattcagaaacattgtcagtcaagggatcgtcgaaacaagaaagagacccatacgacgaacatgttagaaggagaaggtccgagatctaaagggttcgagtagaccgaggacgccagagagggagttgtcgccacggttgatgaaggagtcaaggatggacctgaatcagtgagggcatctgtgagtgaagatgaacgatggaatcaatatatgtgtaacttataagcaattgaatagaggtgatgatgatataacgaagggagatcaaagcatcgacagagagaaccaaaggacctcatggtatcttgagggacgatggattgacgagtatcccttcttgagcacttgtgctcgagtttgccggacacccagccggatagatccgtataagtgaacccatggtggagtggaagctctttctatcctggtcaatattcctttcccgtccaactctctctgtttactgaatgcactgccctgttcgatacgaaacgaatgatcttaccatgtccgaaactagagtcggtatggatagaagaagcaagtgacatagcggactccccacagaccgtactgttgctgctactgtcactgtgttcggctaccggccgcggcggcccggtgggcgatttagatgccatcatgtgtagagctgtgatggcgatgagttcgtcttgatccctaggtggccaaattggaggatctggttgtgtagatgagcccttcatcttagtcaaaggatatgtctgacgtggaagatggtatgaaaggatggtgtagcgaaagacagaggcggcaaggatgcgagtgcgtctgcttggaattgtgactgaaggatagtaaccggatggtgaaccggctagatgagtacgagatttgcttgctctccgctcaatcttgatcgacttcacctttaacatgtcgttgtcaaagaaaccggtcgacattgaagatgttcttgaaggtaagctcttcaatcttagctttgatcttgttcaccgaccaactttctctcgtttcctttgtttgatagtcgtagacaagactgtcctcagaccgttcatcgcgatatcgatctctctcgccgtttgggtcttgggttattcatggactagtcgactcttccagggcactttgatatataccactctagtcgttctatactgtaggtttcgctgctctggttcagtccggtttcgtttgcgcttaataatcctcttgccttatatcattagccctcatccctcatctcatctcgattgccctctcgcctcatccgcgaaaatacctgttttctccacccaagatcgactggtccgaacagatcgttctcgttaccggtgcagctggagaaataggcttcactctcgtccaagctctgtctaccaaaggtgctcgtgtaatcgcgctcgacatcaagcctgagtctgattgggtgttcaccggagatgagacaggtagtggtcagagtgtgttctattacaggtgtgacatttcaaagaaggaagaggttgattcagtggcagagaggatctggaaggatctaggagatccaacgatagtagtgaataatgctgggattgttcaagggaagaagatcttggatttgaccgagcaggacatcaaagagtacgccatggttaatttgtttaatcaatcaagtcgtatatccgcttatactctcatctcatctgtgggtcctggttggcactagaacggttggagtcaactatgtttctcatttttggatcgttaaagctttcttgccagccatgctgaagactaagcgaggtcatatcgtaagtactttgctttttcttgtacgtgtcactgagtgatcactcgagttattgacatcatgcaatgtccccgtggcgaaactatatctgatcaccagttgacggtggcaagtgtgttaggccttattggctgtgctcgtctcagtcagtcttggaacctgtcactttgcatgatcatcggtctggattgagaagtctgtgatatctgatatgattctaggcgttttcctcgttttctagccgactattgttctaccaaggctgccatcattcagtaagtctgggtttgcgacgtctcaaccagatagttgatcggcttgttgacagaccgtcttcaaatccatctcttccttggaacagatttcatgaggcgcttcgatttgagcttaatacccagtccgtctcaaatacctgtttccttcgtactgttcacctatttgagttcactaatcgatattcaatggacctcagatacgacgctccagagatttataccactcttctccttccgtctttcgttcacggtccgctcttcgcgtcagtaacgatgtcaaacaatccgttcatcaaatttttctctcctgcacttgaggcgagagatatcgttcaacgaatgatcgaccggttgggcgtagagcagagcggggtgatcatgatgcctaggtgagactttgttggtcctccttcacaaagagatagttgatctgatctttttcggagtccccgtgggaaatacagctacgtccggattgtgccatttatgagatggattcctgggctaagagagatctgtcagaatgtttgtacaagttctcatctctctttttgtctttcttcgttttggtattcataacgagaactaatcagtatacacgggattattcataatcgcctctggggcaactagctttctgaagcagaccacgcgatggacaagtttgtccgaccaggcaagaaagcagattgattatatatgcctaaaccctagatttgtcgagagaaaacttctgttgcttatgtttcgctcctcgacaaactgcttttacatgatactcctctgagtcgttctcctagatcttgttaagccaaaagaccatcacaagagaagaataaggggagaacaatttatcgatcaaatatactaccactcttcttcactccatcacccgttctggatacatttgagctcttatcctgttctttttctttcttcttcttatcttcggacatctgtttaatcgtgtcgatgacttgagacacatgagacgatgcaacaaacacacgcatcacaaaggttgtcatttgtacctaaacagagattgaacaagtacgcaggaacgaaccctctcgctctgatgccttcttatgcggccgggcagaatgggcgtctccggtgagatggacgctggacatgttgatgctcgggatgctaactcgtaattcaatggtggtcggttgatgaacgagttcaacagacgggtgtcagataccaagagaatagaactacacgggcgcaatgttagggttaaatgacgtcattgatctacagttaggctctgtgcacagccacatccggtatcgcgcacggaccgccaaaaagaggaacatctccaatcatcccgagcctctttctctttcttaccctcaccttcattgatccaaccattcatccagccatcaatcacttgctcaaacactatgtctgccactcaggatcacaccgctactccccctactgctgcatctggctcttcggtccctccctctgtcgaagctgctgctcagtctgcccagaatatcctcgcccaggctcagcaggtcagttcaatccatcggcatcttga

SEQ ID NO: 2829 - DNA, 16653 bp, Xanthophyllomyces dendrorhous
ttctggcctgtacagatggtcagccagactactccaattgttgagtcaggttgagctgttggtcgagatgtgtgctcatcgaatggatttgaaggacaagaagcaaggaaaggagaacagaggatcgagaagagcgaatgtgcttgtgggtatcgagggaattaagtacgtcttgacctacttgcccaatgagtagagccgagatcttcgagactgactatcctctttctttcttcttcttctttttctttttgacagaacgatccttcgactcattcttcttgccgtcacttctcgtccattgatcaaccctcctcttcctcaacctgcgtccgatctaacatcagtcccactcagcacctccccttctcctctatccgagcccgaacgtgacctgacgcagatcaaaaacccgattcaagagatacttcttccaaaaactctctacaccagctcacttgtcaaaggaagggaccttgtgactcctcttgccggttggaaagatacgttaggagaagtcttttgggcgggaagaggagcgttttatgtgttgctttgggtctggggacgaaagttcggtggcagagggaaggctgtttggggcgcacttttggttagtcattccccgaaatcgttgtcttctaggttaatctgtattaaatcaaactgcttcccttcctttgtccatcagctttcgatcctgtccagaaatctttctagagcggcctcatcgccgtcgtcggcattgacgccgtcaaaaccgacgtatccatcttcgactaccagccccgaatcttctcgcaaagtgagctcgcttgagagggcagagagggctaacagagataaggcattcttcggttatctattcaggggtgccgtctgggagactctgactcggtccgttgtcaatttcacttttgatctcatattcttccatgagattctgttttcaacactcgtgttgacgcttctgcccctcctttgttgttattttcttcaatggcttggtttcattttctcaaattcaataaaataaatatcagaccgatgttagaatcagtggcaagaaaatcgtcaaagattcccatcgtaggattagtaggtggtgtgctggaggactatattccgttgatcgagaattactattgttcgtctctcttcttctcttcttgctctctcacttttgtgaacatacgctgaacacatgtaacaaatggttgtttcttccggttggtttggctgtgctcgtccgaaatctggatggtttcttagattatacggccgactagtctgtgttgtgtatcatgataatctgtacactgtctcacatgtctgtgaatcattacatcgggggtttcctcattctttctcgttcttcatgctttgtgtaaagtcgactcaggatatcagatacaatgtaaatgcatgcgagacagaaaagtcaagatggaatgcttgatcggggatgatgcaaacatcatatgatgtgacaatacctatggtaattgaatgatggaagataattatcgaattcgatcatcaggatccaaacacctgacccaacttccctctctttcccagtttataggaatcgatttctcttcctgtaaatccgtttacattcgggtgtcgaatccattagaaatatcaagagtagaaagagagaagagatgaggttagtgaagctatcccaggacgcatatccgcacaagacaaacaaacaaaagagaagaccgggattcacaaatgatcgtgttagccttgagaaaactcctcttgccagtcgttgatgagctagtaacgaaggatggaagcagtctcttatgtttttcccacaaaattccgtaatggggatcaatgcccgacatgcaaagagataggaaagaattatggctcacgctgacgacaaagcttcaatgggaacttctgacatgttgagcgccgatcctggttgaaaaactgtgccactttgatccatgatgtaaagagagagcaaggccaagaacacaataatcggggcggtgagaatgacaaacgtgataggcgacttgttaggaggagagcagagagcgtacaacataggatcttgaagcccttgataatattcaacgatccgaacgagcctttcatctgttcattcattacagaattgagcatgaattcagttaaagcagagagattcacccagagcgcaaaggtgtgtatcgatataagagaatggtgcaaacatactatatcgttcttgcagaaatttcatcctcgacctcgtcaactctcctatcttcccttgtcttaatgcgcatgaacacttgaattcattcaactcaatcgcttctgcgctaattgatcgatatcgggattaatcattggtttgagagggaagtaagaagcgttacgagaaacatgcttagcgacattttgagggtcagggagagactcaccaatatgggtcttgaccattgtccgaaagttcatgaattttggagacgtctaacacaccgactgaggtttttcgagtaatattgatgttgttgagaattaagcgtcgatcttctctagattgacttgtgatgaagataaaaaccaagaaattctgacctatgttgatcatcactccggctgtcaagtacaaatgcaagcccatgttgataggatcgatatcgtgagaagggcatccaatcttttatctgttttccaaagataaagaacagaagtagactaacgaatgaactttcgcacaatctccagtgtctgtcgaacattcagttcaaagagatctggggatccaggagtgatagcaattccagcttttgggtcaggtgtcgatttgaccagttagtgatgcgtccaattcatcttgtaaatgacatgtacatgtcgtgaagaatccacgcacgagaagaacaaagtgcacactacggtacataaaaatcagaaccaacccaggcgaccggttgaactactcatgctagtaccgtcgaaggagaagaaggaagcttactaaatcgttcgatccaatctgtaaattgagatatgtccatttcataggacgtcccgatttattaaatccccattggtgtttttcgaatacatagtgagccataggaacaaggtagtctgtcgcagaacatcagccgtgttttgagggggtgtacaagtttttagctatcagttttcgtgattgagtcgagatgttcagtagggaacgacacaaatatattaacctcgagcctgatgaggtaggttctcagccagactaccagaaagtgctgcattcaaccgatcctgacgtggtgtccatccgacaggacccagagggcataaatgacctaaacaaaccagatgatggaggagatatgaaaaattcaattgaatgagcctcaagagaaattgttaataaagaaagagaaataaacagaccgtaacatatttccgctggatgatcccctctagagaagccagttatactcgaagagtagtatctaagtagcttctcagattcataccccggaactcgatcgatcagtcttacaagattggtcgcccacagtgcaaggatgctgatcgaaaagacagacgaaagaacagaacagaagacatacgttaggaagagtaatttctttatggtctcctccggccgcccaactagcgcctctgaactcatgcgatgttgtttcaggtgtggattgtattcctcggaggaaccatccggcggtgatcgagtcccctaaagccatcgtatacgagaactcatccggccgacttgtcgatgtcaaacgggaaacaccaactggtcaatgaatgatccaagaccagcattacaaccggtgatcagaaagtacgagtaggaacttacaggtcccatactgactctgatggacgatctctggctggaagatgagggcaatgcttgatatttttaacccaggttccgttgaaaggctgggccgaagaagtacttcccaatgttttttgcgtttgtgatcgaggcaccgggacaggatagaaaagagagctgagaagcgtcaatatggaaaaagatcggtccatcggttcatcaagacaaacggcttgtcgggaagtttgattgaaggtctttgagagaatggatggtgatcagcaacgaactacatggtcagaaggtaaaaaggctgagaacaacatcgagagagataacaacgtacaggacttatctaatctgcggccaaggaagatgcgtcataacatgtgattcagaaagctgtgctctacgcgttcctgttcctttgttttgtttttgttccttctgtgattttcgtggtattttattttattttattttattacccgccttctttttctttgttgcgcccgttctttctttcctcttctctctccaaccatcatcaacgaccgagctaagcaagagcaagccatcaagaaaacaagaccaggagtgcacataggcaaggttaaggagtttctgtttcttctcttctttctcttcaagaagtaccctccaccatcatctttttctcggaacccatcctactagctatctcttcttgacaccaaatcaagcctcagattgccatctgcctttccttcattacctacaacgccacctctacaagtaacctcttctttacttcgaaacatggctccttcaactcctgccaggtccaacattaattccaggccctcattccaaaactcaacaccgaaccagtccaaatcagggcatgctcagggctcaaacccgtctgtcaatgtcaagactcctgcgtcgaacgctgcaaactggaggactcgagttcggtcgaccacttcgacatcttatgctacccctgctgctcagagcaggaggaggactgtgagcgaccaacagattcaaggtgtacgtatacctctttctgctggctagtttgatcttttggtgttcccctactctccttcctctttccacgtctgcaggagccggacatggcttgatgcatgtagcctctaaactatttgctgccgaaactttgtttcgatgtcttgcgatagatgtcagtatgcatgtcgacggtgcacgactctctgttgccatctacactgtccttacgtagttcattccccctgactccaactcgcggctcgagctgtccctggctgcagcgcttcagcacaccacctctttgttcctctctttctatcaaggttatcattcttactagcacactaagctttcttgctttgcctccttgactcgatgcatatagacccaagatctttccgagaccccaggtttgagttacggcgacactccttcaaccgttggctcctccgttggttcctctctacctgctactccggcctccccgacgtaccgtcagcctcgaaactcgaagaacgttccgtatgttccgtccaaccttcattccaggcaccactcttcaccccttcaccgatccttaggtctgcctgcagacgactcgttcgatgagtcctatgagcaggacatatcgtttgatgaaggcgttgggatccacagcatgatgccccagtctgctgcggccagaaagcttcggcttggaatccttccagaggagaacaccgaaccatttactatctctgctagcaagcttgatcaagactggtctgctcctagccagaccggcgccagccccctgcgatggaggcaggtgagcgaagcatcatcctacgccagtcagaccgatggtgaagatgccacttcaggtctgttttttccttgcgcatatactcgcatgttttcttgtgcacctttctcataacaagaagttcatactgactcaaacttctcgtttccattacagtcaaaactgtcactccggccacgactcctcctagaagcaaaacgcgagccctaagctctggagccgttccccactttcttactccgcctcccgtcaacacacgaggtcgagtgatcgttcccattgcgcctgccaccgtcgctccctcccttcgagggaccagtcgacggtcactctcacctttctacgagaacgatgagccgctgttgcccatcgacaagagcatctctaagccccggttcgccggtctttctcccgctcagagagggactcttgtctcagtcgtcaatcgagccatcgccatcagaaagccccagtcccctacacccaaatcagccacgccaaccgctatattgggttctcaaacaatcgaggcgccaagtcaagcagagccgcagcaatcatctgctatttgtggatgttgcgaagatgagatcaagaaggacggggtaaagattggaccttgtgcctgtgtggtctgtaaacaatggtcagttggatttgcgcttcgtccccagctggatctcaactaaacggttccaagcgtttgcttctctctcaactcaaatagtttcactagtggaatgaagtatgtataagatcagatcaggccgccttctcctcagtgctaatcttgcctctttgtcattcttccgatagcgttgtatgtgatgtagccggaggcatcatgaggtaagcatttacagatcagtattccatctcatatctactgatcacatcgtctggttacatcttagatgcccttcttgtacaaccactgtcaacgacttttcaaccttctctcctcctaagcaagaaacttcctccaaagttcaacccaaggtccaaactcgagttctgccttccattaacgatcaatccaatatgcctgtcattcttcgatttgacaatgccagttgggtgagttacctccgcgctttggtgtaacgccgttttggcattcgctcagaactgatgtatcaagaactttctcaatgttcataggatgttacccctgagatgatcattgactttcttcctgaaaacgctcttgccgatccatctcaaaatcctcaccctattcacctcttgatcaacccttttgatggaaagactaaagactttttcgtacgtgtcttcaaatcaaatttcaatcactgaacttcgtccagtgggttgaccgacaaagcatttacaatccatcacctatcttagtttgtcgaggttgtatcaaagtcagcggcagcggcagtcatcaagagttgccagtcaaccattcttggagagggcaggagagcgagaccagtgactataactgtatgtcggttgcaggctttaaataaccgaatgaaatgattctaaatagaacaatcatttgatataccagctttcgaacttgactgagcttcgacgagaggcgagtactaagtttatcaatttaaacctgagtatttcaaacctgattcttaacgtcttcccgtgttttctagattcaacctacttctgcgcgagcattgaacagcgtccttgagttgtgctccactgcattctcgaccaagaagagctacatcaagcgaaagtccttcccattgtaagttcaagaagcgctcttcatcagacgtagcgtagagccgaacctgacaaagatatttaatgaatggtctggcagcttgtatatgatgacaattcttactcgggctagtctcaagggtctcgaaatggacttgcttgtcgtcttccaaggtgcgagtctcctttttaatttaatctgtgcctgcgcatgcaaccgtaccttattgcctgaatcttttcatccaggcgctgccctgatcatctcaaatcttctcgagtccggcgctgcctcgacttccgagctagcccttgcccgggcgctttactctgttcttctcctatccccactcttgacccctgttgtatgcggtccattcattggtgttatgcccggaccagctcaccctctaagccgacctgttgtccaacctcaaatgcctcagctcatgttcaattcgatgggtattccgggttacaacggaatgggtatgatagcgccggcaaatgttgggcagtcctatttgcaacagcagcatcagcatcagcaacaaatgtttgcgatgaacggacaactaagaatctagcgttctcgtctaaagcagacttatagatttctgtttcttcactcgtttcttctcttctctctttttctctcgacgagcactcattttctcaccggctggaaagttgcttctctatttcaagatccctcaataagtaaatacacatctattttacctgtttttctttttcacactatatcccaaccttgcatacataagtttgatcatatcctcctaacatgactcggaagcatcctcttctgcgtttgaaatggtttttttttcactcttctcattctgattcttcatctgttttcatctgtactttgaattttctcctcttctgctcgtttctagatatatatccctcttcacctccattacggtacgcctccgtgtctgcatatgtccgtctttcattcatttgttcgtatgtttcgcttctcggttcgacgcaactcgttctgtgttttgctcgcttaggctttccgaaatcgctcccctcgatcacgcgaagttcatgatttatgatgtttctattcttctatctgtcgttccaaactgttgcaagatgggtgccaaacctcagacatgtacctgtttatagctaacgacctgtctgtaggtgcatcctcaaaatacttgttcaatcagctgtattttgacaacagagagggaacaattcgcaaaattcgattgatgcgcttatcaacaaagccctctgatttggaacactttactgatccacttatcctcattgtacagtgtgcgcagctaatttattcgtcagaatgatcttattcaagaacgactcaagatgaacaggcctactgtgtaccttcgtgtcggtttgtgaacgaaaggagttatgtatgttagttttattcttgcgaagcggacttttcatcaaaggatcgtctcttctttgtcaaaggcgtccactctcgaggaaagtgtagaagtatagcatagagaaagcaacaatgtgaccaaacgagagtactaggaagaaaatgcccggaaagttgataatgatgacaatatactgtacagcatggagtatacggaaacacaatgaggaagaagataagcaaagacagtcagagacaaagttaaacagagtagagaaagcttacagaaaacaaacaaggagaggcagagcaaagagagtgggagagacgggaaatccttagtaggaaagcaggatgagcaaacaaatggaagaagactgtctacaacagaagaaagagaagaaatagagaaataacggaaaggagaacggaaacgcgaaaaaattgctgctctcgtctggattcctcgagggtgttgagattaatttcagtcgcttctgcagacactttatgaacgatcggtggtgaaacctcaagttgctcgtccgaggatatcagagggagttgagtcggactgagaaaggaagaaatggaggattccgtacagagtataaactggtgtagaggagatcgagatcgcaggatcgatcctccccacggataaggagccacttgttcctgatgttcgttccttcgggcctcaatccaacttgggatatttactgattggggccgttgcgcgggaacagagggtgagccttctaaatccaacgagttctcagcccattgcttcggcttcttgtttgaccgagccggctcatcacaaagtttgatggaaggatcggccgaatgatgtcgaattctttttccgagagaagacttggtagtaggcgaggcccaggcagcacgtgatgaagagcgaaaaagcttgacagaaggcaaaacaaagacgggcttcgatgtcattctgtgaggacgatatcacaaggcgttagctagaaagaaccgatgctcggtaaatgaaaagaggcatttacctgtaagattctacctttttgatgtttttgattttcttagtcttgtcagttttgttgatcttgttaattttgttgattttcttgatgtggtttatttggtttatcatattaactaattgcgtctgtctgacacgtttggcgagtttgatccgtttcgcccgggaaaacatgatagtggacacagttcgattgacagggctgggggacgatggaacattcaactgagtgttgtgagtcagaggaagggaaaggtcagatcgagaggtgatagaaacagtgctcatgatgaatgtgctgatcgaaggaaagaagatggcgccgagtggaagaaaagtggaaagcgtgagataagtcaagaaacaagaacaactgttcctgacgaccagccatatatacctggccaaggatttccttcccttcgtaaaactgatccagggcgcgtcgaagctgcataaaggataagaaaaataaattgatgaacgcgattatattctatttccaggcgacgtgtccgtttgttgtttttcttttcggacgtgttgtgcctggatgtcgcgctgcaagtgttgctgtaagaacgaaccaccactgtgagcaggatgtcatcaagtcggaaggtcatttgcgaccggtcgatgtacaaagacgcatcatttgtatcagtcacagcagttgcatcagctaaagctatcacgacctccgctgggctatccggaacttcacatgcagtgttcctaagaagtgtgagtgatctgagcatgtcagttcggaagctgcctggagagcacatctaaattaatatcacagagagcgaagagcgaagggtaaggaaccgtagatctaagggctgagctctctttacaatgcgacgcatactgacttccaatctaaggacgctgacatccgcttatttagacagtccgtccttcgttctcagcactcggattgtatcctggaagatctgaaagaagaatttgaggaacagttaacgtcgacacctgtgctctgtaccaaatgagcggacatacgtctttatgaaagaagagtcagagttatgcaattgcccacaccctcggccacaacatcatcatgttcagtaggcctcctccctccgcttctactccatacagcctccttcaggttatctcacaatgaagaagagctctcgttccgccaataaatcactctaacagtctgctgatatgacaatatatgtattacacattggaatgatccacggctgtttcattcagtccttggtagaatgtaccgatcgaaaacctgatcgatcgacaggccactcaagagcactaaacgacatttcccagccagtccatcagagatcctccacctgatgcggctttagaggcagattctgcttcctttgccttattggaagctagcatcttttgtaaagcggatggctgtttcttcttcttcctcgatgaagtggtcggattgatggggccactgacactagcgccagaggtagtggagatagcagagggaggggctggtgataatgatgctggcgagctaagcggtgtctttgatgcagatccaacaagaggtaacgcagatgagatagagagaggattaggagtgatggatgatgagaatgctggtgtcttgatcggctgtttgatagaaacacgcgcactggctggagagtgaggtgcaggcccctgcaatattgacgtcgtgagtaggggagaggaaggaagagattccacaggttgttgttgctgctgctgcttctgtaaactcctcgtcttccttgtgctaggaaacgattcaaccacattccgatcacttcccggtctgatattaacatccccacaagccaaacaggtcactctgaccctgttaaatttcttctttcgctctttttctttcccttgatcaattccttttcctttcttagatctccgtagctgtatggtcgaagtatgaccgggaacaagtaaggtgctgcatcgaacgcagctgatgtgttcggtggctgatgcgggaagttcagatagaagacgaagtcgactcaaatggagagcggatagattaggtgaaactgggtagaggtgagcgggtaaatgggagagatgggatagcgtgggtaggctgggttgaaaggtggacatcgtggtttggatgaggaatcagttctcggtcaaattaaaggagttggatgttgaggaggatgaatgcaaaaaaagaaagaaaaaaactagagaaattttgtaataagaaattggacagccgtctagtttaaacttacagtcaagagctcaaacgtcggtggcacttccggttgatctccatctctcttattccatccatcttacctgtatatttaatcacaaacaaccaaaaaacacaggcagatacacattctatggcatcaccagatataataggtgctccagattggcctggaagatacgagcatgtggagtaagctacaaaatgatctgacttcgttcgaaattgtctgtcatatgcccctcagtcctgataatcacatcttgaatcccctgatggatctccgggcttgaatgaaccgatagcatgctacttgataggcctggacccagcacagatatagactccttcgttcctggcgatgctgtaagcaagtttctggctctgatgcgatcgtctgttgggtgagatggatgagggcgctgatgcgcgtatatcctctcgttgttccagatcaagagctttctcagagatacctgcaaaatcttggtcatcggagcaggaggactgggttgtgaaatcctgtcgaatctggcaatgtgtacgtttctcaagatcactctgatgaacgcagcgaatcggtgctgataaacccatacataaagtgggctttaaggacatcaccgttatcgatatggatacaatcgatgtgggttcttgagtataatctctgtccatagcagggcctaagcttaacttcatttcttcacgatcatgataggtatccaacttgaatcgacagtttctcttccggttcgttcacattgctatgcccttaattgtcccgatcaccgcgctcacttctgattcctgtgataaaccttgtagagaatctgatgtaggtaaaccgaaagcgactgtagcggccgacttcatcatggcgcgtgttccgggatgcaaagttacgtcgtacgtacctttctgcttggattctgtgatggagagattgtccattgacgacaatattaatcgtcctctgtctcaacagatattttggaaaaattcaggaccatcctgagtcgttttataagcagtttaacttagtgatcaccgggcttgattcggtggaagctcgaagatggatgaacgccacattggtcggcatggtggatgaagatgaaggtccagagagtatgaagccgatgattgatggtggaacagaaggttcgtatcatctcggaataagatgcatcaagttatgaatcaatagctgatgtttggctgctcaatgtgaccttctctgtcacaggctttaaaggtcaagccacggtgattttgcccacaatctcgcattgttatgagtgcactgtgcgtctacggctcgcctgttttcgatatgttcccaaacctcaatgataactgatagtcaatttcaattcgacactcaactgcgagtgcagctccacatgcacacaccgcctacagctttcccgatatgtacgatcgcaaatacacctcgactaccggaacactgtattgaatgggcttctgtacttgaatggcctaaagtattcaaaggtgagtctttcttgcttgtgattgacaagagaggcaagctgacgtgatagatattgctgctgccatgacaaaaacaaaaaaaaagacaagaagctggacaccgatgatcccgcagacatcgaatggctatacacccaggcattggctcgagcaaagaagcaccacatcgaaggtgttacttggtcgctgacacaaggtgtcgtcaagaacattatccccgccatcgccagtacaaatgcaatcatcgctggtgagttcattgttcaattctcgcgagtcttttcggaacatgacgtgaagaggaaactaactggttaattttcatcgatattcagcgagttgttgcactgaagctttcaaacttgtcaccaacagcgctccttacttggatagctacatgatggtaagaatgttcccttgatgtttctcccgctctgctttcgcctatctttatcttgatctgtgctgacatttcttaaatgtttgacactatacaaacagtatgttggtaacgattcgatatacacatacaccttcaaacctgaacaacggccggactgtccggtctgtgggggagaagtgatagacgtcactatcaaaaaggagtggaagatagaagatctatacgagtggttgaaagctaggcaggatctgtcagttacatttccttcttcctctcttctcgcccatcttctagcttctgtcatcgatgctgaaataaatctgaacctggcatgaaacaatttagtcaactcaagaaaccatccctttcaagtccgaacggcccactgtacttttcatccccaccccaacttgaacttgcaactcgaccaaatcttgaacgactagtcagtgaccttttgaaggacggggatgaaattacagtgacggatgtcgcgttgcccttccaaatgagtcttaaggtcaagttcgaataagaaaagcgggtaagatgtagactaggagcgagacagttgtttacagaatttgtttcgtcgatagttctcttccctcatgattaatcagatttttgatcggtagtgtgaattgagggattgaagattgatatgagaatcagtgaatgccggaggaaaaagagtttgtacataaggcaagaaaagaacaaaggggaagatgtcaaacactataaacgattaacatgatgactagggttcactctactaacaatgaacgagtaaatgaccaaaaaataaaaaagaagaaactatagaaggagtggaaggaagagggaaaagactccaaagaaaggccgaaaaaacggagagaaatcaagatcacggattgaagagagatcaggtcaatgaattgagatctgtgcccctgacaagggcatggatacaggataaagttgtgacgattgaaactatttgattaaggagagcaccggagagacttagatcgaggctccctcttcgcgctcaacagcttcaagtcgagagatttgtctgtgaggaagggccaaattggtacaaaaagaggatccaaaatactccagtcgggtcagaatcaagtaggttagaccttcagaatggaagaatgcagataggactgacctatctctaacagcttcctgccacctttgaagccttccgacctcattcactccgaacccgaagatttttggtcggtacctttcaactttactagcagctgccaccatgctcacactccccactcctgatgggcctgccaatcctccaccgtgtaatccttgacctccttgaccggctgtttgtccgccggtgttggcactaccggacgtgaaagcgccatcgctttggtgtgcggggtgagaaccaggcaaaggtgtcccggagttgttaccagcgcctgctgacgaggcttgttgaggagagagtagtaaaggaagcgaaaggtggggcaatgtcggaggggggactttggaaggaatcatgtgagggtaaaccatgaaaagcatgtgaggaaaggctgatagggcgtgcgttgcagaggcaaggttagaatcaattcgaaaagtaaggaaactgaatagacgaaaacggaaggacctactagttccaaaataggccccatcaatggttccgtgtcggttgcttttcggactgtagatgtcttcacatcgaggacagtacagctttacggctttttgataaggtagatcggacaatccaaccggaagaagcggttgagacaagcaatacaccctagggcaccttccgaagtcggcttttttatatttttccatctgagagcaaaagagaaagagcgtaggttacggcttgatcaacaagtttgattctagaaaagcatttagatgtggatagacgaaccatcttggctaaacctcgggatgtaaggatataacgggcgtggattagaccatataggaatcgggctgaattttcaatcgtttctctgacttcatcttccaggtcttcctcaactgtagatatgaaaacaagtttttgaataagctagatgctatctggcagaaagatagatgtccagaggaaagggacttacagacgcctagagaatcagtaatcaggtcgagtgctcttgagtactcattcaacacctcagcactcaatccagtaaggttaaatctgtcaagaatatattcctcatcaacctccgcatagtattcgttccctttagtcagaaggaaccagttgatccatcttgggtttgagcatattcagttgtgaatgagtcaggtgaagacaagaagaaaaagaagaaaatcaggaagggaaacgatttgacatgaataggtacaaagaaacaagtaaaagaaaaaaacacgaacgagctgttgtactctgagtcacttcctgttgagaggtcgtccattttgagatcaaatggaagagaaggagaagaaagaggtgaacgaataagtcgagcgagctgatggaaggaaacgaggacgatggaacgatgggcacgggaaagatcaagtcctacaaaaagcggcaccttttttctccgtttcgcaactcaaacattttctaatcggtcattacgacac

SEQ ID NO: 2830 - DNA, 6109 bp, Xanthophyllomyces dendrorhous
gtaatgtttcatatcagtcgacacaaatagcgagtctcctcatcaattgaggttctctcagaagatgcaataccaggttctaccgcaacaagtgtagttgcgaatgaacatcctgtgatctcatcatatagatgaaatataggcaatcagttcagtacacgatccgttttgagcactcgactttctgcagtacgaggtttccttcgtaatctactcctcaagcgtacacgcatgattgctttgttaaggccttcaatatttatctctctagtcagttgagtatacagagcgcagatatttcgtatctgggcaatctatacgagagagttcaatctttgtatgttctctgcataaacactctaagatccttttcggggtctctcgtagccagctgcacaacgcaccgaaatccaggcataaccctacgctgggtgcgcccagcacagtttggcagcaatggtgaactagacaacgatattatttttgaagtgatgtggaggacactatcatcagaagaactttatctgggtcgactgactggttttgtgtcctcttgcttcccaatgtgattacatatatattaatttcgtcctgatacagtgctcctgtagcgatggttggaagaggtcgggtcattgagtagcatgatcagagaatacggtttcatagtttacgtatcgacttgtcttctcccttgcgctgatttcattttttcttgcgttttttgtgatcacacgagtttgatgaggaaaaaatctcacttcaagctctcacagtctgttctgacgaaacattgtatatgagggttctattagaccgtgatgaaaacattagctgccatgggaatcaagtcttgaaagtttgtctacgtaatttgagacttcaaatcagttaattcttcagatcatgaacaacgactctgccgagtcatccgctactcgagaatgtcgggcatgaggttatgttgagtttgctgacttctgacgatgggcaggcggtcatcgacatgatcaagactgaaagcgacaacaaaatcatcccttcaaactcctccgactctggtccaagcgggttcttttcatgcctggtcaagtatataacaacaatacttgagatatgatcatgtacgggatgacgtactgaggataataagggttacatacaatgtgtgacgacagtacaacaactcgtagagtctcaagacgaactcattaagtcctttcaacgcgtcgcgtgccgcgtgcggaggaacgcggtcagcttgacgcgtgctgttgtcacaagaagtttcatccaaccgaaccgatcgatattgtcattccctgcttccatcatccttctatcttttctttttggttgcttccttcatcggcactctcttcttcctctttttctctttttttttgttctcactttcgtctttgctctatttttctgcttacgcaggtcatcaggacatcccttgtaaaatccgtttgaaagggaacagagcaaaaccttccagcatatacccataacatataccctccatttttctgatccttcggttctgatcatcaacagcccatcttcagccttcaactagagcatggcacgaggtggaaacccaatttttggactaacctctggcagaggtaccggtggacgaggcagaggtcgcggaggtagatccaacactcagttcactgggagtcgtcgagggggtcatggtgccgctaacggcaaaggttcaggtccagctccagttagagcagacgatggttctgcacaagtggagaagttcgaggatatcagagtcaaagatgagatcgacgagaaacttggtttctggaggtgggaagggggaggaggaggcgcaacaggcgaagaggattctaagattggctggctggtcaatatgcatcaggtacgtcgtcctcaaacctaactatcaagtctcctaccgtcttagtcggggcagaaacactaaacaccttcaccttgcttttttcgtcgtcgtacaaattctgttgacagaccctaacgcaggacgaacacattgcaggaggtcgtcaagcgatcgacctgtacttcattcaagacgacggaggcatgttcaagagcacgatgccatttgagccatatttttttgtcggatgcaaggttggtcaatcatctcaatggtttctagacaacatgctaactagtttctgttttttaaagcttggaacggagacgatagttgaagagtggcttatgaagaaatacgaaggtcttctcatcaaagtcagccgaacacggaaggaggatctcaaactcgtttgtcgcttcccttcgttataattcctactcttgtttatctcaactgaatcatcgtcattcgttgttttcactagccaaaccatctgaagggctatcgaccaacgtttcttcaacttttcttctataacaccgccgacctttacgctgtgcgccgcgaaatcgttccactcgcgctctcgaaccggtcaaaacttgatgctgttgatgcctatgccgaggttgttcaagccactatgggcgttgagattgagcaagggttcggcgaggacagcataggtcagagttgggcgggagaaggaatgaagagaggaagagacttggatccaagtgaatgtttgaatgacgtgagggaatacgacgtgaattattacttacgagtagctattgatctaggtccgtcagtttaatctttggggcgggttattggacactcctctaacgcctgtttttgttcccaccttcataaatgatgaccctatagacatccgagtgggactttggtacaccgtcaagtccatgtttggttcaatatctctgaaaacgatcacagaacgagtgaagagagccgaaccggtcgtcatggcattcgatatcgagacctcaaaatcgccccttaaattccctgaccagcaggtcgatcagatcatgatgatctcctacatggttgacggaatgggctatctcatcacaaacagagagatcgtgagtgaggacattgaggatttcgaatacaccccgaaaccagagtacgaaggcccattcacaatcttcaacgagcccgatgaggtgcgctttctatatttattcttctgactttttactctttgttaagcctcagataaggtacttggatctgaccgagaatccttcaatttgatgacattaggcagcgctcatcagaagatggtttgagcatgtccgagatgttcgaccgaccgtcatcgctaccttcaacggagatgctttcgattttcccttcgtcgatgctcgagccaactttcatggtatcagcatgtttaacgagattggcttcatgaaagatcaggaggatgagtacaagtcgaggagttgtgttcatatggactgtttcaggcatgtctccaaaattcctgcttctttctctcaagtgacacaagctatcctcttatggctgactgatcctgataccgtgcttgctgtcgttcacagatgggtcaagcgtgactcatatttgcctcaaggaagtcaaggtctaaaggcagtcacgacttataagcttggttatcagcctatcgaactcgatccagagcttatgactccgtgcgtttccagttcgattgctctctatttccgtcttttatctgtgcagatgattgaccgctgttttgctctccttgacgcatgcctttttgatgaattgttaggtatgcaattgaacaacctcaaattctagcccagtactctgtgtcagatgcagtagcaacgtattacctttacatgacttatgtccatccgttcgtcttctctttgtgtaacattattccattgaatccggatgaagtgttgaggaaggggacaggtacactttgcgagacgctgctaatggtaagactcctaaactatcttggctcaacttatccccttttgtccaatcatttgacctgcttttccccttttatttttatttttatgattaggtggaagccttcaaaggagaaatcatcatgccgaatcgatatgaagaaccttacgggaacatgtacgagggccatctcttatcttcggagacgtatgtcggtggtcacgtcgaagctctggaggccggtgttttcagaagtgatataccaacaaatttcaaagtagtaccgaccgctatgcaacaggtgtgtcatatctctagttcttgtacaccctgaagcttgccacgatgaaactgaaggaggtctcggcggtctctctcttcagctcatcgatgatctagactccgcgctcagatttagtctggtaacagagggaaatgtcaatctagccgacgttgagaattacgacgaagtcaaaggccaaatccagtctgcgctcgaagaactccgtgacaatccatctcgaatggataaacctctgatctaccatctggatgtggcggctatgtatccgaatatcatgttgtccaatcggttacaacccgattcaattgtggatgaatcgatgtgcgcgacgtgcgattacaaccgtccggacaaaacgtgtgatcgtcgtatgcaatgggcctggcgtggagaatatttccccgcgaagagggacgaattcaacatggtcaagaacgcgttggaacaagaatcgtttccgccgaaatggccatcaggaccgagtcgccggttcgtcgacttgactcaagtggaacaatcgacacttttacataaacgattgggtgattactctcgaaaagtataccgaaagactcacgagaccaagatcattaacaaggaggcaatcgtatgtcagcgagagaatccattctatatcgacactgtacgggctttccgagatcgtcgatacgagtacaaaggtctacacaaaacctggaagaagaatctcgacaaggccgccaccggaggaggttcccttgctgaaatcactgaggctaaaggaatgattgtcatttacgattcgctccagcttgctcacaagtgcattctcaactctttctacggatatgtcatgcggaagggagcgaggtggtactcgatggagatggcaggtatcacctgtctcactggagctaccatcattcagatggctcgagaattggtcgaacagattgggcggccgcttgagctcgataccgatggaatttggtgcatgcttcctggaacgttccctgaagacttcaactttcaacttaaaggaggtaagaagtttggtgtatcgtatccttgcacgatgcttaaccatcttgtgcacgccaaattcacgaacgatcagtaccatgaaatcgtcgataaagaacgtggcacatacgccgtgagaagtgagaattcgatcttcttcgagttagatggaccctacaaggcgatgatcctaccatcttccaaggaggaagacaaattgctcaagaagcgatatgctgtgttcaatccagataattcgcttgcggagttaaaaggtttcgagatcaaacgtcgtggagagcttcagttgatcaagattttccaagctcagatcttcgagaaatttctactagggaccaccacagaggagtgttacgcggctgttgcgcaggtcgctaatcaatggcttgacgttcttcaaagtaaagcggctagcttagaggacaatgagttggttgaattaatctctgaaaatcgaagtatgtccaagacgttagcagaatatggatcacaaaagtcgacttcgatcagcacggccaggcgactggctgagtttttaggagaccaaatggtcaaggacaagggacttgcctgcaagttcatcatctctgccaaacctcacggagcaccagtgacagaacgggcggtaccgattgcaattttcgatgcagagccgacagtcatgaagcactttctacgcaaatggctcaaggacaacaggtaaaaaaattccctcttcaatttgtatcgatcacgaaaagaaaaactaatctaatatttctacgacgtatacgttcagtatcgtcgacttcgatcttcgctcaatcttggattgggagtattacactgaacgtctaggatcagtcattcagaagctcatcacgatccctgccgctctacagaaagtctcaaacgtaggttaaaaatctcaccttgtcgtg

SEQ ID NO: 2831 - DNA, 12642 bp, Xanthophyllomyces dendrorhous
gttaacactgcaatcagccggtaccccgagttcgtcatccagattggctgcataaacgggtggccacgaaggaggacaaattccaacagcacaaacttacggatatgtttgctcgacaaaacgctgccaactcttctgttctgctgtcagctgacatggaagattttggaaaaccttcggcatcgagcaacggcgcgctcgcagtcgcacgaaccacgcatcgacaatcaaaagttcaacaagaagaggctgttgttcaaaagatcgaacttccgttgagagatgtaaatctaaactatccaggttgggtttccgggatgaaaaagaaatggaagaaacagagagatgttagggcgcgtggcatggtgtccgggggaaacggtggagccagatccggatacgacaacagttcaatctcctctttgttccgacagaggacttttgggttgagctcattgacgtgggaagtcattcaggtcacgccgacttcccgaccggggttgttcaatttatggcttctgattgataacagtcttcaaaaagtcaaacttcgtattcctcgacagttctatctaaatcttcgatctcccccggaaaaagacacgttcttgcccatatatcaggccgagcctctcgtgagaacacttccaagaaaccatccatgtctaaacttattccggatcaaagtcgacgaacagctttatcttgaaggagaatctcacttctcgacgttaattaataacccaaaagtcgatggtgtatatgaactccaagtaagtaccagctcatttgtttagcaggtcatgaaatgattgctcatatgatatcttgcaatttgtgaccagattcctttggttgtaagagctcttcttcaatttggaaacacatgcgcacttgacaagactgtgaagggaggccttaataaaggacttgatgaaggtttcgaccttgatcaactggaacggattggaccttctctctcaaagcggccgtatctcaacggtggacaaggtataagattcatcttcgtctaccattccactcaagacagccgtcatcttcttggtctcttcgctcctggtcaaaccgcgcgagtgatgtcaatcgatagtgcccgagctcgtcaacaaatcaaccatcttcccaagttctatgccgaacggcattcaaaatcacctgatacctttctgaagagtaatctgttcgactaccctgaagaacatgacttcgaggtctcgtatcatttgactgatcaggcaggtttctccgccttcaataaagagctcctcaatctctcttcccgaagtcaacctacagtccttgttgcctttacatctcaaccgcaacaattctttgagcaacgtgtgtctgcatttggaaattacccagtcgtcatgatgcacagtagcaaagaaagcgggtcatcactcatgtggctcaatcatacgacccgtcgaatggttgttgcttatctcagcatggaagctcgactcagggatctaatcgaggttgctcgtcatcatgatgtaccggtcggtaaccttgaggcagatgcccctctcttcctcgcagatattgactttgcccgccggctgcagtctcaggatgctgttctctggtggtcggcaggcccaagacccgatttaggtggactcgaagatgatgcaaatactccacaagctattgatgaactcgctagtccagagttctcaaacgctggttgttacaccaacgttactttccgtatcgcagtccaagatctcgctatcgacgccattcttcaatcagctttggtcaacgagctcgaaggtagtggatcggggtccatggcatttgattcagcctcgcacactttagacgattattcgagaggaagcgcccacgcgtcccttacattgggggatgctgtcttatcaacccaaacgtttggaatactcaagtcgatggtcaagtcatggtatctcaataaagctcgactgtctggtgacgttcctgtggccgatatgctggtggataacttctggagatggatcagttccagctcgtctgcaatgtttgatcccggcgtgcatcgattccttcatgggttgatgaagaagacatttattcaactcttggccgaatttaaacgactggggtcctctgttgtatatgctgattttaacgagatcatcctgttgacgtcgaaaccatcgacaatcaacaccgttgcatacgcaaagtatcttcttaccgccgccaactctaatgaacttttccgtcatctctccttcgagattgtcaacttttgggagctcttgctctggatggacgtccagaatcatggtggaatacctgttatgcctgaagaatgtttgtcccatacatttgttcattgtggaattttgtctgctgttcgttaatcgtcgttactctcattgtcaaatctatacagctgcacaagagattgaagttggctctcatgtcatcgatctcgattggaacatacgttctttccttcctcccgctctccaacacgatttcgaaatcatagtgagcacgttcatcgatcagatgtatcgagccaaacgacaagcgagcgacaacgaacgtgagcccctgcgagcgattcaaaaccttactcaggctactggacctatcctcgatcctattaaaaccaaggaggttggttatgggaaaaagatcatcagcaagaacttgacacgaaaaatgctaggtctagttcagaacattttgattactcaacgtcaggctgccacccatccagaaattgtcgagaccttaacgtttcctaaacttcccggtgcccatcttaaggtttctaatccggcactggaatttgtcaagaccgtctgccacgtcctcggtttggcgcgcgatctttcgatcgaggtgcaagttcttaagcggaatttgcttgaccttgttggggttcgagagtttgcggatcaagcgatcttcaagaacccatgtgaagttctcaaactaccctcagttatctgcacacactgtcagatatctaaagatctagatctttgtcgagatccagaacgcctacctcagcttgtagagcagagtttggatggtagaatcagctgggggttaatccctccccggaacgcaacatggacttgtccacagggccacgctttagaatctttaacaatcgaagttcgtctggtagactatgttcaacgtctagtcctccaatatcaacttcaggatgtgagtcaatttatcctaccgctctcttccctttcttgttccatggtcacttaattacatccattacacgtctgtccttagctcgtctgcagtaaatgcaagcagatccgagactctaatctgacaacaacatgtcagtgtggatcagcgttcatatcgactgttagtcatgtagagttaggcaagcggctggcgttaattgtttccatcgcggagtatcatcatttaaacatgttaaaggaatacgcgtgagtattcaatgcttcatggactttggatacgcgtcatttgaaacgagtagatacgctaacagccttctcgtcgtatctattttctgaatgcagatcgaatattatagggttttggtagagcatccattcatcatttctagattcgcccactttgtattcatcttcatctccaatctctctttctttcttttgtccgttctataccatcatgttgtaatatgtcattcattctgatcagctggcattgttgagcaaaactacggccggcggaccgaatgccgccagatatatatcagtcaaggcttatcgatgattatatttgacatcaaagtaggcatcatcggcatatacaatgagttcgtgctacatatctcaagtaaagcaggcacattctattcatctacatctatcgtatcattcaagatgtcccttatcaaaggacgggacttgacaagcgcctgtctcccaatcttcattttcttgctagccaaactcttcgaagaactctcttcggccgaagatcccactagacacccttgttcgccttctacatcttcagttcgaattggatgatctgaagacacttctgatgaccactttctcactttctcgatagaagccgcttcctcgcttgcttcatcttccgtttgcagagttgaagtgacaattgaaggttctatcatgatcgaatccgaggaagatgacaagtcgatagtgtcgggattaagagaagcaatccgaccgttgttcttcatgagctgaaggaagcgtgcgagaagagtatcgcacgatagagttgaactagagccgatgatgatcagtttcgacttggcgcgagtgaaggccacattgatacgacgccagtctcggaggagttcaccgacctattcatcaacaatcccatgtttcgaagttatcagcgatgataattatgagatacacatgcacgacagaacaaggagcagaacctaccgagccctgttcattacttcgcaccatgctaacaatcacgcaatctttgtccctgccctgacttttatcagctgtgagaatttcaactccttggtttatattggcttcgagtttctgctgaagcaatttaatttgttgacgatataaagttatcacagctacctgacaaggcatcagcccggcgactacagccccttgaactatctggagcagaaaaaaagttggtgaggtcgtttttgtgcaatagatcgaatcaagataatccatacatactctttgaactagcgtggcttctcctgtattctggactaaatctcctattcttgattctctacatggtatgttgtctgtgtcgataaagacgacttttcgtcttgttcgagatttgaagaagaaagcaaacttaaccttgacaactacgaagggcgcatataagagaccttctcagaacttactctggcttcagtatattcttcaaccaatgctccccctccgttcttgcgcacatgtcctccaatttatcccatgtagggtagttcagtgcctgcttctcgaccatatctgagccacacctgagttttccctcataaatgagttcattcgagagcgacatgatttccttgttcattctgtactgataggacaggtccacagatgctgttggatgcgcttcatgcagtcttcggaagagagatgtttctaaacctccgagacgtgccgatgggtttttgacctacacaatattgacgagactttcatcaaacttcaagaactgtttcaacacctgttgatagagaacagaagaccaaacgtaccaagggaggcagttggaagtgatcgcctactagaataaatgtacgagcgaatcgtagggggcctaggcaaacgggcaacgtgatttgagaggcttcgtcaacgatacagtagtcaaatgtccgctgagcaaacaaaggactgaggagcgtttcgaacaaaaagagaaggtacactataagttcgcgatatggtgcttgttgaaaaggagccaggaagagaaaactgactggtctattgtcaatgctgtggttgctatcacttgaggactcatcagtcgccgttcaaactcttccagattatctgctgggcgctgtgctccgagcgtcagatgagagatgtctgggtgaacctgatgattttagaagtgaaatatgtcaagttatccgtccgggtatatccaaaagtgtagaatcagcgtactttatcaggatttcccaatctcagaatttttacatctgtcttaatcaatttggtcagaattgtatctaccgctgaatgggtatagctagtcaaaaggactgatttccctctcttggataaagccttaatgatctctacaattgtcgtcgtcttgcccgttccaggcatacccaatacgagcgcgtagtctctagcggtgagaaccttggtaagagcctccgtttgatctgtgttcaagatagaaggaatttcctgtgggagaggagcctggctttgatcgaataagggtgatcggagatccacaacaagcgaccgaagttgagctggtgcatcggagtaaaatagctgagccaagttatctcgaattcgacccatccctgtagccaattcgtctttgtcaattcggaaagtcggcttggagatctcggttgtcattgaattgactgttttaacccgacgagtccgagcgagtagcacattcacgtcaagtgtatgatccaatccaactacgatcgagctagagctaagctcaagaataaatcctctcgatagggaaagaagattaggctcaatcgagactgtcaccggatcgccaacagaaagatggccagtcagaagggagctttcaggattatttgtgccgaagagactaggagtagtaggagagagatgtcggatgaaagtatagttgtgtcgatgaaccttggttcggtttgttccaatctccagggtatatgattcaatgcgcattccagcgaaacatctgaaatattggtcagagtgaatatttagagatagttgagctgtcagccaacatcaaagtgaaagagacgatgaagacgaaacgtaccttccctttttttccctctcgacagctgtcatcgtccataactctgcctggaaacgagtcacgtcctgttcctccaagctaatcaattgttcccacgtcttgaaaaactcggtatggttatctgtcaggtgggatgtcttatcaatatagatttcggctactggtgaatcaacgtcgaggacattttcgaccgcctaaatataccatgaccaagcatacagaagagaattaatataagtctgaaacggaacatcaaaggcgcgcaagaaaaaaaatatgagggacggaatactcactcgtcgatacaacatgcatgagtccacctgatagcacttcttgcaactataagagtcctcgatatgaggcggcagaaatctctctgctgcttcaaactttcccgctgcacttatgaccgccgcgtcgtgcttgttcaaatctgttccgacattctcaatctcaactttctcctcggatgccaacgaggtcaattccattggtaattttttaacgatccgagaccgttttttggagaaatatgaagcgatgatattcctcgccatgatgagagagcgaagttcaaatcgagcggcaggaaccttcatgatagtgtccgactgggtgtagtagaggagaccggcaggtatgggggttgctattccaatcaagaagaaaagatgacgaaggtattaattcaaaacggtgcgaaaaagaataggaaattaaagacatgaagaagaagatactgcacaccatatcggtcttccatcaacaacgtatacagcatagtttgcgctcgatgctccatcacgccaaccgctcttcctgtcttgatctcgaaaggcatagtccaactttgactggtcctttccttcttacctgctgagccagatcctaaccctgtatccaataaagttgcctggatggatacgtcaatcttcccctgcaacccccacataggagatctgatatcttcttctatatcatgcagtccagtcaaagccaacctttccttcgaattgtgcaaataagcttcgtcttttggttcgcaccctgcgtctattccaaccatgaatttctcagccagacgactgatactgacggccgccttctccttaacttcataccaaacttcatcccagctcaaaccagcccggtagatctctcctttcatagtttcatctgaaagggtggcttcaacagcttgacgtatattatttgggctgaaagtttcccgagtcggataaggtcttgttgagaagagagactgaaggcttgtgtgctgtatattgccgtacagaagagatttagttgtctttgaactgtgcacgaattgaagaatgagaggtcattgcgttagacgatatgcaagaaccctcaatttatatccgtagagaacatacgatgtttttgtgagtcgttgcaaaacagactttctcgaacaactcaaaccggacgatattgtggtattgggtatcagaagatccggatgatagatcaagaagttttctggaaagtcactcgcaaagatgattttcttaagctcagcagttgaaagcccaggtttgacttcaacggagtcgtcctcgacgaagtccaaagaagaagagatgacgttcacatgttcacctaggttaagacaacaaagggaaataggtcattggtggaagtatttgtcgatagaagataaggacatacgagcgcatattggtaagtctgcaaaatcctctctcagtatcaacaaaagtctttcttcagactgatgaattgaaacgtctacctcctatataccagcaaaaggcagaacaggtcaaagtccatcggaagtcattgagaatatgtcatcaagtttcgtactgactttaatcgaaaaacctctagcatctttcccttcacattttctgacttcaatcacattgcatctgacccatcttttgggtttccaatctggaggaggctctgtcggaggagggtttaaatttattaaagccggtttgtctttcgttcgtcttgtaggggaattatccggactggagctccaatcgtcacttcccaaatcaaactgaatcccatctaagagcgacgaatagtcacctcctgatgtttcaagttgagatcctatcgacggatcttctgctttcgaagaaacacgcaaacctctatgcggcggtcgaactgaagtatcagtgagcgtagaaagagtacgaggggtcgttccagggagagttcgagatactactggttttgaaagtggatggttctgcaatatattcgaggtactttgggtcggacgagtggatgccggagtgtttttgacaggagttgggacattcgatccttcagaatgagtcttccgaagtccagtcgaagccttccggatggaaggactcgattttggtacagcctgtttgacaggttgacgagtccggatagacgcatttgaaggagatgagaatgattcactgaacaaatcgtcctctgtcaaaccagagaggagggtctgcatgaattcagcttcttcctgggcagtctttggcatttggtttataaaatcttgtagaagttgatggtgatgtttgaaagggcggagtcgaacggtctcattcatcaagactaatgacgctcatttaattgcccttgacgcgacgagacgcgtcgaaacgcgtacataaataaattgcttcacgtctcatcttgcatatgatcttgaagctgatctgagccaaaaggatatgttccacgttggtcatggtaatcaaaaaaatcactatatattcactctgtttcgaactacgctcagccatgattcccatcctctttcttctaagcctagatgagtgacgaaaggtagggtgaagaatagtgaatatcaaggcatcggggtagagggatatgagtatcaaggtgcggtaggcaacatcggtcgaagccacttgtcggccgcctcaaattgatcaacgacgtgcttctgaatgtcgacattattaggagtctttcgactttggctcgccgccagcgatcggacagcagcgagaaccttaaataaccagccatgaacataacatgttagacatgtctattcatcatgacaaaagctgagcacaactgattgacagaggttaagaagtaactcacggcatcccagaacctaaatcctctctcgacctctgccctcgcattcttaatgcccacaaagttgtcctcgacaacctccaaggcctctttctttgcctccttagcctcatccgacccttcctctcccgcttgcacggcgttaccgtagattgcaattgtcgcatccaagtataccttaacgaggataccaaaaccagtgttgacatctgtctgaaacggaagagagagcgaaatatcgaggaaatcctctctgactcgtcgagcttcgttcctcagaagcatgtgcaacgacacagcttcgagtaaatgccgaagagagcgagaaagagatttgaggaaggagttgaacacaagtagttctcgggacagcgggccagaccattgttggttctgagcaggcatatagaaaagcgagggttgagtaaagtgataaagccaaatagacgaagccgagtgcaacaactcaccttgaaggtcaacggtacaatgctcaacactcgcatcactagtaacatcgacgccttctccgagtctactccattcaggtcaaccccaatcaatcagaattggcgcaaaagatgagaaatagaagcaaaagatttctagcagctagctcacctgtaccgaaactgggacctccactccacgccttgccactccaaagatctccatgaagaactcccgctcggatgagctccagtgccaagtagagcggctcttgaaatttgtcgttcacccgtgatgctttaattccagtgtgaagtgcctgggctagtgttccatgagtatggttctgattgaagaatctgcgaaacaaatcaagaagtagagtttgaggaaaacagattggcatctagcgagaagtggatgccaaagtaacataccctctgatatccaagaacctccagattacgttggtcacaatctcatcctttttctcgagaggcttgagatgcgcggatccgtctttgctctccttctcgcgatctttatcgtttgaggaaacggcggatgaaggaaccttaggtcttctagttcgagcggcgtattgttcttccgaggttgctcccaagcacaaagcaaaatcaattgtggacgactgtgacacgacgagataaaggtcaagagaggctgttaagtatcaaagtgatagctggacaacataattgaggcagacgggcaaaaaaagatgacccttacattctgtcttcttaactcttcttcgacaatcaaacaaggcacatgccatccaacacatcggtcgataagggctaatgtctgcttatcgttgtgtggcactggtcgaccgactattctagcgttgggaggagagttagaagtcggtgtgttgaaatagtaataggccagctatgaagagaaacagaatatgaggtcaaatgttttattctgatatagaggctgaatcaaatcaaacgtctatctgactcaccactggcttctttccccagaatgttggattcaatacagatgaaacaagtgccagtgccgtacatcttggactagtgtttccctcggtgatgacctcttgaatgaatcttctaaactctgtgctctctccgttatctaacggaggctgttcgacaatcatcccactcgtaagccagccgatcagctgcggcgaaacaaggccacgactgatctggaagtagatttcgtcaggcaatcgattggaaaagacctcgtgtagatcgttcgggatctcgctcgcggaaactatagactggtgtggttgatgttgtgagtgtgaatgatgctgagagtgttgctgaggaagagagagtgggagcggagtgcaccgtccttcttcagccgtgagaacaaagctgaatttgatggcgcaccgggcacggacgaataggtcgggataaccgagttctttgacggccgggtcgttcaaaaaaggagagatcgccgtcactccagatttaaatcctttgacggcatcgaataccgctctccacccaccaggcacaaatggagggaaagatggagtgagttctgaaccagagagaagtgcgatgtcgaggaattgatcttccgataggttaccaaggtctttaaggacttgggctttgttgacaaacttcagcgtcgaagcagacaggtcgagactgagaatgagccggtcgacagtagagttggtatagagaagcgcttcatgggatccatagatagaatgaatatacccgtgttggtgtttctgaaggtagacgagctgttcaagtgaagcaccataatcgacggtttatacatcggacgaaaggtacatcaagagtatcgatctagataaaattaagcggtacgtacttgggcagaggtcagataaggagcaacaatgaattcgaccgagcggtgtctgaagatccgaagcacaagcctaaatagatctctttgctccgtccagacggttccctctagtagcttgaccgtctcgtccaccttgccctcctcatagttctcccaagcttctcgcttgataccattctccctcggagtatctacgccattcttcccaggtggtcgtttggcaagcggcaaacctggacaaacaaagaccggtttgattcttaatttttcgagggatctaagatcagcttcaatgagcgaggtaatggcgagaggttgaccaccggtggtagcaacaagaggctctcgcgttgcaggggaagagaggagatggcgaagatagtgaggaagatcaattcccaaccgagtatcagccagggcggagagtggacaagtttggatgagctttcgctcagtgaggtaggctatttaaagaaacaacaaaaaatgagttagctgctgaaacaacagaagacaaggatagagagaaagatgttcaggatggacctgtcgaaagaaagagaagggacaaataagaaaacgatggatggaaaagacaagtaagaaacagcttgagaatttggacatcatgatggcacagatcaagtc

SEQ ID NO: 2832 - DNA, 38840 bp, Xanthophyllomyces dendrorhous
tcgtagatgataagaaggcatatcagctcaactggaacgacagacataccttcaaagttgcgtatcatcgagaaagccaaacgagggaagggaggggcaggtgaggggatggaaggggtgtagagaaagagaacgagagatgggttcgtgtgggtagatggcaagcaaggatgagcgtgatacaggcggtgtaaccataaagtatctgattttcaaaattatcatatacacttaatcataccgtcgcgtcgcgtcatgcgtcttcttacgcgtccggcctaatgagccaactgcaatcaattgattttccactcctttgaaatttggtcttcaccacacttctgtttcatccttcatcctcatctgatcgatcttgagtttagtacatactatgagtgatctcgagctcacagacgacaaggaagaggctcctttcaacgtagagtaagttctctttatcccgtttcgttcgatcgatcgattgaaatatataacctctgacatattatctctacatgttcatcgttaatcttcatccccccacaatcctccagagacccgatctccaccttgcccttgtccaagaaacgtaagattgaacaggatccagaggttgccgccgctccgcctgggcttgcaaaggcgagattagtcaaccgaaagattgccgctcaaacacaggagacgttcacggatgttctacaacgcttggctgatcaaggaggtggacagggagggggtcagtataatccctcgcactccctgattctgtcgtaggcatggcatcgcacaaaacacggttatctaagctggcataccttatcatcatgtttctcgttgttgtacaggtcctgtcgaaacatctcagtcctgggcccgtccacctgtaccgcctgtagatcctcgcggaaactcaataagtcagctttttcgttcctgttcttcagagcactcgaaacatgttgttgatttcattggtcttcattcatgtcctccttcttcctttctgaccaaaaagtttttcagcagattgatattgaggagcacaacgagcctaatgtgggacccagtctacgaatctttggagtcaacgaggtaagacaattgctttcttgagctttgctgactaaagttggagactgagcgtaaaatattttgtttcatctcgcaactactctagaatggaaactccattctcctccatgtcaaagaatttttgccttatctctatattgctgctcctcgaggatttgagaactcagattgtgcagcattcaccaatgcgatcaacgtcagtccgccttatattgcagctagtctattggcccactgactatcatgactttgttttacgtcgattagaacgtcttgagcggtggatcaggtcaggtagctctgtcgacgaaagtggagatgaaaaagtccctctggggttacaaaggagacgatcgatcaccatttttgaaaatcaccttgagcgatcccaaatttgtctccagacttcgtggtatctttgaaagaggagagtttgcttttcgagaacttctggatggacctttgacatcgtatgagagcaatatttcgtacgaacttcgatttatgattgacaccaaggtaagctagatcatcaatcgtatcggggttcacgagtgtttgctaagatatctggcgctgtttgtcaatggctccttgggaaatagatcacaggaatgaactggttagagattccagcaggcaagtacatcatccgaccagcaggcaggaaagtttcgaaatgtcagattgagatggactgcaagttagtgattcctctgtgtttcgaagcgataccatttttctttctcatctaattctactcttcccttgctacaatcaagatccgatgatctaatctctcatgcgccagagaatgattggtccaaggttgcgcccctccgaattctcagttttgatatcgagtgtgctggtcggaaaggaattttccctgaggccaacattgatcctgttattcaaattgcgaatatggttactcgtcatggtaggtctgatttctgtattttcttcgttcttttatcaatgtttgtttgctttgtactgattgacttatgttcctgttttaccgcatacaggtgaatccaagccttttatacgtaacgtattcacgctgaacacatgcgcccatatcgtcggctctcaggttttagagtttcagaaagaagaagccctccttcaggcctggtcggatttcgttcaggaagtcgacccagatatgattattggatataacacgacgaacttcgattttccgtatctgttggaccgagccaaggcgctcaaagtcggaaaattccctttcctaggaagactgctcagtacgtagtgttcattcttctagataaataagaaataggaaataatagtccaatgcttatatgatcttcgatggctttatgcaacactgatagatatccagacggaagccaaagacacccattttagttccaaagcatacggctcccgagattccaaaatgatcaacttagacggtcgactgcagctcgatttgctggttgtcatgcagcgagactacaaactgaggtcttatacactcaatgcggtctgcgcgcaatttttgggagagcaaaaagaggaagttcattactcaattattactgagttgcagaatgggacagccgaatcgagaagacgtttggcagtttattgtttgaaggttcgtctgagaagattgtctttttttctcctgagtgcgatcacgtttagactctagtacatgcggttgagagttttcgtgcttttcataatatcacatccacaggacgcttatcttcctcagcggctcatggacaagctcatgtgtttcatcaactacactgagatggctcgagtgacaggagtacccttcaactacctcctcgccagaggtcaacaaatcaaagttgtttcgcagctcttcagaaaagcaaacgaagatggatacttggttcctgcgatggccagtcaaggttagtgaatcatcctggcgttatgtctctactccaactgttctatcagcacgttgactaactgagactatcctttctcaaattcgcaggcacggacgagcaatacgaaggtgcgacagtcatcgagcctgaaagaggttattatggtgtcccaatcgcgacgctcgatttcgcttcgctgtatccatcaatcatgatggctcataatctgtgttataccacgcttgtcgatcgaggcacggtagagagactcaaactagtcaaagatgaagactatatcttgacaccgaacaaaggtctgtacgataatcaaggttaggcggcatgcgaagggatctcatcatgacaatgttgacctatttgctcttcatgatctgttcttgtagatctgtttgtgacaacaaagagaagaaagggactcttggcaattgttttggaggatctcctttcagctcgaaagaaggccaaggcggaactgaaggtagagacagatcctttcaaaagagccgtgttggatggtcggcagctagctttgaaggtatgtatcttttcttgtattttttatcttctctgtaagctttcatgttaatgattggatgggtcttcgcatcaactgttgaatttaccaatggctcaatagatcagtgccaattcggtgtatggtttcacgggagcgactgttgggaaattgccatgtttggctatatcatccagtgtgacggcttatggtcgtgacatgattgaaactactaaacaggtgagtcttcactccaactcttgtggttatcacctcacatgttctctcaggtcgggcacggaactgaattgtgtcttacatatgatgactacgtaggttgtcgagcaagagtatagtatggcaaatggacacgaacacgacgcgaaagtgatctatggagatactgattctgtcatggtcaagtttggatgttctgatttggtaactgccatggctttaggtatggctcccttgtttatctcgacatctgccttgtatgaatactgatcaagctgataattcttggcttggaatcgaacaggtgccgaagctgcagaccttgtatctgcaagatttgtcaaaccaatcaagctcgagttcgaaaaagtctactttccgtacttgctcatcaacaaaaagcgatacgcagggctttactggaccaggccagacaagtacgataagatggataccaagggaattgaggtacgcctgcatttctgatcctgcttccaatgataccgccctatactgatgatggtgtcggttcgatctatcttctctctgttcaaacagactgtcagacgagacaattgtcgactggtacaaacagtgatagagacgtgtttgcacaaacttctaatcgaccgggacgtcaaaggtgctgaagagtaagagatctgtcttttgtaaattaacagaagaaagaagcactttctaagtatatgcttgattttcgatacagatacacgaaacaggtcatctcggatttactacaaaacaaggtcgatatgtcgcagctggtgatcactaaagcattggctaaagcaggtatgtctctgtgtcatcttatcagtttgaatatgaagcaagcttatcttttgatgtctgtttcgaccatgatagactacgctgctaaacaagcccacgtcgagcttgccaatagaatgagagctcgagatgctggttcggctccctccttaggagaccgagtagcctatgttatcattaagggtgtcaaaggtgtgtctatatttttctacaaagatccttattttcttccttttgctttttctttctttgattattgatatgtatctctgatgtcctttgttcaaacaacttcatacgggtaggcgcggccgcttatgaaaagtctgaggatccaatatatgttctggaaaacaacatcccgatcgataccaaatattaccttgataaccagctttccaaacctttgatgagaattttcgaacctattctgggcgccaaatccaacactctatgtaagacttcttctcatctttttattctcttcccttttgaccttcagagctgactagaatcgacgattcatggtgaacaataaatttatctttagtggttggagaacataccagaaccatcagtattacgaccccaacaattggaggtttgatgaaatttgcagttcgaacggtaacttgtttaggatgtaaaacacctttgaaaacatcaaataaaggtacagtcattatctctttctctttctcttcatcttccgtttgtatttttttcctctttttttcccctatgaatttgggtcttaactctctggtttacttgaccttgtctctgggtcatttgtagatggagccgtttgcaacaattgccggccgaggattggagaactgtatcaaaaacaagtatgttgatagcgcctctgcttcaatcacatgaattagagaactcttgctaacgacaattcaaacttcctgctgttctccaattgacaatagcttgtgctcacatcggctcaccaagtaaacttcgcgagactctggactcaatgccaacgatgtcaaggttcgctccaccaagacgtcctttgttcgagcaaagattgtccgattttctacatgagaaagaaggcgcagaaggacgtaagtgatgcgatgaatgtgatggataggttcgataaagagacagtttggtagagtgtggcaatgttctggtttcttgattcatagtttgttttttctttacattttgtgtttttccttgtttctctcgtggttattgtttcatatcgtgatatcttctcttgacaattgttgtatcaatacgaccatatccatcgtctgaatctttgcttcttatttcctcgtaatcatgcgccctctaatctctttttcattcactttcaaagaagtcatgttgatatatttccgatctttcaccacttagtgactgtcaaagttcctgttttgaactcggacaaaagcttatcgagcaggagacatatataaacgatttcgcaatttactgagaaaccctatcaatgaagagacaagcaaagaacacagcgatggagaatgaaggaggcaagagagtttcaagagagggactagagaggcaggtcgtacgacaggagatagaatgatcgagggttttatctggagcgcgcccccacctggttcgagctcgatacgaccaaaagacacacgagaagacaagaagcacaattaattcatactaaggatttctccatgttcgttatgatcggcttaacccttgagtttaccccaaacaacgatgatgatcaggaagacttttgaaaggaaggaaacaagggtcagccttcgaatgattggatagatagttgacctcagaacgcggagaaaaggtagagtaaagataacgtaccgaggatagcgatgatgccgtatgttaaaaaatgttgttgatacatcctatcgtagtgtttaacaggagtcgttattaacgtcattgtggccaggaagtatcatgtcggatggtatatgtgtatagacagataacgttggatcgaagcagaaagaggacgagagaaaaggatagtaaaattcaagagaagggaagccattttcgtcttaaaacagttcagtttagagtccaaagatcagattatatggagaaaaatgaatgcgaagaaaaagagctgacctgaagatcattttcttcaacgtgccactcgctcgatcgattgatgtatctgcgctggccaactatgggacccatcacctgtgtcaaacaagagatctcgcgtagaagattcagaaacaaatgaagttgatcactcaccacatccctggaatgttcaatctgctccctctgacctctcaagttcctcaagatatccgctccaacgctctccgtctccaaagccagtcgatgagattcttctaatcgtcttgaacctgcaatacatcccaaattgacccaatccaatggttcctgttagggtaatgatacccaggcacatacagaaagatgagaaagacaaaccgtcagccaatctttcggttccttgtaacaatcgcgtccgctgtgagtagtctgtcggtgaatcggaatacggatcatctcgtaacgaagcatcggtgttgcccagcaggtcggatctgagaacagcctgtttcgcgtctctctagacccatccatagccgatgttgaaatgaaacttagagaggtaagaaatcaagagtaagaaaggtaagacggatgtgagcgagatgacgaacgaattgttttctgagcttctctagctgcgctttgtaggacttgaaattgagagtgtatttagaccggatggattgaggaatagatggcagctcgacttccatttgagatatctatcaatatagaaggccacgaaagcgttagccagccagaaagatacattctggatcttcgatataagtttccattcgacgcgtttctctctcctacttggtcttgtaaagaaaacgatggtctgggaagagtcgacaaagtgaacgaacaatttcttctccttcttctaactcggcctcagaccttctgattaaagctttcaaaggttcgcctgtcaatcctttcgactccgtctcgagctggaaggtcagcttgttgacgagttgttgaaaatcgtgcgagtaggactcgaagagggacgctggtgattggctatgtgtaatccatagaggtttataatcactctggtaagttagatagtcatactcaatgcagagatcgaattttggaagtaacagactgactccatagtatgagcagacaccggtaaaggttggtggttagagaatgtcctcatcaggataccagcgagatgggagacgaacggatggctgtccaggacgtacagtcgagtggcaactttcaatcacgtgactatactgtctggaacttgccgttttgtctgccgtacccatgaatgttgtctacttgtatcagcgtatcatcagaataaggtaagaaaagagacattgtcttttggtagatcacgagatagaggaagaactcctcctcccttcctttttgcgttcaagaacgaagaaataaagtaggaaaaaaaggatgccgatgaagaaagcaagaagaagaaaccaaatcaaaagaaggaaggacaagatgtgcagtggggaagaacggattgaatggaatcgatgggagaatggagaatggaaggctgaaagacgaaagtagaagagaagaaggggaacagaattttcgtttagtaaccacctcggctggagaatccaccccttccaccgctgccacctcgagaagagaatccgcctcgacctccccggtcgcctccaccaaatcctccacgaccccttggtgctcctccgcctcgagatgagaatcctcctcgggcgcctcctcgaggcgctccgaagcctcctcggccaccagctcctcctcgaccaccaggggctcctcgacctcctcgagctcctcctcggcctcctctcttctcaactgtggttcattgagatcaaattgccaaaagcgagcagaaatgcaagcatatcagacatatgtactatcaacaaaagcggctctaccatccatgtttccaaacactaacctttaccgccagcagccttgggttttggcaagaatctttcgataggcaacagcttatctccaccgatgtaaaccttgtcatccttcttgaaactcgaagcaaccataccctcgttcatcttgatcgtgaagaagatctcgttgatcggtccgagaatctcgtcgaccttaccaatctgagtcttgttctcgaggtagataggggcgttgaagtacgggactttggtgggcaagaggtttgagcaaagcatctcagactcgacagagtgcatgaaaagtccaacctctgtatcgtgaacaaagtaaacaattggatgtagcagttgggtagacagtaggcgatgaagagattatgcaaaaacaaattcgggcaatcaagagacacagttcagtaaagctcatttctgaaacagaatcgaggaaacataccctggacgacatcaggagggccgtaggactgctggaaaccacctcgtcctccacctcgacctgtgaattttggcagatacaaattgggacagaatacatggaaaaaatcgcgtcatcagtttaaaggtcctagcagccgatgcaactatctattgcacatatgagagcgactcgataggcaagaagggaatatcctcggaagccaagtgagagcctgaaggctgagaagaagaacaagcctacttaccacctcgtcccccaaacccaccacctcgtcctccgcgatctcctccacctcgtcctccaaatccgccgcgtccgctcattttattttggggtttgtagaaaggaaaggggagtagaacaggccaattttcggagctagtttttgaagaaggggtcgctaataaaaggaaaagggtatagaaatccgaagcaaggaatgattagaaggcggtaaaagcgacaaaagaaggtaaattgagcagcaatttcagttaaatcggaccctaagaagagataacacagtcaagaaaatctcgtcttacgtttgaaagggtgaagaccgacgaccaagagtgatggatgaagagggaagaggaagagaaagaataaactgtgagaaagaggcgaaaggagaaaacgactgaaagaatttttgggcgactgcgcgaaatttccgcttttttctttcctgcctggcttggtcgactctttgcactcacaccttctcttgaaatccatcggccatcactacaatacatacactggccagcatcatagtcttacaggcacaccatgctctctcttctctcttctctcagatctctctcgctccgaggttcaccttccagcctttctgtcgccgctccagcaccaataggtccttccatccgatcggtctcggttggatcgttaaagccttctcgaggatctcgcaagagggtacgtgtcttgtcattatgctttttctcgttctgtaagctatgtgtttcaaatacatataacctccattctgtttatgtttatttcgcacttagaaaatccgatacggacgaggagaaggtcaagggacaggagaaggaaaaggacgaggtaacaacggtacaggtgcccgagttggaaagaagtattcaaggggcttcgagggtggacagacacctttgacaaaattatacccgaaatggggtttcttcaacgtgttcgtgatactgtctctgttttttgcatatcctgtttttcgtgaatctcttttcttgtatcattgttactcacatagacttgcacaccttatatcggatcgacgtcttttcattcttttgtcaacagtggccgaaagttctaccagcccgtctcgctaggaacacttcaggagtacattgaccttcgaagattagatccgacagagacaattacggttgagcatatctacaagagcaacctctgtcacgggttcaagcaggccaacggtttcaagcttttggcatcaggggtttgtaccttctctctttcgcctgtgtttctcgtgcggttacttgagccactaaactttctcgctccttctctcacctcgcatctcttctactgatccgcctaagtttgaacaactcaagcaacctatccacatcagacctcatcgagcttctatcgctgctatcaaagcaatcgaagccaccggtggatctgtcaccaccgtctaccacaaccgactttccttcaggcaggccatccaccctgaaaagttcagaggccacagaaggattcaagaggctttaccgatgaagaagcgagatatcttgtactacacgaactggttcgtcttttgatcgttttgaaccgcctctttgtcaaattcgcgccgaaaggctaatctatcttatcatcaaatcatgaaacccatattttaaaaacagggagaagcgaggttacctcgcaaagaaaccggaagaagcggaaaaagagtcggacgcacccaaggagtttgtctcacctgctcctaagcagtattaaagttagagagcaggagggactttctccttgcaaaatacatgatatatttttaagcaacggctgggagtaaaacgtattcgaggcgtcgaagcgcgaaacaataagagcccatctcaagacgagaaacacctagtttggctgtccattaggtcgaacaaaatctatcatatgaggagagaaacagaagctgaaatgaaatagatgatgaatgatgaagagtcatgagccacgtgatgtatgacacagctttctcttgagattttctaaagtccatccctcaaacaccatccttcgcatccttccggccagccatccaaccatcccgaccgcctcaaacgcttcaaccaacaagtgcttttctcactctttaatatagattgcgcaagctagaatggcacgaacaaaaactcagaaaagagcagacgcccgaccggcagctgccacaacaactatcccctcaacttccaccgctgccgttccgataccggttgctggacagcagctcgatcagaacgttgattcgttactccgtttgtccttcaatagcagtctctgagtgaccatccaaatttcactaaatcccaaacaatatctcttcttcactgaacttagttaaatcacacacattactcgctcagcaaaactatgaactcgctcagcgattcttgacccgattgctcgcgttggagccttcaaacgcagaggctagagagttaataggtgtatgtgagcttgaactaggaaatgcggaagcagctcgagatgttagttctcttttccttctgtttcgttaccttgacaagtcccccggtgttaggagaaaatgttgaaacaatattcatttcttctgctgaatttcgacgctgtagcactttctcgtatcacttcaagcacctcttcaaacttcatctgcgccatatttatacctcgctcagctagcttcctctcctcaggaagcactcaatcactatgaagctgcggtcaagattctagatcaacagcttaccgagctcgttcagtcgaaacagactggagtggaggacacgaaagagttagaggtagctgaaggaacgatgaggaagcagatcagtacggccttagttggaatgaccgagatttaccttacagatctttggtgaggtcctacttatcatcatcctcatctttataaccaacaagtgaagagtgctgaacctcgtcacgttatacttcaaagctttgagcctctggcagaggagaaatgtaacttgctcctgcagaaggcgctctctgttctcccaacggatcccgaagcatggatttgcttggcaagtgtgcgcacgtctcaacaacgacctgaggaggccattgaatgtattgagaagggctgggcggaatggagagatcgagaactaggttcgtcaggctttcctcgctcgatctctcacctctctacagttctacgtatctaaacttgattttgcttcaggtgaccctctcataccttctattcagacccgactttctcttgctcggttgttgctagaatatcatcgattcagtgaagcaactactctacttcgaggggttctagacgaagatgatgaggatgttgaagcggcttaccttgaaggttgggcctggttcttaaggggagaacagatcgaagatacagaagaggaggtcgtaggaaaaggtaaaggaaaggaggttggtagtgaaggggacgaggacgagttaagtaaggtcgactgttgggaggaggctagggagatcttgagcgtttgccaagttgtttgtgtcatccttctcttcttggacttttgcttcgtccttcttgtggcatgaaggattacacgctgataccttcggtcttttcttaccctctctcccgtcatacgaaaaacagcttcatcaatcccaaaattatcctcagattgaaattcttgcgcacgtgaatgaaatgctcgctgcccttgacaaggcaggtattcgacccgcccaaggcgttgtcgatgaaggagacatggaagccatcgatggagagggtcaagattgggaggatgatgacgatgacgaggatgaggatatggcatgaatcgttgctttccttgtttccttgtgtcatttctagttcacgttcgaagaatagataagcagaatgatatacagttgaaacggcggaacagcggagtgaaagggtgggacatgagattgcctaagaacctcaagagagcgataggttcaaagcaagtcggaagtgtacaagtaagtgcagtcagatgttggtccaatatagaggatgtctttttcatgatgagcctaacaatcttcgatgcatagattgagatgcaatcgagttcaacaggaacgcttgactgccaaaacgtaatagccaggtcgagacggactaacctgtacatccttaagacttcctcttcatatccatttgatttgtcactcaattcttcagcctcgcttagggcgctagttcaagattgagaagatgacttgcaagtttttacactcatatcttctatgaagctctgcttcacttaatcaggagcgttttttctgactttaaaccccaagataggaacggaaccaaaggtctcccgaatatggacctcagttgtggtatacaagggttgggcttcgataaatcagatcaaatctgccagtgaccaaagaccaaatgataaccagacttttcatatgcagcaagcctcaactgagcgaatatccgactctctctacacctagctgagcttgcttacttccatcgagcgtccaacctaagggacctaaatcgcagtcggcacagatcaaatatttgagcttctttgcccctgagccaagagccttttgaacggcttctgaacgagcaatcgaatcaggaatattccttgagaacccggcgttctcgaatccgaaaggagagttatcgatctcccaatatgctgtctgagaggtatgggacgatgaggaaagaagcggaggcggtaagaacggtccagactcatcgtactaagagcgattgagtatatggcacccgaaagatcaagattcagcgtagtcacacatagtccgaaacatgacaatggacgttgttgatgacttaccagaccagcctgtccaatcacccacttcgcgtccccttttcttaataacatacacccacaaccatctctcggacagtagatggcgaatagattggtcctggtcgaggggtcaactagactctcttctgaagaaccagcctgattgaatgaacggacacccggacgagcttttgaagaagatgcggcaagaagagcagaaatagcttccggagggatagaatcggtcattctagctgatgtacagctgggtcctgctaatcctgatatctgcgttgatggtacacttctctatatccttaagcagctgtctagggttcgagcttcaaggaaacatgaatttcaagggtttcaaaaaatgacatgattacgtcatatcatcattcacgtgaaacttacgtaatcatcttcaagccatcatctcgatacgcccgtccatcacattcatccactttgttgatgctctctcttttatagctatccagacatctcagaataaaaacatattttcgacaagaagatgggagttttcactcatctctttgcctttattctcggtggattgacgttgatcccattgctcatttgtacgctttaacttctctttctggtgccagttgttgtcagttggctgaaataaacctgtccctcttggtcttaaagtcgggatattcgtatggacctcagttcccgtcggagatcctcatccttccaaaatcataaagaacgctattgagaaagaagccttgttatctggtcataccaccaaaccaggagcgatatcaacatccaaggacattcctgcctctggggtattcgtcaaatcatcctctcggctctcaaactggctgactgtccgaagatctttctctccctatccctctggcgcttcagagaaccccaaaccggcgaaagaaacgtcgtcggacaactcatactccgctctccttctcagaactgtaaggtctagcgcatctcaggcttcaaatacagcgcccgtaacgggctcgacatcatcgacaccctccaattcctcatccacaggtggctctacctctgccagtgtctcgcaatacaagcctccttccgactttaaattctgctgtctgaaaggcactacgctttttctttacgaggaccaagatcaaagcgagtgctatgctgttttaaatctccagcacctcaaggtgacgatatttcctgatgatctgaaggacgcagagatgtttgcaaaacggaattgtatcaagctatcatcattaaatgaggaggagaaattggacagagcaggagcgggcgagaagaagggtagcagctccagtctgccatatatatctccttggtacatatttgtcaaagaaagcagtctgatggaagagtaggtacctcttatgttgactttacaacagtgctgcgagagataatcaaactaaacagaaatggtcttgtatctctgcagttggtatctagccttgaaacacgcgtcatcaagaaatcctcaggtatcggtactcgaccaattatcaccggtattctctcaaaaggtatccctataaattccttcggatacgccttgcgctcgactcgaggttgacctttttccttgcacttgtggtggatgatgccttatcaggatatggcttatttgatcgaaaaacttgacacagatccggatcctatccctatgcgttggctaaacggaatgtttggacggttcttcctgggcattcatagaactgctctcttagaggatgtaaggttttctgattaggccttcgaccatgggatccattctcacgaactctttctattctgctatgcttggttctatcgaggacgcataggtaataatatctaaaatacataagaagttgggtagacttcaattaccctcatttttgtctccactcaaggtcagctccgtcgaaatcaagtcaccgcctccgacgttctcaaagccaatgctgcgagacctcaccaaagagggagaagctagtatggaagtagccgtgtgttggatgggagaggtcagaatcaaggttggtacagaggtcagcctgacattggtcggcagggtacttcgagtgagcgtcgttttagacctcgtgatcaaggagatagtaagcactattcatgcttgtggtttagttttgagttcaagttatgtgagaaggctgtattgagcatctgaaacctccgcggaatgccttcaaaattaccaggagggaaacctgttacttatgattaaaagtccacccagttcaagagtttggtatgggtttaccaaagaaccaaagatggttatcgtatgtattcatcactattgaatctatctcttgagtttgctgtgtctgattatccttctgctttctctcctctggatgatgtctaaccagaatgttgagccggttgttagctcgactcatgtatgtcctcggatccaaatacaacttcatgctagtcatcctcggaaatagatgatcaaacactgacgagattgttaatgataacccgctggtgatcatagatcaaatggagcatgattctcaaacctatcgagaagcagatccgggaaggtgtaagcgagcgcctaaacgtgcacaggtcgtaacgtatgaaactacgactgaccgggccgtcttctttgctctgttctggaacggtctacagattattgagtctgtcgtattgcccaacatgtgagtttgttaaaaagttacatattttcatgtatatcaggtgctgactatgtttatctttgaaaacagggacgatatcaactggttggttccacttctaacgcccgtgtgttcaatacatatgcttactaaatggacatcactgttctattcaggtttgactcgtccgcataccccaacaaccgaggagctgtatttgctgaagccgctcgcaatgttgaagatccggctctgccagcccctagccctatcgagaccactactgatgaagctaccctgatcgacaccaagaacactgatgcaatgcctggagggcttagaaaacgacctgcatctgtgatttccggagaattccccgttgaggaggaagctgacagtggaggctcaacacctgtcaccccctccgatggaagcttgcacagaagtgcgtcaacttctatcaaacggaattggtttggaaacaagacgaacggatctggagattcgaataaaaagccagtggctgttctagatgaaggtactgtaaaagctgttccgatatcttcgtcgtctagtatcatcttggatgagttctaccaaccttcctccgagacttcaacgatccctctcaaagctagctctgcttcaacagggagactgagcaccgagtccttacccgctcaggtaggttccactcgggctcccatcttcaatcctgctttacctcaatctgaacctgtaagaccaaggacagcgaccctacccatggaagatcgaacgctaaagcaaccacatgccagtaaaccagttaccgtgccagaatcaaccagtccggctcgctcaaccacctccttggtctcgaactggaaagcccgagccaacaatgtcgacaagcaggcgatttcaacatcattgaatcaagcaaaggacgtagccaagagatggggcgctaattgggcggccaaacggaaggtggttgcttcgactgggtcaaatgaagcggagggattgagaggggctcaaccggtagcgggaagaggccatcagtcatccctttcgttaggacaaatgcctacggatttgttcaataggttttcaagtagtaaagaggataagttggagagcgcgagtagtagccggacggatctatcccgaagttatcctcctataaatccggctcctagaaatttcgatgaagattcagacaaatcagttcctcccacggccagacatgttgcaccttcctcggcggatagtatcgtgtccaacagcctgcctgtcccaccccaactaccgaaacgagatcgatcaccttctttgagatcaaaacccacctctccacacgctcaggacccgaagaagaaaagtttgatggcccttccgagcggcgctcaggctaccgtcaagcttcaaactgattctgctcctgctggggcccacacgactgtttacgaggagggagttaatcgacgagctgctcccgttcgaacacagatgtcggctagcccgatgatgaccattccgaggatcccgctcagtcgaaaagcagatgtcatggcattcggatcgacagatgaaaataaagaaccgattggccagaaggataagctcagttcgatttacaagctctttcctaacgggaacgttgggtcaggagtatcccctctatcgactgacgaaaccgcggatcgatcctcgatagaggaatcgtcgaatatcctaacggatgcttctgcccaagcaatgacagatgatagacctcctttggtcgcatctgaagttgaatccacgaattctgcgattctcgccagtctcgaagcttcacctcttgcagcaaacactgtgatatcccctgcggttcaattacctatcccaactcgttctcgcacattctcatccgattcaattacatcttcactttccagtagcctgaaagcatcactaccaccttcagcaggtcctgtcgcttctgctggtcgaagaagagcgccttccgtgtctagcatcagtagttctacgccttcctctcctattgctctctctggaacaccgtccttctcattttcaacaaggacggcggcgacaataacagatgatctccagacgagagcacaatccgtttcgtcgggctctagtctggaatctggatctcagctcagtggatcgttgtcgaaagcagaagagacattatgggggatagctagacgagatcgagaaagaggcgttgctcaagtgatggaccccatcagtaatgaaacgacatctggtaaagtaatctacagcagaagcaccagtattcttgcagagatatcggatgattcaacacatacatccactcgtatctcagccgcttctgcttcacctagtcaattggatcgatctcttcttcctctgcgtgatcagagtgatcgaatgcctactccagatctatcatcacgacaacaatcgcagttttctaccgtttcatctactatgccttcagaccagctgtcgattgtgcaggatggggagagggaatctctcgaactgcgaccaggtttaggaaccagatctagatcagtctcggagacaaatagtcttggtgggatgtttaggtttgacgagcactgagagattggatacaatgtgtgagggagagaaagaaggccggacctttatctgaatcatgggatctcttctcttttctctatataactaaacttcatcgatatacaccatgattctgatccctttttccttttcttttgtcggttgaagtttttgtttgtttatttaatattgggcttgagtccttcgcgtcaaaggaggccattctgaaaccatcttcctagcttataaaacacgttgtattgtagcttgctttctctcctggtacagacatttggtcgcatcatcaactgcatgcatgactgatgcgccgtactcacttaagaaaaaaaaaacatagaatttgcgtattgaatacagtagaggtaaaatttcgactctcgctcaaacatcatcagtgatggtaaggaggagcctcgggtttgacaatctcccatgctttgtcgactctgtatgtgtaatgagatgggggacgtttccaaccagtccagagagttctctatcagaactaaattcgaaaaaggagaaagatgcgaaggaaaaataagagaagaggatacgaacgcatcaacgacatcctgaggtaaaggtcctttctcaaagtccttcaagttctggtctatatgtctggtcgagctagcgccaatgatgatagcatcttgatacttcggatcgagcgccgaatgatggttactccatctgatagcgatttctgctgtcgttaaattattcttctttgcggtctatcatgtagatttgttccaaggtatgagagtgaatgtgcaatatcagcgagaggaaacgtcaaacatgatcaaagataagtttattgaaacaattcgtacggagttgatcacgtccatggcctggaagtaaacgtccttccagtacctagctcgatacattgatccttgtctgtgaaaaattcaaacaaaagattataggggcgcagattgaataaattggatgaccttgggtggaaacaacgcagagaaggcaaccgtggacatacgatcggttaggatcgaaccgggatccttcctcgactttagattctttgttgaacccaccggcaaagaaccctcctccgaggctgagaaaaatcaaggaagagtgacggatcgttaagttttcgacggtcaagcaaaaagaacgatggacaagacatagtgacgaacgggttgtaggcctagagaaagatccagagcccacggagaagaccatcgtttgagtaagagaagataagtctagtgtctagttggataagctagatcgacaaatttatatgtaatccacttacatagaaggagataccgttctctcgaagcacagggaaaaggtctttttcggcggatcgtgtgatagcattgaagattccttggtacacagtaggctgaacatagttgttctttttacagatttcaacgatctgcttgacctcatcggctgtaaaattgctctgtattgatggagagatatgttcacttcatctcagcgaacaaagtctttgtgcaggtcttgtcgagaaagctgataaatgcagacgaaacaagacgtacaaggccaaaccgggcaaacttgccagctttgtactcttcatcaattcctgccagagtcttcaagcccaaacaaacgcgtcaagatatggttgcgtatactcccaaatcgactggctaacgtacattctcaaagggggtctcccgatcaggcgcatggaggtaatagatgtctactttggaggtctccaaagactctagagaatcatttagtgctcgatggctgataccacgtattcatcaagctgattatcagtctctttcatgctaacatgatagatatcgattaaatgaatggacgaacatgtcagcagctgaatgagtatattgaccttggctcaaaaacccttttcctcgcgcggaagggtaaactttggtcgagataacgaagccctgactactcgaagttagttgttgagatgagccgatattacgtctgattagccttctgcaagacttactcctctgccttcatctgcgcaagcttcttttcagatcctccaaatccgtacactattcatatacatcaaccgaggccggtttgaatctggtggtcagttagatcttgaaaagatgactgtctggatgcgcatctccataggcgactcactcctagcggtgtcaagctcgacatgtccgtatgacttgaagatatctagaatctcttgagccccttctttagtaaatacacgagcttgctccgcgccttcttctccgaaggtcatgcactatggaaatatgcatgttgagccggtcaataacagtgttggaagggtaaggaggaaggacgcagtactcacgccgaatacgactttgacgttagatttggacatgataatatctccagaatagatatgtaatgtgtttgaaggtaaagaggaacagagacacttgaattggcaccaaaagtcatcggcatatatatagtgatgaagctaaggtggaggtcgacgtcgatgtggaatgtgatgacataaaatggagggaaattgtggaggcttactctcctggatccattgtacccgttctatgtctacagttgaaccagccggttaatttgtaagacttgcgagatcatacataccggtagatcatatacagaagaacgctctaaggggctgctacattcaatggttgttcttgaagatacatgtcgtgatccgattatttaggttcttctacagagtgaaggattaaagactattctacagatgaaacgtatctataccaccatcttcttgcttttctcaatcggtcttctatactctttctatatactatctctccctcagactatcaccatgtctcctttgacgttccaaaccctggctcctaccgctaaacatacagcgaccataatcttttctcatggactaggtgatcaaggagcgtcctggttacctatggctcggatgctcgccccggcgttaccgtacgtcaaatgggtctttcccaacgctccagagattccgatcactttgaataatggacaccgaatgccaggctggtttgacctttcctctttggagaaactgggtgacccgagggaggaggacgagaaaggcttggtagatagtgcggatgcgattcaggcgatcatcagtagagaaggattagccgttggagataacaggatcgttgtcggtgggttcagtcagggatgcgttgtcagtatcctcgctggtctgacaaagggtactcaaggaaaggaaaaggaggtccagagagctctcgctggtgtcgtaggtaggtcttttgtaccatgtttctctccttcctcaagggaatgaaactgatcaaagtatcggtcggatcttctggcttttcttcaatcaaggactctctggatggttgccactcagggatacactgaaagaaagattccatgctgaagcaaagaacctcccaatcttttggggacatggaacggctgaccaagttgtcggctacaaatgtaagatccaagatctcttttctgaacgctttgccagccatctaatgtacacttgaacgaaaccctaccgaaacgaaacgtggtcaatatagacggtcagcaatccgtggaaattctcatctcacagtacggcctcgagaaatcctcaggccaagctggaaaaggtattcagttcgagagttacccaggattaggacacggaagttctcctcaggagcttaaagacctttcggcttggtgagtactatcccctttccactacgtgagatttcttttctttcctctcatttcctgatgcctctcctctctgtttcgcacataggctccagagagtgatccctacgatttagacaggccattagacatcacacaatatatacattattctaccggtccttcttgtgtattctctatgaagacaacaagaatgatgacgatagatatttcgagccaaagaaatcatggatgaaagcccctagtcttgatcgctatgaaaaggatatcgagacatagcaagtagacctgagagtatatcaaccttctggttcgacacctcatcccatcaatctctagtctggagagtttgagcgcccatctttcgagataattgatcgacctcttcaacagcagatatatttggcttggtagagtcgaggttccactcttttcgaagttgggaattgcgtaaattcaacagttcgtctaattccgtctgttcgtgagacaccgaaggtcgaaaagaaataacaagggagggcgccttaagtttgtttctttgcctttatagccaagagcagagaaggaggggaaggaaaggttccgagagagagaaaatgagaacgaacctcccatccgagttctttagccaatgatctacaacccgaatcacaatctcctttaaccaaaacgtccctccctcctttttctacaggccttttaaatccaaacccttcgtctcctgggaatcgagcttggcatacgatctcattgttgatgagcattcggggtgttgtcggatgaactctgtcgacaagtgaggcaaatggctgaagttcgtgtacgtgcgtgtgtgtatataaaaaaggtagaaatgatacgtcagttattgttcctttctagatgaggaggaaaggagagtcaaacgaacgtgtactttgagagaagttcccatgacgatcaatagatcacattcagacatatcctgcttacgaaccaaacccaacaaatttcagatgttcagaaagatcacatttagtcgatcaacatagaaaacacgatagatgaatacatactctgatgcagtcaaagaaccgatcgggtaaactctatactcgagaaaaatgagtaaagatgagaagatcagcacagtccgtcgttcatggttaaacatcagattgaaactcaatgttagaagagacactcctgaaaacaagacgaacttctccgtagaatgtgatgtccggtttgataaggccgccgcatgatttacagtatggtattcgactggaccgaacgtgttgctcgatcgtcatgctatctactggtttatgacaactgagatcatcaaagagcgtgtatgagatttttaatgagtcggctcgtccgaaaggtcgattaaacctgaagaataaaaggcagggcaatctaggaaagaaagaggctcactcaatacaacttgaagtggcaaacgatccatgagcttcgacaatgaatgaagaatctatcccactaattctttcgagcgtgtcgatattctgtgtaaacactcgacggaggtgaccatgctaaatgatacccgaacgaacaggagagagaaaagaatacatagacggtcaaatcagaagcgctttctctctacataattcgaaagggatggtcacagaccttttgaaggagtcgtatgaaaaagtgcgtcaacgtaggtaggaattttcctgttaactcaagcccgcagcccattcaagaaattagaagaatcagatcccaagagtcgtattcgatagaaatttgcgcgcaaagaggtcttacctgggtagagttctttggccagttcgtagaatggagccggattggatctaaagaactatttcacagaaaaatacaaagcgatcccaaaaaggccagtgatttcatcaatatgccgaaagatactagcccaaaaaaccgagttgaggatgaagaacaagagtgaagataggctcacattgagttcgaatattgactccggttcaggtagtttatacttttcaaggttatgaaagagcccggtatcgggcgatctgaagtcaggtatcccagcgttcgtcgagcatccagctcctgtcatgaccaccacgttttttgctgttgatggatagaacaagaaccaagataaagatcaatgcttgaatgggagaacagaatcataggaaataaaacaaaactaacctttggcgatgagtcgagcaaaccctttcaacgaccgttgatcatctgaaagaaatacgacaggcgaccgctcttcgagctaggtttgaaaatcgagaggtagagagacaggagggatgcgttcttgatcaaatctgatgtatcgggcaaggatgattttcgtggtcttctttctcgtgactagaagtccgggtgggaggcgagaaaggaaggaaagaagaaaactcttacctcggaaagacagccattcgtctcattaatttctctgtcaccattatcatcttcttcgtcgtcgtcgtcgtcgtcgtcttcttcatcgcttctatctttacctacttcctcgcaactctcactggccttatccttctctttgatccgctcctcctttatggtcgcaatctgatcggccgcggtcgtatgatatgtatccgggacagacggacttgtcgaatctatccggttaacatcatttcgaattcatagaaagcagaagagaaaatggagaactaggatcaacatttggcccgcaagaaagtttcgtcttggagcaaagaaagagatagcaaaagaaaatttggccgaccaaaaaaccccgtaggctcatccttattcaaagaaggcgaaggggcaggactgataaatgctcctaactgctgattcaagaagctttcgatccggtcgacatatgtcgccggtagttcgtgttgcttgacaaaccgagaagctgccattcgtgcaggctctaaatgtcagaggaacaggacagaggagaagtgtgctgaattagctcggttcttgagttgaaccggatgatcaaaagagataagaattgaaaagaccgaccactgggtgtgaactcaagttccaagtttggttgatcatcagccacatcgaccttcaagctgaattttgtagctaatctccaagcgaaatcgagcggcccccaaacggtcaaaatcaatcagtctagattcttgaaatatctcaccgccgggtagatgattcttatttctttggttggcacagaagaagagaaaatgaaccccacgatttagtttcgaactagtctctctcatgggactcttcacggcatctatcacggcctcctcatacgcctatcacaagaaagttgcaaacacccggtgacacatcgtcaatccactatcacttgatttacgtacattccacgcgaaaatgagacgtatacttcactcacagctaagagttcaggatcggcttgtctggctggatctctagaaaaaatccgagcggcataatctgacgcgccggtgaggatgtctccattaggtagactggcgacggaccaaacggagatggccgggtgcaggatggtttgaattggttttccttctgttgaagaaaaagggtaggatggggatgttaaaacagaagagtcagataggctgagtgagactcgtttcaaagacatagtcaaccgggaaggaaatacagaggaaactccaggaacgaacctctccaaatccggacacagtgatcttctccgcttgaggcaagatctccgttagggagcaagcagaccgagtagacaaacgagatatgacctgtgaggatggctactagttcaccggagaacgcccagatgtggatatttccatcgttactgcagctcgcaaactcgttatcaggaaggattgttaaacctcgcacgcaatcggtgctgccttagacatggagaggaaaaagaagaaaagaacatcagaatcacgcttcctcattcagaacattgagtgcgcacaggtcacctttaaaagttcgaatgggccggcccgatgagtcccaatggatgattagcttgtctgctccagcagttaggaaggatctctcgttttcttttctcccacaatgtttcccttctacgactagacctgcccagacggcctccttgtgtccctcgagacagaggatctctttccaggttgatgtactccagacccgggctgtgcaatcccaactggtcgagatcaacagttgatcttcttccggaacctggccggttgtgcagttcaaccctcgttcctggtctgtttgctcttcgtatgatgacggtgatggtttggtcaaatctccaggtccgcgcgttttgtcatcctgaccgggtcggtaattccacaaagggaagccactaagcgtcgatttggaagaagatttctctgagatgagctctttggaggttgggcgggaacgattaggagaagaggtagtggctgtggtagaattcggcgccttagatctttcgattggatcacatgccaccgacacggctgtctttgcccacgatggagccgaaattgacagactgcatacattatgggaatggcctaaaggagaacaaacgcaagcgagtaggaaaagagagaggagagcgggaaagacagataaaggcagtgtagtggtttgcgagttagcggcagatgcatgcccaaattagcaaagactttgaacctgggctcaccgacaagtgtgtgaagaggttgttcgcttggtctaatggcatctcttcctggggtgaaaccctcttcgccgtcgacgctagatgcccaacttcctttggtcggtgcctcatgaatcaagattagcgatgagagcgatccggaagcgaccaggccttgagtgtattacaagccaaatgaagcacgatcatgggatgagcaagcgcggatatcaacaggaagagtatgagagtgtgaggacggaacgacctaccgttaggatgatttgatgtgggatgtatatatgcgaccgaattcacgtaagacccgtgaccgagtccaactccactgagtttatactagagatggccagagagggtcgatgccgacgacaacggcgttcagtgaacaaggcttagctaaaagactgcttgaccaagagactaacctccctatctgtagttgaagatttaccccagaagcagacggcttcgtctctacttgctgtaaggagaagatcatctctaggcgctgctactgctttgacatcgctctcgtgagcctgattcgttgtgaaatttcattcaaaggcgatgaagacttgagtatgatcaatcgtgactgccaccatccgagcgaggagatcttgggagatggacctacctcgagcgtggtagaaaacttgaaggatgcagtcactgaagaaactaaattcacttgcgggctcatcaggatgagtgtgagtatacgtaggggtagaagtggaaaagaaagtgagagttaaaatcaagatattggaccaaacgtaaggccaagtgtaggtaaacgcgatagatatttttgggtgatagaacacgcatcatttccggctcaaccaccggcgtttcccttctctagtcagggttacaatggttagggttaatataaaacataaactaaatatgtgacattgctggttacaatatatgccacgttgtcaggcaaaaaacaaggctctagttacactctcgcttacgtcaatcggctgtcgatcgaaaggctgactaacgatcggagggatcagtagaaggcccatcgatagaccaggcctctggaggtaaaagaccgatggtaggccgatcgagaggttccatggaaatgagattcgcgtgtatacggaaccagagcatacatgttctcttaatcatctttgtcagttaagagtgtgtgtgtgtgtgtgtgtgtgtgtgtgtgtgttctatctcatcaagtggataccctatgaaggtctctttgttggactgtatggacaagttgtcatcgtcccaaggcagagattgaacagagacaacagaggatcgaagagggttatcgatgaggcttcggatacacgcagacgcggacacacacagccgcacatgcttctctatctatccaataccatactccatcattcaagccacacatgctatcacacacactttagacacgcgatgcaaaaccatcgagagagggagattgaacctcagggtaatcagggacaagcatattgatagaaatacgactctgtttacgtcggcacagaatagggcgttgtggttacattcatcgcgttacacttccaccgaggaagcgaacagccgtgtgtgcgtgtttgcgtccgtacgtgtgaaacctctcagctttctttctcttcgttctcttcgacctctttctatcctctctcacctcatactctcttcctttcgttcatccttgttcattcgttggagagcatcctttctgtctcccttagtctttcctctcttgtagccatcaccgaagttcaggccttccgttctttcacacactcacacccacatatactctggctctcggaaggttttctctttgaacgagatccatattcagacccaacgcactaccccacccccgtttttgtcagtcaacctttttcattcatcactcattcgccccagagggttatccataactgaacatctaaaatcaacaatgaacctttcctctctctttgttccctccacagatcaagcttttatcagatgtccgctcagtttgtcaagctgtccatctttggaaccgtgcgtcttgcttctttctccacctttctgttactacgaaaacactcagtcgtcccgccttcaagctttctctctttgagcctgtcgatctctcaacaatatggcttgctgaccgggttttatcgtccattctcctttctattcttcttatcgtccattctcctttctattcttcttatcgtccatgctctttctctcgccatctcatcgtgttttcggccttatcaattctgaatctctcaacgttgatcaacccatcctcatcttacgcctctttctatcaaactcttttttccatctacaaaaaatcgcaaaacatgccaatgctttaatcgccattcctcctctatgccactcaccgattcatcgtatttttcccttcatctttactcactcgtcatatgttccaccggttctatcggacggatactctccacccacatctcaggttttcgaggtcacttcgagatatgttgacctgtatgtgcccaacggctgtcccccattcatctcgtagatcgtactgaacgtcccgggtgttctttatgtgttctcttccttatcctctgttttcctcgactcacagtaatcccgttggtcagtcatggtcttcttctactccgcaccgctcagtcctatgctcattctcttttcatatacctacaggtatgggagctttcggtcttgtctggtaagcttatccttcgccatcccaagcatcggcctgctttttcttcttttcacttacgttctctttttcacttccttttctctcccagttccgccaaggatcagctcaccaacacctcggtggctataaagaaaattatgaagcccttttcaacgcctgtcctcagcaaaaggacgtaccgagagctcaagcttctcaaacacattcgtcacgagaacgtcggtccctctctcctcttgatgacccattccctatagactgatcgtttgctcgttcctggtgactatttctccttctagatcatctctctcagcgatatcttcatctctcctctagaggatatgtaagtttttatgtttcccttaatcatcgcgattgagccaagaaggaaaacagtttgtgctgcctggggactagaagatcgattctctatgcctcgctatctgatttttatcctataaaggggaaactcctatttatataattgcttatcttgcaactttccttttcttctacgcaaaccagttactttgtgaccgagctcttaggaaccgatctccaccggctcctcacatcccgacctctagacgatcagttcatacaatacttcctctaccaaatgcttgtcagtctttccttcacagctgtctgttgtgatcacttaaactaaacaagctttcgctactcgaaatcaacagcgagggttgaaatacgttcactccgccggagttatccaccgagacttgaagccttcgaatgtgttggttaacgagaattgtgacttgaaggtgtgtctctgctctatcaactctcacagaacttggtccgagtagttttactcacctacttctgcttccgtctcacttcagatttgtgatttcggactggcgcgaattcaagatgcccagatgactggttacgtctcgacccgatactaccgagcaccagagatcatgttgacctggcagcagtacgatcacgctgtggatatctggtcggtcggttgcattctggctgagatgttgctcggaaagccgatcttccccggaaaggaccacgtcaaccagttctcgatcatcaccgagctcatcggtactccgcccgacgaggttatcaagacgatctgcagtgagaacacgctccggttcgttcagtccttaccgaagcgtgaacgaattccgctctccaaaaagttccccaaagcttctccgcttgccgtcgatcttttggagaagatgctcgtgtttgatccccgtacgagaatcaacgccacggaggctctctcacacggcttcctcgagccctaccacgacccgaccgacgaaccagaggcttctgagcctttcgactggagtttcaacgatgctgatcttcccgtggatacttggaaggttatgatgtacaggtcagtactgggcctattttgcattatagtgaaaggtgaagactgacaaacgcgtttacttgttgttttcgtagtgaaatcttggattttcacaagctgtgagttatttggcttttgtttccgattgtctgtttacgagcgcgctccgatgttgattggcttcatcttctttcatttcatttctttcagtggagacgaaacctctggagagggtctggaagagcttagccaacacactgacgggcagggcgcatgaaaagatccattttatcaatttagcatcccagattactgtatctctcttgtttcccctatctgtgtgtgttgtgtgtacgtgagagattcattggctatattatctgttctacctacttctcacccttccccacgtccctcggtttcattccgttctatctcatttggatttggatgtttccccttccctccctcccgttttttctcccctgtctgtttactttatattctctccctatttttattccaattctattcccttgtcttgtgtctgtctgtctgcctggttatggctctcgatccggtcgacttttttttttctttcttttttctttcctctgctcaatcatcttctctgccctcttcactattcttatcgacaatcgataagaggaggagagctcgacaggacagatcttttcctttcttcccctttcttggatcatcctcatgcttatcttctttgtgagagagatcttccaggaagaagggaagaaggcagtactccagaacgtgggatagagacttggccagtgatgaatagacgatagataaatcatcttgagccgagaaccaagaatacacacacacacacacacacacatatatatatatacacagaggggccagagaaaataaggaagaggagaacgaaggaggcaacgttcgtactgtgcctgatgtttgacccaggatcctggatctccttcccggcgccgcggggaagggaggaaactgatgctcgggagggttttagactgtcataatctcgagcggacagctaggggacagttcggtctgtatcttttcactatctgtgcgcaagcctgttgtttcgtcgatgatgatgacgatgatgtcaaatctaaagataagaataagaatccccttcttctttatcggtcggccgtttgttacggacatcatcactttacacatctgggtatacatctcatcgtacattacaatacatactatctgactcccgtccgacctgatccggcctggtctaggcagagaatttttttagtcttttaaaaataattattattgaaaaaaactactttaccgcagctacctctctttctaggggagcgcgaaagagggtgcccaccaaggtagggcttcatagttggtctctgtacatatccgcaaacctgttcgtcgggaacgtcgtgtcaatcgacggggtggcaaagtcaacggcaagggaaggaaaaagaaaacaaaagaaaggaacaaactgttggctcgacgtagcgttctctatggttttgtcctctctgatcttgataaatctgttttgtgtgtgtatgagcgagcgcgcgcgagagagaaagagaaggagaaagagggaacgatacattcagcgtgtgaattacgaaagacagaaaaaccgcatgcccgatttaaagttgtcatcgttagtcccgccgaccgaccaagagaaggaaaggaaaggaaaggaaagagaagacgaaccgaggaaaccggatggaaagaccccgttcacccccgagaaatgtctgagcggccgggtaattcggagagagcgttatactgtttcagaatgtcccatcgagtgaaaaagaaaacgaacacaggccgtgtgtatcaggcgtttcgttcgtttttgatatacagtttagaagagacgaggaaaaggacgagaaaaggaagaaaggaagaaaaaaaaaatagaaagaagaacggactctgcgcctttgatctcccaaaccctgatcgttcgataagttccgggtgaaagcagaaggtagagtcaactggtgtctctttcggaacacaggtacatcgtccagagtttcttcgaaccgagaaagactgatggatcgatcagacagacaggaggaacttactctttgggcgcgaaccaataatccggtatcaaacctggtttaccccgaaagagccatcgaagagggaatcaacatctacaatcacatccggaacacaaaggaaaagggcaaaggacgcgagagagcacaaagaggctcaccgttcgtgtcgacgttcccggggacgtctcttcctgatttatcagctttccaacaatcggccgaaccttcctccggatacctggctttcatagctttatagaatgtatcggaaaatccgctgatgacgatgtcgttcgttcggattcccaaacaggttgattcaagggatatcagagagagcgcgcgtgcgaaattgaggctcatacgagttgagagagagaaaacacacacctcatacatttacaaacggcctctaacattcctgagtctgggttatactaagacatccaatgacgggtgaccaaatttgtgacggagagaaaagacaagggaaggcacaacctcgagaacagataagattgacggatcgagccgagaaggagaagaaaagaaacatatgcatagagagagagagaaaggtgaaagacgaacacatgccaagaggactggactccaccactttactttcctaccgatcccatgccaagcgcctataggtactaggtctagtgagtcaccgattccaccgtctatgtagtctttctttactttcaaccagcccagcgatctgacgtctggctccacgatcctcacatatcaagtgtgtgtagagggggggggaagaaaggaggaaagttcagtcatggaggagcttatcggagaacgagtagggaggaaactgacctggctgataagtcgctgggaggtctttcttctttccacctttcttgacgatcgccaacaagctaggaacgacttcctgtgattccgccttttcgacttcctttttgagttcttcttcctgctcctgctcctgctcctcttcttcagattccacgtcttcctcctcttgttccggctcgacatcgcccctggcggctttgcccgccgacctggggtcctcttcgtcgaacccgtcgtcgccctgtacgcccacgccatccaacaacttgatcatgatgccctccgcctttttcgcgacggcctcggcgaagaacgcctggatgtcggccgggtctgtcgagtcgatggattcgacatggccgaacgaggccgtcaacgtcgatgacgacagggagggggtgtatgtggggagaagcgttcgaaggaggtgtcgtcttattcgaagcggttggttcagtaggatctgtatgtgtgtgagagaaagagatagagagagaaagagattatacgaaacgcgcgacagaacagatcagatcaagtagggaaagagaaagagaaagagagaaagaagcacaactacaacgcacttctttgttgagatacatcagatcgaaagcaaacacaccgacgaggactttgatgtccttcatcttgacgtccttttttggtctgtttgtcagttcttggaacgtcctgaacgcgccttttgttggtgtgacggaaaaattggtgtttcgttggatgatcaacttgtgttctgacttgggtataaaccacagaaagaaactgcgacggaaagagcagcaggaagaagaaggggcttaagaagaaaacgtgggacaaaccggtctctttatcgacagcaacgatctctgcatccaacacgatcgaccttacgctctccggatagaagctctcttgatcgattctgtctgactgttgttgacctggaggttcgggtaattccgatcgaggtccgaccggtctggtgagaaggatctggacgagggtgatgatatctgggtatttctctgtcatgtcttccagatgtctggagaacagtctgacgaacagcctgtcgggtgtgtgaaggtggggatggggatggcggtgtgtttgaggaggagaggtctgatcgtcgggaggttgtaggtcgccccaccagccgcctgggccgacctcggctctgaccgcggtctgttcgtccggcctacagaccctggcgtggatctgtactctctggccgtcgagttttgcctcgctagtgaaatctagaccggtgagcctggtacaagcctcgcctagggatctcgtgatggaacccagcatgggcgagagcgggatgcctactgtgagcggaaccgaggtcgatagattctcgagtccggtaggggatgataagagggagggaatgatgtgtgagtagttgggatgtcggacgtatactctgcggacgagtctgagtgagtgagtgtgtgtgtgtgtgtgaaggagagggcgcaagaaaaggctatgagaaagaagagcagagcgcagaagaagaaaaaggaaaaaaaaaagaaaaaaaaagaaaagacgagtgaaagagcaaagagaccaaatacatacctttctgcctgctcgcatttctttctccaaacttctctgacggtctctccatcagagggaatcgatgatggcagctgctctgtttcgttcaaccgggcccgttttcttgaacctcctttcgatttgctcgcggcggccgagggaacgggtgcgaggttcaacagtcgatggggaggaaggaagtagtctgtctcttcaaggtctttccagtcgagatcggggaaagaaggtctggtgagggtgaatgctctcgctagggatgtcgtcagtgtcaccctgactgctccgatctgggagggaagaggggaggagaggagaggagtagtaaggaaagaagacttggtgagaatgcaggaaggagagaccagggaaggcgagaaaaaagaatgaatgaaagaaggaccgactgactctgaggttctgaacaagcgttctgacgagaaacctggcttcctctcccttggcggctacgagtaatctctggacgatctgtatggaagatgatgatggatgagagaaagagatcccggatcaaaggtcagttgtgagaacgagttacatacgatatacgataaggaatgtgaatgtgtgtgtgtgtgtgtgtgtgtgagagagagagagagagaaagcgcgcgcgcgcgcgcgagagggagagaacgctcgacggacaacgaaggaaatcacttacgtccgcctttgttttgacgacaccggtgcctttgagggaggaaagggtgaggatatcggcgtataccttgtgtacgacgagcggctttggctcgaccaacgtgcggacgttgacttttgcttcgaacgcgacgtcacctgcgtcaccgagcttgtcgctcatccttctcaacgtgggctggctcaggccggtggctgatttgagagcggcggtgaggatctgggtgccgatgcctagctcgtttggctcgtaggacggtccgatgtggttcgacatgaggtacaccgtgtggaggagtgagcgggggtcatggagtgtgatcacccggagcaggtttgtcaacatccggacgatcgccagtcgtttggtggtggaagcgatgggaacaaaggcggtctggacgatgaaacagtaggtgagccttccgtccggccaggatgatgtgtcgaccgctgtggctgggtcgaagaggagtggatcgacgtcaaggtccgggtatgcgtttgagcccgggatggtcttgatgggggaggaggttgggccgggggaggtaggttcatcgagctttcgttttgacgggaggcttgaagtgagagggtgagccttgttgtctttgtcgttctcttcatcggaagagacgaggtcgatgacggacggaacggactgggtagggttggagggttgaccgaagaacgaagcgacggtaggttgattgcttggtttctttgccttttgtttcggcatggtgttaggtgtgtgtttgggtgagccagggttagtgggatggtgtgtgtgtgtgtatgtgtgtgtgtgtgtgtgtgtgtgtgtgtgtgtgtgtgtgtgagagacggatggacggatggacggatggatggatgaaatgaatgaacgaaatgaatgaacgacgagtgacgtcatcgcgcgtcgatctgacacggttggttcggatgcgtgtcccagagccacgtggagtcagagagagagagagagagagggaagagcatgcactggagtgggtgagcgcgtgtgcatgtatgtgagtgtgtacacgtgagtgtgcaagtggttagaatgagtgagagatgcatgtatacacagagcagcaggcgttgtatacagggatggacatacatgagagggagtgagagagtgtgtgtatagagagtgtatagagagagtgtatagagagagtgtatagagagagccaacacacacacatatatatatacacacactcacacacacatatacactcactcactcacgacgagcgagagatccgtttgggcgaggtgtgttctagcggggtgtccgttggccagtgcttggggtgtctgtagtcttttttgtagtcttctttgtagtgcccgtggtgtgtgtagtgtggtcgcttctctctctgcgctctctctgcgctctctctgctcgctggtgtgatctgtattctgtcctagtgtgctgtctagtgtcttgtctagtgtcttgtctagtgtcttgcctagtgtcttcttcagtgccccctctcccccct

SEQ ID NO: 2833 - DNA, 853 bp, Xanthophyllomyces dendrorhous
gttttgttttattttattctattttattttattttattttatttcatttcgttgaactttctatcttttctcttcaattcttctctcaaatcaatcttttctctccccgccctctagatactccgaccgacgactcgagtccagtctccctccgatctcccacccaacaacaccgtcggacgtcgtcccttcccctccatcccgatcaaaaccgatcaccagacgacctttccatgggttccgctcggccagatgatctccccgtcgaccggaaccgaccgacacagaccctcggaacggagcccagatctttgaccgatcctgcctctgcctctgcctccgcctttgcatctgcctcctcctcatcctgttcgtccagctcgacacatacctcccagacagacgacaccaatagcacaaccctgtccagcgtacacgaatcctccccagcctggaccccagagatcggatcccagtcgaccaaagaaccatcatcatcgtcgacgaccaccatctcccccacttcttccaccggcaggcataccatcaaaacaggcaaccaactaaccgaacaggccgacgaacaacccgaccagacccacaaccccaccaactctctcaacgttgatcttggaaagaatccggaccaaaccgaccgtccggcaaaggccgcggaggaggaggaggagagcgaagaagaccgaaagaagagagaggcgagtgtggcagaagaaaagaggagaaagtcgttgctcgttcataaactatgggacctcgtagagggcgaggtcagctatactgaggacctcatcacactcgttcatgtcagtccgagtttccttccttttttttc

SEQ ID NO: 2834 - DNA, 4069 bp, Xanthophyllomyces dendrorhous
ccccccccctcttctctctcggcgtatctctttcgacttaacctttccaacaaaggccgagcactttacgacctacgaagacttctgcacaggccacgagaccgccttagccatcatccgtctgtttgagaaccgaccggaatgggcagaatacgaaagacgttgtacggacatcgcccacagacgacctcggcccgacctcggttccatcctgttagcctcctacccgtctccatccgaaggcccggtcgggtcgagaccggatcgaccgccgatgaacccttcgttctcttcctcaaactccaccaccggtacgctcaccccatcgagcgcccccgtctcgccaggcctcttccctcccccggcgatcaacctcgacagaccgtactcgaaactgatgctcagagatctcctcatcaaacccatccaacggatctgtcggtactccctcctcctagccggcctccgaatcaagcgcggcgcgctcgaaggcgatcagagtgatgtcgccggcgcccagacagacaccgggatctcggcggatgggatccatttcggtggagacgtactcgacagagcggtcgacgtgatgaaaatcgccgcaggtggggttgatgaagcgacgaggaagaaagtcgcgatggaacggacgaggatgattaaaaacaggatagaacctcatatcgttcgtacagtgtttcctcttctttccttcctctgtctctctctctttctctctccttgtctacatcacctcatgcttggtctccatgccaatcttcgtcactcactctccttctctcctccccatcagcatctgacaaggacgatcatcgaggctctaggcgactgtctcttcgttggttccctcgaaatgatctaccagccgttacccataatggtctcgaaccgtcagaccccctcgcccctcaaggtcagatatctggccgccttcctctacgccggttatctcatccttgccaaagtcaggaaaggaagggactatcaggcgttccattacatgccattaagaggcttgagaatcgtcgaggaggatattcctggtacttgttagtgttttttttttctttcttgttgcgcctgttccgtcttcccttttttttttcttcctttttttttccccttccttcgttccgctcatctcgatgtcacattctccccggacaacagtcttcttgccgtactcgtttcggttgatcggcgaaggattttactttgagctggccgccggacattccaaagaacggacgctctggctcgacaagatccggttcgcacatgcactcggaccaccgaacgccacccaattaccatgctccattcccgaaatgctgttttcttccagactccccctccggagggcttcccaaggcgccggcctgtcctctctcgaccgcgcctttatcagcacgctcggtctgggtgggatcaactcgaaacggctctcgctcaacattacagaaggcttcgacctcgcgacgtcgatcgaatccgacgtgtttgacgagtctgcctcgaactctgtctcggcttcaccggcgacgacgacggtgcccctcccggcgtccccccaggtgtccaccacgccttcgtcctcgtcgtcttcctcaccgaaagcgctcatctccagagcgctcacctcgtcctccctctccttggccggtcactcggccttccaacacggcccgcagacgaatcagccggtctatctctcccaccatcaccaccacctacagcaactttcgttcgtccaagcccaatcgttactccgccggaacgcttcctatagagcaggggtcgacaaagcgttgggcgacgtgttttcggatagctgtgctgccgctcgtcaactcgcccagctggatggttacgtgctcttccctgggacgaacccacctacgaacgtccgctctcgcggtgcagccgccggcggtagtgacatcggtggtagcggtggtggcaatggtggtggggttggttccgccggtgccggtgccggcgatggaacctttggtggcatctctggcatcggtccgaacggatcgtcgtccggtggtcaggaaaaagaacggtcgagctcgatagggtcgaacgtgagaagaaagatgagggacggaagctcgatgagaaggcggagtacgtatgtggagacccagtcgtccgttctgaaccattccttcgggaacactacctttctcgatccactcaatcctttcggaccggtaggtttaccccccaccaccgttatcaccaacaacaccaacggtatcacggccagcacctcgatgaacccgtccgtcatcggccaaaccggctcgtcaactttcagaacgtccggcagcacagcggcctcgatcttgcacagagcaaagtcagacatcgcgctcaacaaaccaaagtttctcagacggtcgaccgtgtttgaggtcgaggagggctcgaccgaaggcgttctccccaacgtgccccccgtgccggcgatcgaacctctgtctgccggcggtagatcgagaggcaggacgaggacgaccgggtcgatatccaggtcgggctccgtcaataaaccagagttcgacggggtggcctccacgtccacgtccacaaccacctccacgcctgtgccttctgtgccccccagtcgtcaaaactcgaccgggaatgaggctctgtcctctcccgctccctcccaaacgtccgggacgaataccggctcgtctttcaaacacatgaggtccaccctcaagcggagttcttcaatcttcgaaggctggtactcgaacgccgggttcaactcggatgccatccctcccgggcctagttcgagttcacatcccacaggcaccgcccacaaaggctcgccccaggatggttctttaatctcttcgctctcgaccttgactcttaattcgccctcgagtcctagtaagtccgccggtggcttttccgtcaaggacagggacagggacaaggacaaggacaaggacaaggacaaggacaaggacaaggacaaggacaaggacaaggacaaggacaaggaaagagaacgcgagggtaaagatagcttccttcgacgatcgctctctacgatctctggcaagagacgatcgaagagctataccagcgtggcctcactctcgccctctagtcttgcgcctttcagtgtatctactagtccgccaaaagtcgaaccgatcccgatcccgaccccgaccccggcgccggacccgactacgaattccatgctcggcgtgaacggaaacgcccccggggatgggacgttactctctctgacaccggtgtcgccttttcagatcgagatccctgcagaattcggtgggcccggtcgacagagctcgcctgaagactcgacgatcacgctgccgatgatggcctcggcctcggccgaccagaccgtcactcgaccggcccattccaggacatcctcttccggtctgtcctctgggagaaactcgatcgtctccgtcggctccggcagaggttccctctcgggcgcgagtagcgacgagggagccgatgcgttggtcatcccgaccagacgacggctcaacggcgttaggttcttcccaaagtcgttgcagatcacgccgatgcctccttgatcggtcttgctttctgtttgtttcttttgtttgtttccgtctgtttctgttttcgttttcgttttcgttttcgttttcgtcttttattttttattttactttattttttttgaatcatccctttcccttcttttccgctcgttttctttctctcttttcgtctcgttctgatagatagtataatctgctcgacactgtatcccgtccccctttttttgtttcttttcagtttcttctctttctttcctactccctcgcttttcttcttccttggaaatcctgtctgatacgctcttaaactgtctcttgaattgtagccactcttcctctctttttcttcaactggatcaaccatatatgcttaccctgcctaatcttatcctttctgcctttttctctccttgtcctcttattcctgtcactaaatc

SEQ ID NO: 2835 - DNA, 18045 bp, Xanthophyllomyces dendrorhous
ggccttgaggacaagggtgagcgaagcggtggacgagccgttctggacggaggcgagcttgaccttgggagaaagctcagagacggtcgcgatggaccttcgtccgagggaggacgcgaccttggcggaaaccgatctagactgggcaaacatggagagattgagagaggaggatgagaggatgaatgaacgagttgatgtaaacgggcggcagacagagaaaaaagagaaatggcggcgtgctcattggatcaacctgttctgaatctgagctcaacctggtccaagactggcatcaattttcaacaatgtgtgtctgtgcttccaccacttatcatcggcgctgttggtgatgaagacatgcgtattgtgtccattgtgtaagagaagtatattaagaaaagacagacgaaggcaaacgaagccgatggcccgaaagagaaaaagaaagttgatagatatgaaagtcgactagggtcgatgtatgtgaagaaaactgaaacaatacaactcaaaagaaaactgatcgaaggagaaggaacaaattacccgaacgtcgttcgtgtgaagagacgaggggggaagaacggccacgcacgacaagaacgagggatgcgaaagagaagacgacaagagaaacgaaacgacaagaaacccgacacgatgctaaaggatgcgagaaaagagaaaaaccactttgatttagagaagagtagtctcgaccatgataccagtgacctgataagggtcaatgttggaagcaggtcgcctgtcctccaagtaaccgtagccctgggcggcaacatgtcggggaattcgaatggaagctcctcggttggcgacgccggaggtgaagtcaccaatgtgaccggtctcgtgctttccagagagtcgatcctcgttgccctcaccgtatacggcaatgtgctccaagtgcttctcggcgagtctgccaatggcagcgtcaatgaacttcattcctccgggggctcgcatctccttggtcgagtagttggtgtggcaaccagctccgttccagtctccatccttgcagatcttagggtggaaggtcaccttgattccccactcctcagcaactcggtgcaagaggaatcgctgataaacgagatagtatacacaatgatggtaagcatgtacatccaaacaaggatttgatgtaaagaaggtaggaatagagaaatcaggtacgaacagcgatcgtcaactcatcacccatgttgataccagtgcagggtccaacctggaactcccactgagaggccatgacctcagagttgataccagcgatggtcacaccagcgtacaagcaagcacgctagatttgatgtaagaaaggagttcgattagtataacagtggttagagaataaaagaagtttgccaggtgtaacgaacatagtgggcctcgatcaaatctcgggcaaagacctttccggttccgactccacagtagtagggaccctggggaccagggaaaccgcccttgggccagtgaaggggccagccatcagcatcgaggagggagtattcctgctcaagtccgaaccaaggctcgtgctatattcgacacaaaaggacatcagattggtgaaaggagcaatagcgtgaaggaaagtattgcgaacctcagcggcggccttcatggccttggcggcgtggaatcggtggttcatctctacaagacgataaggtagattgagagatcagtaattacactaagctgaatgataggtgatcgatgcactcactgttgggagtaccgtcggcgttgtaggtctcacagctgaacgatcggaaacagggccggatgagcggcagacaacattgaaaaacaacaaggaagaatacgtacagaaccaaaatgttatcacctcgtcggaaaggatccttgaagatggcgacgggtcggactgcaagatcgtgcggcatagacgatatgttaatacgatgaatctatcgttgacagttcggacctttcaagttggaagcttacgataaacctgaaatagaagagaaatccaaggtgggggtcaatacataatcaagcaaacgagaagcaaagtgtaagacttacatccgagtcatgtccaggagcctgtccagtggaagatccgtcactaagagagggagaaaagataagacaatcgaattgagataaggatttctttaaatcgaggaagacagagatcgggctgaacaacttacaagttccattctagatgggaaaaacagaatcgaacatcggagaaggtgaaggattatgggttggttgccgggaacaacactcggaaaatgtttggggaaagagcaaaggaaaagtgaaggcaatcaaacgcccatacctttgagctcggcaacatccttgactggcttatcgacagtagcctagaaagaacggtcaggcaaggaggaagaacatagtgttagaggtacgatcttgcgcgaacgagtaaaggcaagagagagaaaacgtacggtcttgcatcgaaggccctgaaaagattcgaaaagcacgagcacggatacagagaccgaaacgagccaataagaagtgagcttgacgtcttcgggaaattaattctagcgcgagggagcccctctattgtcaaacgacccagagagataacgggacgtacaccatcaccatcgatccaaatgtactacaagtgcgaaaaacataaggaagaaaggcgtgagtctgagagcgagcgaaagagagagaggcagtacacgaaggcaatgttgaaggacattctcacctctgcctgaatctttcctccctggtcgagagtcagatacggagccaaaagagcagggttgtgagcgaacgcgggagcagaggtagaggacttcatgatagaacgggagggagcggagtggacaagagaaggaaaagaaaagagtacgggagagagaaggaacgagaaaggtacgtgtggatgggggaataggatggagggaaagaacgaaggagaaacagaaacacagcgtgttctttaagtatcgtgtggatggtgtctcatcgagtcaatccgcacagatacacaggcaccagccaggcacggtgagtgaccgaccataagcggtctgtgcccagcgcgatttgcgcactaaccgcctgaaatttcaaccgcccctgtccccctcacctgtgcctctgccaaggtgcctgatcgctgcgcacgcccacggaccgctatccgaatttgattcatgaaaactctatcttttcgaattctagatcgccgaccttagatgcccccagatgccccagacgtgccggtgtaccgctgtgaggacacagtgtatctactggagtctccacagtgaggatggaattcatgcttatcgcttcttttctctttccgtcagggctaaaaatctctcgctctttatcgcccggaggtattctgttgtgtcaacaatcgtgtgaccggattctcctaatcgtcttttcttctgatctgggtctcttctcatcttattcttttcgaatcaacacctcggatctaactcgatttcacttcctggctcggtcctcgacagtggagattgtgctcaagtcaaatagttgtattatctgtctatctctatatctttcgtcgaaacaatgtcccttttcccttgttttgtgtctctctatggcaatgctttcaccatcactcaggcaatcccttgggaaataacaaactctaatatggaaaagaaaatcgctacaagatacatttaaaagtagaccggttaagagaatgagaaaaggaggtgattaggagaagagaaagaaaaagaagagggggagagaaggaaagaaaacatggtggaaaacacacgagacactataaactccacctcctttactctttttctttgtttctttattatgctttgtttttgtaatcttctttaaaggttcaactcgtcgtgatggtaaccctcggccataccctttcgaccacccataagctcgacaagagcccggatgtccgcccaccacgggtgctttcctcgtcgcttcttcatgtccgtctccttcaacacatcctccaccggggcaaagatgatctttgagccctgaatcgtgatcacagccgcagactcattaacgtactctggcgaaggctcgtcatgtcgagccttgtggagcccagtctttgttttcctagccaagtggtgcttctcgaggaactggatacatcgggtcgacaatcggacggctcgcgctcggtccaaaggcgaagggattccaccctgaagggtgtgtccgagcgaggcagaccgggcgtcgaacagagcgcctccttcctccttgaggatatcggtgatgagctcggtgttatagaccgacgaagacttctcgtttcggatgatcagtcgaccttcactctttcccttggtgtcaagctcgtatcgcttcctgaggaaccgaacgtcggttcggaggagatcgagcgaaactccgacctcaggagtgtacacgcagagagctccgacagccaaagctcccatcgctgcgatgtagccacagtttccaccagcggtctcgaccacgaacactcggttcctactcgcggatgcactctgcttgatagcatcacaagcctcgaccaacgcattcaatgaggtgtcacttccgagcgagaactcggtcaacggcacattgttcgagatcgtcgccggcaagtggaccatcgggatgtggaacgacgggtaagactttcgggcctgctcgagaatgtgaagcgcattgaaggcctcgaaaccaccgatgagcatgagcgaatcaaactcgtactgctggaaggccgtagcgacgtgaccgaggtcaacatcgggcaaggttcggttcgttccgagctctgaacctccccgggttgcccatccgtccactcggagccagtcaagctcagatacgtttccgtcgagcaaaccggcgaatccgttgtagatcgccacaggggtgtggccccgagagagacagtatcggacggcctgtcgagtagcggcgttcataccaccggcaggagctcccacgctagttttcggaaaaggaaaaaaaaaaacagaatcccaatgtcagcatttagaatattaatatgtccaacacctgcatttacgtaataaaataggccactcactggacgataccgactcgcattcgctcggatttgggcaatcggaaagagtgatcgtgggtagaggtagcactggcaatgaaagcctcgagggtgtctccgaactcggcgtctcgcaaagacatagccttgtcgaaatctcggttctcgatagcctcagcaacggcttgagtctgtattcaaatgatttgaataaaacgttacgcttagcctgtgtcgaaactataagtgtttcggaaaaagaaagagaaagcaacaaggaatacccaccaattggacagccttctccaagggattcctgacaatcttgttctgaacgataccaatcacgtatgatggagtctccgggttggcctccaacacagcgttgacggcctcaactccctgaagggtggccaagattcggtcgaatgcacagggcactcctcctcgctgggtatgaccgagagtggtgaccctagtgtccaaaccaagtcggtcggtaaggacgtccttgatgtgggctgccttgatgggctggaggtttcggtcgagcgctccctcggctacaatcacgatggactttctcttgccaagcgatcggtgtccctgaaggacgtgacacatctcagactcccagtcatcactcgcaggaggcttctccgggatcaagatgtaatccgcaccggtcgacactccggccaaaagcgcaagccatccacaatgtcgacccataacctcgacgacgaaagctcgggaatgggaagaagcagtggacgagatagaatcgatggcctcgcaaattcggtgaagagcggtgagacctccgatggtcaaatcagtcatcgccatatcattactacagaatcattaagtaggcatcgtcagtcgaatcaagcagacagctgtagctaacaaaacaacggatcaaactcactcgatggatccgacgagaccgacgatgttgaggtggttgtgagtcttggcttggacctcagagattttacctatcaaacaaacacactgtcagccgatgctctttgatgctataaaaattcaggtagacaaaccctgctccaaaagaatcttgacgattccggtccattcctttcgaaggaaatcggctccagtgagggatccatctcctccacaaacgacaagacagtcgattccctgttcaatcaagtgaagggcagcaagctgtcgaccctcaggggttcggactggagttcagatgagattgagatgattaacgaggtgtgtgattgggtcaacgcgaagaacaatgtgatgaacgagagtatctgatggaacttacaagctgccgaacgggctgttccaataagggttcctccctgtatagaaggaaagtatggagtatatgaagatgtttagcacggctgggcagatgtataaagagactaagaacagaggcatacctcgcccaaccatcctcgaacatcatcccatccgactcgaatgatgtactttcctccgtggtgaccggcatctgggctctcgttagcctcatcttcatcctccaaactgtcgtacacctggtacttgaggagctctccacttccaaaagtcaagggctgatccatgaagcccttaggtttaagggtcgaagccaatgggtcctggttagctgccatggggaggggaatggtagacggggagacatcggtggtgggggtggaggggacggtcttgttgacgtgagagttacctcggacaagaccctcccaaccctctcggacgacgtaggtgtggcagccactatggaaacggacgcagaaacaaaaggagattgagaaatggggtacgaccgtgaaagcgcaggcgccaagacacgattcagggaaaggaaatacttacgactgaagacccattcgaacgacggatcgcacagcggcgttcatacctaagagatcatcagatgagggacagagaaaaggacaagaaccagagcgtatacgttagtagatgagcacaagaaaaagaagctaacgttatggataaaaggctcaggaagccaaatatgacgaaccggcggaatctcctccagaggtgagaacggcgagcttcctcgggggagcgtcatcctcggtagcagagaaaaactttggaggctcgatactcataggtagaaacaaaaatgaaagtttaaaaagatttgtctagagtaggtaaatgagatttttgggatgagtgttataagttgtatgtgatggaagaagcgggaaaaaagaaggaaaagaggagaaaaaaacgaaggggacagaacgaaaacgaaattctccccacaagcccgtcaggagaggaaatttcctgcggggttgggtagatgcctgaaggaaacccaaagagcctgtacaaagccttggataagcctgggatcaaccgggatgggatgagtgatgtcatcagtcagcccactgccgctcacctctcggattgcatagcctggttacagttacgatgtattgtcaaccaaccctagcacatttacgcttatgtaccggccattaaccttgtcggagatggatggggaatccacccagagggagaacaaggaagaggcgacaacgttcggttctttcttccctttctctgtttctttggacccaggaattcgatatccaagatgagttctgagaagaacgtgagaagagtattatacatacaaaaaagaagaaaatgatgaaaacagagacagacaatggggaacaacacgttaaagatgggcgcacatacgaatgaacaatcagactgaacaaactgatcaaaatataacttttatgccggcgttttcggggtcgatcgatttggtcgtgcgggccgaccgggttctattactctgtacgtattgctttaaagaggacaagttctttgatcttcttgtctgcgaatgtcattccctatccgaactcttactgccaatctaccttccactcgcatcgttcgttcaatctcaaaaatgtctcccacgcctgactccttctactctcttgtcgtaagttacggttctgtatgcgctctgtcttgagaaccatcggattgacgttgtcctcgtatgcgtcttcttcattgtgcatttgtaatcgaaaactaggccaaccttcctaagaaaaagaccatccctttttctgattacaagggcaaagtcgtcctcgtcgtcaacaccgcctcaaagtggttcgtgtctatgattatgatccgccttgcatcatccgatataaggtcaacccttctgaaaccatcttctatctgtctattttccccataaactctggcagtggatttacccctcagtacaaggctctccaagctttgtacactaagtacgccgaccagggtctcgccgttcgtcctatcttctcttcatccagaattttcaactggatgggcacttagaaagaatactgatcgaactgctatctgttccaaacgacttgtagattgttggattcccttgtgatcagtttgggaatcaaggtacgtttggctgattcaatatatgcttcgtctatctttatatttgccttggccgtcaaactcaaacacgaaccaatataaaatgctacagaacccgacggtgatgacgatatcaccacggtgtgcgagatcaaccacggagtaactttcccacttgctgccaaggtacgctctccctaattgggatttcagtaataatctacatccaaaaccgcctctcttatcatcatctcgaagtatgctttgtccagtccaacgtgaatggtgatgacacgaacgaagtgttcaagtatctcaaaaccgagaagccagggcttttgggaacaacctccatcaagtggtcagtcatcgctctcacacgtgtttgcgcctctgtttcaggagagctatcttattgatctactctgttacgtccgtacataataggaactttaccaaggtttgtccaaacgccctcagtcagaggttgtatgccctagacgagctgtctcacccatctctctcgcttacatacgtttattatagttcttgatcgaccgaaacggaaacgttgaaggacgatactcttccaccaccaagcctgtttgtgcctctctttgtccttcgcccgtcattcggtatcgtgaaatgacgaacgatctctcttttccttgcccttataaatctgcgaaacaaacaggaaagtatggagggaaagattcaggaactccttgctcaaaagtagactttcccatctcttctctcttgtgtccggttaggaaatgtttttctcttcttcctcctcttctttttctctgtttctttgtgctcccctgctcctctcttgtctgtactttgctctaggattcccttctatcttggttctatctatgtataacgagacagattgatgaaaagaagtaaacaagtcagaccatagatcttatcgacatgtacacacttgagcccacttcgaatgaacgagaacaagcaggacatcaaacaaaagagagagaaggaaacacagttcgggcggagaagaccaagagatgtttagtgtttcagctcgagattatcaggtgcggagtagaagccctccttctttctttgctcggcaatcaggaagaacgccgagccctatattgaacaaaatcactcattggttcgttgagtctccaaagtcctctcagatcgaataaggagcaaaacatgaggtggaagaaagaatggactcacatcataagtcgtccgcatcatttctttagtaaccaatccgtcctcaggccaccagaggaggtaagttgcgaaccattcgaagaaagccgcgatccaaccttgtccgaccgatagatacacaagcgcatacatatgtacgttagtctcaaattcagcataagaaggaccaaaagaacagacaaagaggcaaggaacgaaccgattggatcagcgatacctctgtttccatagatcattcgaagaccgtccgagaacgtcagccctcctttgttctcttcgtcatatctatacaaccatcgtcatcaccaccatatatatatataagcatgatcataagccttagttgatccttctatgctttgggacgagatgccaagcgcgcgcgcatgaagggagagaaagatgacttgcttgctgaagatcgctgcgaatttggcaggaacaaatcgaccctgtaccgaacgaagagaaggctttagcgaaagcagtaaagaagagaagccgagatgacgagagaagaaagatatcggacctctgtatcatatgatccggtgtcactaccatgtttagctctatgaatggtcggcaagtaaactcggaagactttttgacaacggtatgaaagccagagatcacgatgagcgttcgtcgtcttttatattctagtcctgctcactatgcttagaacagggagggaactcacatggatctgggatccagcttgagttggtgaagtaggagaatgagctatgaatcagaaacaccgacatcacacaccaaatgatatggtatcccaacctaccctcccaaatttattatttccacatcgaaccatttctaatcagccaccgtgccatgagagagaactaagagacgtaagagagtgggctcactggtgaaaccctcgaaaggtatccagcggccagatgacaccatctagatctctatcccagaataagcagtgttgctgcaagacgctgagatctttgtgttgttctctccaccctggtgtcccatccggagtctcatcgctcactgccaagttggcccttggtagatctgttttgtttcgttcgaacgatagtttcgatcaaaatgatgagttcgtcatcattcgtgaaaaatcataagagaacgagaaggacgaccaagggacccagaaagacagaaccttacagggtcgatcgagcctatcagccaagtcggccggttcagccgccttatgagcagcgagatgctgaggaagtaccgcgtcaaactgactacctggcgctaatggagtggatcttccgtttgggtcattcattctgggactattagatcgataggcttgggattcaagtccgataagaggaaagaagagtgggttgaatgaagggtgatggggaatacgaatcggacccacaccgattggaggccttcctgagtctgggcgtttccctgagatatctgtgctcggatggatataggtcgattgagttttcactgtcattccattccgttcatgtgaatcattcgcatgaatcagtgtacagcatctatcattcacattttaatctgatctatacctcatcaatctcatcaacggctcattatatatctacagggtatgagaaaacggacggatagatagacgtttcatatacatacgagaagcaggctttcttccttcgacgcgtcatcggctatatcattctttcattacgtttaaccctaatagttctcgaggatcgccctgtctgttttaccttaaatctatctatggccgaccaacgtgtgtccatttcaccatcgatgtctgatttccgtggaggacatgcacgagtagaagaaaaaagagactaaagaaaggcaacgattattattgagagaaaaacacgatggccgcccggttcaatctattactcgagcactggtgcccagacgagaaaggccaaaataagagagcgaatcatagtagatccgtagcagcattcggaagacctagtcgttgtcgttctctagcgatctcgaaaaatacggagccctgtagttccggagtagagtaaaaaggacgcttctcattcgtcagctctcgacagaaagatcaagactcataccgataacagcattagtagacggaagaatcagaggaagcaagactcacgtcgtagactgtgcgcatctgttctttagtgataaccccatcatccggccagaacagcacgtatgtgatgatccatctagaattattgagagaaccccaagtgatgggtcagtaatcgatatcgacaaaactcttctgggaaacgaaacaattaaaaggcagaaggataggacttgctcgaagctagcagcgacgatcccagcaccatcggctatacatctatttctgtacaacatccttaggccctgccaaaaagtgatccctccctttccttcgtcatcatacttcgtgaatatcgcctcaaacttgttgggcacgaatcgaccttctgtatcaaatgcgcctgagtcagacccgtgtttagcccgatggatattcgcaagtgttatccggcagactaagaatgcccagaggaaaagaaccatgttaggaacagcgatgcaaacgagagaagaaaagaaataccaaagacgtacaaggatcaggaaagatactatttcctgagaagaaagaaaacccaggattgatgatcatcatgcccaggaagctcatgatgaggttatatcccaactgtcccatcaccacccatgcgctcggttagatcagtaactttgttttcccggacacgaagcacagaaggggattatccgtttgaaaagcgaagataaggacagacctgtctgaaccctctaaatgtgtcagtcatccagatcactccatccccatctctatcccaaaatagacagtgctgctccatcacgctctgatgactgtgcttctctctccagccgggcgttccgtctggcatttctgtgctcacagcaatgtttgctctcggaacatctttacgtaggcgcacataggaaaacatcaaatgtagcgcgcatgggtgagctctgcgtacttcttctaataaaacgagaataataagatagacgccgggagcgggaacgaacagggtaaatgtagtttctcttccaaccctacaggttctttcgaatgtctcttcatcgccacatggccctcaatgactgtcgagaatccggtggattgatccgacttctgggccaacgttgagacctgactcgaggtagaagaagtttggatggtggtctctgaagaagaagaggtatgcgagagagaaggcgacgttaacggagggctaagtgggagctcattctcgtgattctgcttgcgtatgttatcttgttcgagatccatcttgacgagtgcgtgaatgaacgtagagaggagagagttgagaagtaaaacagaattccttatatcggtgtgctctcggtctcagatgtccatcgtggccgagtaagtcagcatagtcagtcgaccggcaagccgaacacagtccgagatcaaactcgcaccctcatcgacttgatccacacggttacccgatctcgatcccgatcaaccgtggttacggatctcgtagccactcacgctcagcgtcattgccaagaactttgattcacagttagtaaagaacgatcgatccagaatccaagcagaatgtttcctctctgtctccttaagagcgagaaatcattcgtgtatcaaggaacatcagaagaattgagacagacagagtaaaacgtcgggtacatgtcgctctgcaatagactacacgttgagaaagaaacggagaaggaaaaagaaagaacggcgtagataatggcgacaaagtaggagtagacacttgagggcggttggttctacttatgagacccagactgcaagaccaatagattcaaagagatgagtgtttcttctcacaaggcgaatcaacaagacactgaagaacagaaatgatagaacttacatgccaacgcgataaccgagtaaagtgccatgaggactagaaggcagaaacaagaaggaagaaaggttaaaataagctcagacttgaaaagaaggaaagattgactgactcaatccctcaagccagttgcttgttccgtctgcaatgagaacgtgaaccaggatgacagatacaaacaggatgattgtctcgaaattagagaagaagagctacagggatgatagataataaagggggttaagtatggtatacaagcagataatcttgttaaaaaagagagcggaaaaacgaacggtaagctctcgacccatagcccaaccgattatcacgagcaaaggaatcattcctgtggaatagagcgcaacagaaaacttgatgagcattccaatctcgacggagaatatcgagattattacatgagacaatagacgaaccagcggcgatctgaatgctagatccgacggctatacccatcacaagctccatctttcctttcatggccatccatatagatgtaacgtgctcggctgagaagcaaaaaaagttaagagtaatagagaacgacggcaacgagttacaataagtatcaaggtctatgtttctatatcagtcgttcgtatgtcataaccgaaagaaggactgaccagcgtttcccactagaggaagtaagatcagaccaacgaatgtcttggggatattccactgctggcacgtttcatcgatcgaactgacaagatggtctagcagaaacaaacagggcaacgatcttgttaatgctggcgcatttgtttctgaggagcgtagtatagaaatggtacggaccggcacagaaggcagttaagatggtgaccaaggcgagagcgataccagaggcccagacacctaggtaaaagtgaacgaagcacatatgcaaacggtcaacatttgattgcctcgttgataggagcacagacagcggacaaacccatcgagacctcttcctcctcgacatcctcagtatcagcttcgaacagactggcatgactcttaagctggaagtagaggtatgccaagtagacgaagaacagcacgagggatgttcccctcgagagaagaagaagcccggtttgaggcgcgctactatcggtttccaaaaagttgacgatcgagcttgaggcggaactgtcgatcttggaagagtggtaggccgcggggacgaccaaggtgatgcacgaaagaaccagaagggagctcatcctatatcacaaacagaggaggtagcggcaacaacgacgtcagcgcccaaatgacggccagcgtagacggtgtaagaaagaaagaaagaaagaaagaaagaaagaaagaagaaacccacgtctgagcggccgtcacttggaagtgagactctgcaaacttaaatccactggcgaagaaactcataccgagaacgagaagaatgttgctaagctgatgtagcagagaaaggttcgatcaaaaatcaccaagtgtccagaaatagtgatacatgcaaaccgattagcatggcgaatctcggtcgatcacgctcattcgctatcagcacgagaagagagatgtacgtacgatggatccgagcaaactagtctgaacgaggcgaagctggttctgctggagggcgacgataccgacgatgagttcgacggcgtttccaaacctgcatacgtcatagcgcatggaaggtgaaacgattgatcgtaaacagcgaatatggccgagaaatgaaccaggtcagtacgatgagcggagcggatgccgacaaagactctgtgtcctttatctagaaggtttgacgggaaagagattctaacgaacgtcgcgttgagaagaccgccgatagtctgaccaagaggaatggagagctgctcggttgcatctccgagaagcttagccagagggacgatagagatgaaggaaaagacgaatcgaacttgagcactacgtggtagaaaaagatgagacgtaagatagagagacgggtgttaggtatatgtgtcttgacaacatgaaggagagtcagagagagagagagggagagaatgaagcaagagcagagtgaaagaaagagaagaacgaccgagtgatccaaaacaaatcagggaaggggaaaaaatcttcaacggacgtacctccatcctaagaaagtagcaaggaaggtgaagggaacagcgatgaggaggatgttgaaccagctgtagagaagatgtttagctgaggcgagagcggtaggtgcaaccttgaccgggtgcctatgtgggttcccagagagaagaggggtatgttcgccggaggctgtttcaagcgcgtaatagaacaggtcacgatggttttgtttacgagtgacaacccaagatgagcagatcagcctggatgaacgatcaaaggcgaaacggagcaagagaaggtgaccaacgcataacgataagaaacttttgaaaagggtagtattgactcttgatgtggatgggagatggggatcaccggagaacggacacgaaaagaagaaggaacaggtaaagacccgttctgcggtcgtaaggccaagacaattttcgtagtgcacaggtatcatggatttttattacgaattaaatccgtagctctattaggaatttcatcgagcttctattaaaaagtccattcgaatcctcatcggcggatcacagatagattggataacaaaaaggagtggattaggtaatcatcacgtgtgttagctttcgcacagcttgtgtcaggaaccagagttaggtaacatatacacgacagcgtgaccatgctcacattccattattcatcatgccttccatttcgttatgctccttctcctcaccttatgcgcttgataatccttctcagctacgttcccttgattagtgataggattagtgatatggattagtgatctgttgcttgataatctctagttgataatcctgtagtttagtaatcgagtggcaaccaggtggccacttcatcgtagctagaacacataaaaggatcgcgtgcgcgctccttcaagatgtggttcttcaagttaggatccttgttaaataacctagtagctaccagtgctattcaatcacgattcatcctctcttccctgagcctggaagcctaaacctccacgcctcgagcatccctagtcaactacagtcaccttgcgtaaccctataacccggccccttacagcttgtaacaatatcgaaaaaactacaagcttgtcctaatgaacgcctaatagccgtctgaaactttcgtattgggcagcatcatggttacgcataaccaccgaatctagccacacccacacctcttcatctccactccttctctctttctctccctttccttttctcattcatccaggcgttctctctttcttcttttctttcttcttgttcttttctggtgtccttcatatctagagaatatctcttcacatggcgttcaataataattctcggaacatgtttccctcgttcgatccgaattcacccatctatccgaccccaggccagccctcaccatcccaaagccaacaccatctttctctctctgcaaacgcgtcccaaccggcagtcggaaataatcctcttgcagctcaacaggcctttctcgccaggttttccaccaatgctgtttcgccaacggcaaccaacccaaatgtcatatctaatcccaacactcaaccatctcccaggccgtcttcgagcaactcagccttctcttccgctctcaccgatttctctgtcggaccgacacaaatccaacagacccaacggacaccctccggcggcaacggtcagagcgcacattttctacaacaaagagcagcgaaccagcaacagcagcagcagcaagctgggtcatcagcatccacagggatcaacccgaaccagctaggtccacagagccagcaataccagcagcttcaactccaacagcagcttctccaacaccaacagcttcagcagcagcagcaacattttcaaaagcagcaacagcagatggcaagaaataactctggaaacggggaacagtcttcaggagcaaatttccctcccagcatggtgatgaattctgatactatacgccaggtccgtcccactcgttctatctgctcgttcgcacgcgtctttcgagacgcgtctttaccatccaggttctcgagctcttatttctcttttttttttttttttt

SEQ ID NO: 2836 - DNA, 10818 bp, Xanthophyllomyces dendrorhous
cctctggtcaaatcaaaaaaaagatcacactcacctatacactcacacatgcacacaccctcatacacctatacattcatacaactatatacattcatacgttctcatgacctctacctacgcatgtattgtttctttctttctttctttctttctggccgtttcctttcctttccttctgttttattctattctatccctttacaacttgattcgatatgtgttctagcagctctcttctttatacgagggtatacaaccggtgttgaagaaaagaaaagaacgagaacgagaaagagaaagagaaagagaaagagaaagagaaagagaaagagaaagagaaagagaaagagcgggaagacgggaaacgacgaacgcaacagaacgaggaaaggaaaagaagtaagaataaagaggatgagttgagaagtccaagaggaaaaaaaaagaagtcgttgatggtgatctcatcggtttccccctctctccttttttttttcctattccttctcctttttacattttacgttgattccttcgacttttcccttggattcttcacttgacatctctttacacgttcaagacacctactccgacgtgaaactctcgacacctggaacgtccagaccgagactaaccagaagaaactagcgagaccaaaacaaacggagataaaaacagattagacatgacgaaatcaaaatcaaccccggtcaccgtcctcaccggatttctaggcgcaggcaagacgacgatgatcctctcgatcttgaagcagctcaagccggattacaaggtgtgcttgttgaagaacgagtttggcgatgtcgagggttcgtctctgtctttttttttctttttgtttgtctttcttgagcttttgatgtattgtagaaagcccctggctgatcaggtttcccggtatttcgtttcgttgggggatactttacccgccgccgacgccgacgacgacacatcacaatcagtcgactcactcttgacggattctccttcaatttccggggtcgaagaggttcgtccgaccgtttcgccgcttgttccgcccaactgcctctcgccgtccttcgtcggcttgggatgaatgaatcgagagtcgccaaaatgctcatcatgggttctgctatccacacaaccccctctctcccccccttttaatctccttttcatttgttggacggatcgactcgaacggacaaaagatcctgaacgggtgcttgtgctgtgtcatggtcggtcagatgaagaatgctctgctcgagatcaaagagaaattcaaccctgttcgtcttctcgtctctttactaaactctccctgttattttctccaaagaagaaaagaccagcgttcatcttgagctgaccgtctctttcgtttcgcgtcgatgcggctctctcggaatccgtatatatacatatatacatatcaaaacaaaaaggaccggatcatcgtggagagctcgggttctgcgttccctgctacgttggcgtggcagattcgggagttagaaagagagactgccggtggcttaacgctcgatgctgttctcaccgtgatcgattgcagtcagtctcgttcttttcttctcttacttttttccctctcatgttgtttcgtcgagtctgttggtttgcgctttgagaaaccagctttgttgacgagatatcgagatttgtttcgcggttgatcgtttgggaatttttttatttatttcatcctcaaagtcaacttcacgggctacgaggatacgtcgcctacggccaaaatgcaaggtccgtctgtccatctggggttgaccctctgtattctctcgcgcgcacaaatctgacggtctcttttgtttgcttcctttccttgcttgcttgcttgcttgcttccttccttgcttccttccttccttcctttcgaaccgtcaaaaagcgaaatacacggacatcatcattcttaacaagtgggatcttgtcaacgataggcagctcgacaatgttctggatcatctttataccctcgtacgtttgtcctgtttcattcgtgtcgaacccgactaggaactctttctttatttctcacctaattcttttttttgtgaaacccccccgacaactcccctttcggcgcggcatccatcatcaaaacagaacgacgagacgcctaaacttcgacactctgaagccgacccacttacaccttccgtcctgtttggactagactcaaaactgttcctcgaacgagagaccgaagaagccgaattcaaagctgccggctggcaagaaggaaacagcagccataacgccgaggtcgagacgtttggagttttcagaggaggtgatcgatcggcttggcctaagcccaagtcgacgactggaaaagcgcacgttcattcggcagattcagggtgttgtgtcaagagcgagtcgtcagaggtaaaccaacctgagggggaagaagaagaagaagaagataaagctgatttgatcgattgggcaaccgtcaaggctttcttggataccctgccatcatcgatctacagagtcaaaggtctactgaacgtggtggctcccactgccgaaggggcttcctcggctaacatcactccgttctccgcccagccgttaccgccatcaaccgaatcctcaccggcagatcccacagagaccaccgcacaacgacaaccaacgacgacaacggggcgagggatttacatcctgaactgggctttcggccgttacaccctcacggcccttcctgcggcttccaagggcacatacaaaggcgtccaagccagattgacgttgatgggtgagcgaggggaggtgagaaagtgggcgagccggatgggagaggttgtccatggggtcttcctctagatgtgtttcaaggcttgacgttttatttttatactgtgtttcttttgtttcaatttgtcttcgttagatagataatatagattttcttttgtccacgagggggtcggttattgatagatgtgttgttattgtgtatgtattaagctgggtttgtggagaaactaccaggtgatcgaggagacgacggcgaggcaaggcaaggcaagaaggaacacagtctagagctcggtccaagaagcttgagggtcatccggatttttttcattcgtcttgtgctgagagacgaaggagagtgaagacgcggttggcagttccagtcctgccaagacagacgctagttgtcttgatgtccgaaggagaaaccatggatgagaacaagcgaaagacagataggaaaccccacgaaggctcacctctgttctcccgctctggtctctagcatcttgatgatctcctcgacctgatcctctcctacgtctcctcccggcagcgttctcgcgtactcaagagcatgatccagctgagattttatcgagccaacgatactcgcgatttctacattccttgcgtccgaccgggacgcgtcggctggatctttatactgggaggctgagatcaggtcgagcagcctagaaatagatggaaggattgagcgaggggattccaattgagaagacattatgaatatccggctgttcgtgcttcaagaggatggacggatgaatgtgtatgtgcagtcagatgggtgtatgcggtcaaaagagaaaaagatgagaataatatgaaatgtccctaatagaagactacaaacgtcctctaatacgagacgctgcgagcaaaacactacaaaacgtctgtaatgcaagactacaactctcatctagtcttctcgtactttctctcgaccggctttgttccatctctgtttagcgttcattctatttctctctttaccaccactcacaccataccagcacccacactcggctggctggctttcctttcttggattgctttccgttcttgttcttttcattttcccatcattgttcccttctctctgtggatctcttttctcttttgctctctcgcggcctttcttttctctttttgcttctcgacagatccagacacgtccaacgcttgccctgacaaaccataaaatcaggctttacctctcttcgattcgtcccttctggtttctttattcggccatccctctctcacttcataccccgggcttgataggtccaactgtatcacttctttcatccattctttgtctagatctctctttaaaatagcaatcgtcgcgtcatggtcgcctcatcccatccgacccaggcgaccacgttaccggatcctatcgtcaatccacacagagggttcaacttgtcccatcaaaaagtctcggtcgatgtctctcttgctcttggtgtcctctccggtatcactgagctgaccatcgtgcccacgtcgggtgacctccgaacgttgttcctgaacttccgtcaaggtcgcgtcaaacaagtctcagtctactcgtccgtcagaccaccggatgaccctctcgacttttcgtcaccaaccactgctgccgctgccaccgtcgcagagtttacccacaacgatcctctcgcctctctttcactctccaagcccacagacatccacacctttccagaggcgaagcgaaaggcctttgctgccttcgccgaaggtgagcagggtgagctcgcgatcaggcttaaaccgagtttgctcgaacgacaccgaagggatcctagtctgatgaccgaggatgaaaaaagggcggacgcaagacgggaacttgagaatctgtcggagaagaacggcatcctcatcattcagcctgctgggactaaggtggagaccataacgctccttgacttcgttcctttgatcgtcagaatcgagtgggaagtcgcgtgtggaggtgaaggtcttgcctggtttggtcgaggaggtgataacgattgggtgagctcatcttatatatatatatatatatatgtatttgggaggagttcggtcactttgacaatcgggcaccaggtctgactcttttttctttcttcggttgggatgcttccagcacgtaccgcatatatacaccacgccaaccacacctgatgctgctcgttgctggctgccgtgtgtagataatatgtgggaacgatgtacgtgggaactcgacttcatcgtgcctcgaagatgggtagatgatccatcgtacggaaagaagaaacggcagaaaggcaaagatcgggcgagaggcattcttgctggagacgaagagaggggcgaaggagaaggaagagcggttgtagttgcttgtagcggggatctggtggaacatgtgagtcttctgatcttgttcataccccgatatgatcctttgactctatcctgtttttgtctatgctaacatatgtctactaatctatttggctcctgaaggtctcccacccctccgtttcaacaaaatccatctttcgattcgttcaatcgattcccacgaccgtccagcatatcaccttcgccgttggtccttttgaagtactcacattacctccaacgccgaaccctccgcccacaaatgcgtcggccgccaacccttctgccactagcgccgcgaatcctccgtccccgctagccaacctggcctccatggacaacccaatacctgccgaggaagaagatatagagccagaagcagcagacgtccaggaagacgacccttcatcttcatctcaacccccgatgcacatcttcacgctacctggcacatcacatctgcttcaacattcgaccgcgttccttagaaaggcgatgagcttttactcggccgagtatggatcatatccgtactcatcctacaaccttgtgttcgtagacgagccgctcgaggtgtgcacttccggagcaggcatggcgattgccaacgtcgacttgttgtttccggaagatgtgatcgaccaggcttacgagaccagacatcttctcgcccacgcgctcgccttccaatgggtcgggatcaacatcatcccgaaaatgtggtcggacacctggctcatcaacggtctgggactatacatcactgggcagtttatgagaaagctactgggaaacaacgagtatcggtttaggctaaagatggatagagaccgttgcgcccggatggataacgggtctcagctcccaatctgtatgcccggttcaaccaccccaccggacgcaacgattcttcctttcctcaacttgaaatccgcccttgtgctgttcattctcgatcgtcgattaggtaaaacgggaacgtccctcggtctctcaagagtgatcccaaaaatctttctatcggccctgaccggcgagttgacgaacaacgtgctttctactcaagccttcttcagaatgtgtagaaagatcagtggagtggataccagagcgtttgcggaacagtgggtttggggaagtgggtctcctaggttcgacgtcacagcggtgttcaacaagaaaaagatgttggtcgagatgacggtcaggcaaaaggtgccggcaaaagatttcgagaaggacgatcttgtcagagaaagcttttggaaacccaccagagcgttcgaggttggtcgactttttgtcacttttctctcaaaacaagaaacagaaatcatctgaagtgtgctctgagaggagatggagtgaaaaaagctgatcaagagcttgttccattcttttcaatcacaaaaagggtcaaatgacggttcggattcacgaagccgacggcacgccctatgaacacgttcttgatatcagagaaggtttcaaaacgtacgatgttccattcaacacaaagtacaagcgagttcgacgaaacaccaagcgatatctcgctcgaaaagcggcagcagcagctgctgccgccggagatgccgatgccgctgaggcgatgggcatgctcgatcttggatttgatcttgcaatctgggaagatgaaaaagagagagaacgatggagggtagcggattggacggaggaggaagaaaacacgatggtcggagcaccttacgagtggatcaggttggacgcggattttgaatggatagccgaggttgtctttgatcaacccagtttttactgggttaatcaattgcagagagatcgagacgtcgtagctcaggttgaagtgcgttcttttcatcttttttttcctctcgtgggtcctgaataatcatcatctaaatcgaaattgtccttcttgtccaactctcgcatcaaggctatccacgcgctgaggaacaatccgacgcccgtcgtgactagtacgttgggtaaaactgtgcttgtgacaaattacttctatcgagtccgaatggaagccgccgacgctctgcaagttgtacgtcttcctcttgccaatctttttcctacatgaaagagggttgtttctcaatttcgttttcaaatcttatgacatacgctgcagccctcacataaagcgcctaagaacgatcaagatcatctcggtctgttcctcttgttcaaaatctttcagagcagatactgttatccaccactggatggcgaggaaccaatggatcatacggcgttcaggtgcattcccaagcctaacgacttttcagattttgcagaatattttgttcgcaaggttcgttgattcctgtggcttcatgttccatcttcaacaaatatagcctcgttcttgtaaaacttacgcatcattcttctacattccttcctttttcctcaaatgaaatcaaaaaaacttcttgtcaggcggtcctcattgcactctcaagatatgtacaaacaaggggttcgtccagagaagcgattagttggccagttgttcgacagttcttggtagatctattgaagtacaatgataactctatcaacaaggtcagcatatttgcagagaattctctcatgtcgtatcctactgatagcagtctgatggttttccgtctctgtcttatatgatgcgcgctcagtactcggacagctcttatgttgccaccatcattgcttgtctgggctactgtcttgtccttacagcttctgtcgaattgggcggagcttcaccagcagctgctgatttatcgaaaccagatcatcgaacaagtatattattgctcgaacaggcggcggaccaagtagatagatacatggagatggatagactggtgccttcatttcataacgtcgtcacattggctgggctggaggtttgttcgatatcttcgtattgtcaacttttctgatgttcagtctaacagtgtacgacaattcttctggctatctcaattcctttttcgctctccgctagtggaagatcaaggcaacattagcaaatctaattcctaatgatgttcgactgtttttggtctacacccggtgagttttttgcttggtgcggtccgttataaactgatacaagaactcgttgctaatctaacatttttttgaatttgataacacagagagggaaactatatccccgtacggttaacggcttttgattgccttcttctctgcctgggtcctgcgtccaaagcggaagttgctagttatatcttccgagtaatcactaaggatttatcccgtcttgtccgtcggcatgttgcttctgccttatcggaagcctttattatcgctctctccgttggtagcgtcaagttgtctcatacgccagtgatcgtacagaactcggccgaagcggatggaggtggaagtggagcagtaagtggagacggaggcccaggaggtggaataaaatcaaaagttcaggtggacgaggttgagtcttcgttaaaggctctgaagaaggagatcggtcggtcggctgtcatgagggagggcatcatgggagtaattgcgttagttcggtgttcaacttgaaacttgttctctctcctgatgccactgagactgaattgtgaatcttgttttgggaacggtattcaaccagttctcctgaagtcgattttgatgtccggtggtctatgattcaattagccgatatgctcgtccgtccggcagaagaaactatgcccaagctagtaattcatcttcaacccactcctgcggtggagccgaccactccgatgttgacgccgaggatcaagctcttcgctggaaacggcaagtcactttatcattttatgtactcaacaaaatgttgcgctcgacctgctagttcatgcattgacaaatcagctcttttttatcatcttcacgatttctagccccacctacacctgtccaagagaatatcgaatttgcctcagcgatcccaacaaacccgctcaaggtcgtcatccctcgtcaaggttcccaggagacaattaaagtgaagaagaagaaggaaaagccgaagcctgtgatcaaagcctgcaggtctggcctatccgagatggatttggtggcctgtcggtcgatgttacggaaattggttcgtcccgtttgatatagaagcgattttgtatttattcctgctaaccggtaagcggttgtcaaatttatgataggaaacgcacaaatcatcagcttactttcgtattcctgtggatcctgtacgagattctgcactagagtaggtcatagtctccgtttgacaggcattccaatcaatgtcgtgtttgttatcatatgctaacaagcaaattcgatttcgctggcctctagctacttcgccgtggtcaagaatccaatggacctctctacagtcaaggctaaacttgaagatgggcaatatccaaatcggttcgcttttgccacggatgttcggctcatcccttcgaattccatgcattacaatcaaccagggtcccacttgtacaagcttagcgaaaagttcgacgcatatttcgagaagcaatgggaaattttgaacagtgagtctcgaccgcttccaacggcctagattcagaaaagtgatcacgatgtgatgttgattaaagtaaaagctcaccttggttcatcgtctatcgcttcttcagatgttttgtctgccaacggagatggcggacctgtcgtacccgctgtacccacaccagcacccacgcctacggtcacggctgcgcctgtcacttcaaaggtatcgataaagaaggcatcgacgatcaatggtcagcctgtagcttccatgcctccccctcccctaccagcttcagtaacccttccgaaaagcactatgaccgccatcaccccccttcctcggccaatcatcaagcttaaaacaaacacgaccccccttgccacatcaactgatctgcctgccggtccgagtcctgcaatcccttctgtgccacctctggctgccacagcgggctccaacaatgcaccagttcctgtcgagggcaaccctcaatttgtcaatccccttgcgaaggagaagaagagcacgaaacaaaaggtcaagatcatgacgccgtcatcgacgcctgggcctgtatccaaatcaacaccttctcttaaggtcaaggctgtggcgacgacaggagtagacgatttgctggatgaagagcttggtctcctaatgggtagttcgcctcctccggcgactcgcccatcgaacttgcctgtcacgatccaacggcctccttcgccaccttctgttacgactggaccacctttctcatcacaagccccgtcctctgtcaaaggcgtcaagttgacgtctgggaagatcaagctgaagagtgtggagagcccggcttcaattagtgtgaagccgaagttgaaggaacctgagatggcgaagatcaagttgaaggaacccgaggttgcaaagatcaagctaaaaacgcctgacgcgatagcatcgaacttgacctcgacatctgcacctacgccagaaacttccaaaaaactcaagatcaagga

SEQ ID NO: 2837 - DNA, 4699 bp, Xanthophyllomyces dendrorhous
agcatcccttcggccccggcatctagtttagaaccggccaagaaattcaagcttaaaagcaaaacttcagcaaatacttcgccggctcctgctccagatcccggtcttgttcatctcgcagaaagcttgtcaaaatcgcattcaagtcccgcgcctcggccctctttaccttcagcttcatccattccttctttctcgcagctcccgcctccgcctccgccacctccctcactgttactgccaccattgacaaattcacccggaatgttatcccctcttccacctccgccgctagctaaccaaccactgagtgggtcttttgattcgtcaagttcatacccacctgatcggccgatgggatcgatactcccaccagcaattccaaaggctaggccgagtccaacgttccacaaaaacaaggaccggattattgtaaagagagcaagaacgttgatccagtcggtcttgcgcgttccggctgctttcattttcgcccaaccagtcgatccagaaagagacggttgcccgacgtattatgatgagattaaacgtccgatggatttcgcaacgatggacaacaagctctcgaagggtaaatatgttacctggggtgattttggagctgatatcgagctgatcttcgcaaagtaaattacacacacccttctgaaaatgagtaggagggagaaaatgacgaacaattactgacttcgttcattcttttcattagttgtcgacaatttaatccgcctgggacgggccctaccgagtgggcggatttggtggaggaccatgtgcgaaaggtagaatggccccgagctacactgaaggagattttgccagaggagaaaaaagagttaagcgggatcatcagcaagctcattcgctggcatggaagtgaatggttcagagatcctgtaagcccttctgaattgactatacgactaatcaaataaagagatgaatgctgatcgtttcgtactcatcgttctcaattcttgggaactaggtggacgtggttgcgctcaacatcccagattatcccaatatcataacgcagcctcggtccttgtctgtgattaaacagaatgtccagtcgaatccgttatacaactacgacctattcgagacagacatgcatctggtgattgacaatgccaagaaatacaacggtccggattcagctgtgggtcaggcggcaacgaggttggagaattattggaggagtattgatagtgaaggaagtaagaagcgaaaggacgcgagtggaggatcctctgggggaggaggtcagatgaaaaaggtcaagcgctagtgcgttgtgttcttgtatgatgtatctttatacgatgaatgtactctgttaaatgagcagtgtatcatgtagaagttgcactgcactgtataaaccgagtcggattggctgctgcgcgttttgccggggccacctttcgcccatatgcgatctctcttttaccatctaacatccatcctggccatcttctatctctgtattctgtttttttttgtctcctctcccctctcctcttctcttccagatggcacccagattatcctcaggtgcgcattcaaatttgagtcgagtctggactagatctcggtcttccgatggggaaaagactatgaggaatttatcgtcgtgtgagttttgttttctcaactagtcagttgatttctcttctgtttgaaaaaattaagaaccattcgttgaagcctgtatccatggcaccattcctttccccaaactaggtctcacgatgaagtatccatcaagtgttttgtttggccaacgtcttctctccgaccattctaaaaggtcttcaacggccttcggttctaccaccatttcctataaaaccagcacccatttgccgatggtgagaacgactgctgcctccgactccctgcgcatacgttcttctcaaccatatcgaaccacttatcaaactagacaccaaggagtgctgatgaaaccgcgaacatacaagccagcttcatcatccacatctcatgttgcttttgtaacagcgacttctcaatcatcttcatctacatcttcgtcactgcaaaaagtccagatacaaagtcgacccggacgttcttccttttcctcttctaatcgattagatgcttcatcgaatacgcaatctctacccggtcaagtgtcaccctcttctaggtcttcaaaactaccgcttccccctccgcctcgaccatcgcctttaccttcaccttcacctcaatcaaaatctataaacacgactgtacctggtctattgggagtcgctcaattccaaccacttaattaccctagctcttctctttccacgctatcatcatcaatagattctcctaaatcttctactggccttcctgatggtatctcaccatcaacttcgtctcatcaagcatcatatgtggcctcctcggcaagtcaccccccaatagaatttcagcttttaaggcctctcccagtatcaagagaagcagaaaggaggaggaatggtccgaaacatctgcctactctgaaagcaagtcgaagaccatttgagagtacgcctctggagagagaaacgttgaaggataaggagaaggagaatcagacggatattggaaggcagtcggaagtggcaaagttaagaagtgaatggcaaaaatcacacctagacccaccatcgtcgctagatgacctaccctcggtcggttcgttcattttcttccatcatcagcttgaaacgcgcataacttgacgtcagatgagattcattgtgacctttcctcggcgggaattttccagatggatcgatcgagatggctcatgcaaaactatacattcaggccttgaaggatcaacaaactgatctttttaaaaggtttgttcatcatctttctttctctttgatcatctttcgtatgatactgaagcctattcgctacttgtgctggttttactggtttgattgaatctaaatggtcttccagatttaacgaaaaccgcgagttggtattgcgcgcgctgaacgggttaccagactcgtctatggatgacgccctaaacaagatttctggtcaaggtagataatttactcgaataattgagcaaccacatgcaagaacatcgtttctgccgtaagctgatagcatgttcggtcgcctaacatgatctaccgacttctcacgtctagacactcttcaagacccagtcaaactgctcgcacccgaaccaattcgcaagctatggttagcaaaaagcgaaaaggatgtaagagcagtgttaaagcaggtccagaatatatatcagtctggtcgggttcccgctttacctacattttatgaggacctatctggttcgtcaacaaaatgttcattcacactgaacagagttcagcaatactcatacttcatacggtgtttacgttcgtcttttaattctgtttaaaataaacagtcgcctgcaaacgtctcgaattatatcatctgttgggtgaagtcgttatgtcctcggataattacggtttagaacctgctccagcaaaatatctctcttctcttcgaggacttctaaagcatctaattgataaggaatcctcgatcctcgattcaacctcacctcccacgccgacggcatctggaatctcggaatccagggctttgccgttctctcgtccacgtgaccattcattagagccatcatccctccgattgaccattcctctgctcgaccaactatttgttcaactcccgttcgaccctgtcctctgcgcgctgtctcttaaagcgttgtctcttctatctcttacaacgtccaatgcttctcttcgatttgcttcccttcaagagtctctcctaacttcagatatcccctcttcatggacggtccggacgggtaaagatacatggtggagtggtctcagtccgggcgaaattaagttacattcccgttggttgttggaagcactagattcagtcaggtctttcgtacctccagagttggctttgttgtggaaagcggggataccaagccccggactcgattttcatcgtgctcggttgagagaagttttcctcttggtcgatcgagcaaaaccaaaaccttataccatcactttggagcgtttgaacaatgatgtcagcaatgacagtatcaccaacaacaaacacaaaggtcgacatcaacatcgatcatcatcccaagaggacaccatgtcggacctaggtctacccaaagctctcccacttgttcctcgactgattgaatctttcctcgattcacctctcgcatcacatcattctgatccgatcatcgttcttttttcactcgggatcaggatgaagatgattcctgacgaatcagcattgagagagatacactggacgatcagaaacttgcccaagttggcaaagtcttgggacaaggtaatcgcttcgaccagtcgtcagatagaaggggcagggtggatttcgaaacaagacagaattgtagctgaggcttgcttggggatggtcgaggaattgttgaatgaaaaggttgagctgtggcagaatgggctttcgctcaggaaaaatgaagtgggatagagaatacaatgagctcctttccagagatcaagacaacacattcgaaaagaaaaagagatagacaaacaaggaccactctttatcatcaacgttataatac

SEQ ID NO: 2838 - DNA, 4667 bp, Xanthophyllomyces dendrorhous
tacatgtacatataataaagtaacataataatgacaacccttctttgacacctcgcctcttgtgacgatacaaagacaaaagggtcccagacaggccaataggaacaccagtcaaggagaatctaaagaaaggaacttcctgttggagggtctgctttcccccttctcctgtcttgtcatgatctctcatcctgagccgtcgaagctcttccccttcctgtttttccatttccttcccttcctccaccatgacgaacattttcttccctccatccaggactcgttgagcttcttgctctttctgatcttcttgcgtcggcctgtaacagctgttgctgttgttgatgttgtagctgttgatgataatgctgctgatgtatcgacgcacttcctccccctccatttcctccaaatccgcccgcaccagcacttacaggggcaactgaattatctttgatgaaactctcaccaatgactcttccgggtgaggaagagacgagcagataatgacctgcagaaagcccacgaagtgtagctgttgatgtttttctgcctcttgaagagggtctggtaagggtgatagcggccggtcctacagtctgattgtgaccaaatgtaggtgtgtgtgatcgtacatgggaggaaagaatggatggagaaggtgacgacggtctcgagtgaggaaagagagaagggtgataagatggagaaggtgatgaagggagggaaagaggtggatgcggagctgaagatgggaatgacggaggagaatacgatgatggagtgaggaggtagacacctaagaaagtgatcaaaagaccaaggatgaagatgattgaactgaaaaagaaccggaacacaattatgttttcaggtcccattcctcctagtttcgaacaacaggatcacaagagggagacaaaccggctcaatgaaacatcatcaaaatccctgaagagaatactagatccgacaatggccgaggttgagaacagacaaaactgtgttggcaccacaactttcgagtcaaacctctggagtgccttgttcaggtatctaaaaccgatgcaagaatcacatcaagtcgagagcaacaaccgatgagaaggacaagagcgcctctatccagtgaatgatttgaggaaaaaatataccttagttgaccgatgcatgtaacgatcaaaacagctaggattgggtagaaaatccatttcgaaaagacgtccagccagagagtactaagcagactcgaaacagctttggtcgataacactgtttgatcgatacgagatagtttgcctccttgatcagaagttgattcacagagaaatgttactgtcagaccagacatacctgtgaatcctccaaggagagcgcacaagccaacatctatcagaaggaaccgatcgtcccgccccatttctgaaaatacaatcaaacagcctacacctagggccctatagatcgaacttagttcagctcagtaggctgactccaaggtgactttagacgatgagataagagatcgtgaacgtacatgagccccgagtaggcaacgaagaacggttgtttgagtaatccgattaagacgtctggcgtcaataccgattgatcatctctcgaggccagcacaacgatggaggctccaatgatggccaagaagacaccttggatgtctgaactcctaaacgtctctcctacggtaccagaccgattcaaaaataaacagacaaagatagaagatcagcagcgcccaggatgaaagtcttgagaggttagaacgaacctaggataaaaggagcaaagacccaattggcgaccaaactaacagttcccaacggcgctaccacactcgctggtgcataagcatacgatagaaagttcccaaactcgcccaaggtcataagagacagtccggcccaccaaactttggatttaaagtaagacgggccatccttctcagaatatgttgatctcccctctaagatccaagggttgaaggtcgaatcatccccgttgtcttcttcctctacttcttgatcttcctcttcgttaaggtctaccagcgattcactgcaaacacctgttcttgtcgaggagagaagggaagtttgctcagtcggtacacagggatcaccaacgggtaaatccgaaggaaggggtaaaggggttgaggaggctgaagatatcttttcatgagctagtttctgaaggttgagagccagagagatcagaatatctgttatcgaacagaagagaaaatcaaatgaggtcgagaacagtctttataagtaacgacgattaaattcaaaagggaaggaggacactaactgcctgaaattgaaaagagtacaccgatgatagtcgcctgctgagtggcatccagagcaagcatccttcctcaaaagaatgtgcacaaaggaagataaactgaccaaaagaggtcgaacgagaaagaaggaaaagataaacaagcaggccggacggaggacgaaagatttatgacgatttaccctttccttacgcttattcactcgacccggaattcatgcagttacgatcaaacatcctcacatcttacagtcactttgccggtcatcgtgatgttggttacttggtttgactttgatggcaatctacattctgtattggttgctatgatggtatacaggaagtgaataccaattcaaaagaaaaaagatcccagagcagacaggaactagacaaagagtttttacaaagaagcaagaggaaaataggacaaaacagaagatatcatcgtacacgtcgtcaggaaatcgcatgcttttgggtggggtgagggaacagagaaaaacaaaaaaggaaatctattggaaagcgcctcgttctaggttcaacagagatgaaaacatgggaagatgaagattaagattcgaagttcgaaagatagtcaaaaatcgaaaggatggtgaagaattgataaaagagaaacagaaagagaacaagatgtctaaatgcaagatctagtagagggttgaacgaacgaagctaaggattaactttttaggaaaggcaatgcgtgcgaatattggggggaatggacgacacagacgaagagagaatagacaaatcagatggagagggacgcgaccgagaagaaacagtgagaagggcaaagatgaaaaattagaggcagccagggcgagatgattgttgaaaaagaatagtctacattcgattaccaccaagagtttcctcctccctgctgggggggaggtcctccgtaaccggaagcaggagctcgaggaggggcagcagcgaacccgctagaaggtgcccctccgaatccaccagatcgaggaggaggtcctccaaatcctccggaccgaggagcacccccgaaacctccaccggatcggacgtctcggttaccccctcggttgttccttcctcctccacttcggtatcctcctccaccgaaagaagactcgtgagcaatctcgttcaaccaggacgggatgtcctggttagcctcccgaagaagctcgataagctccctggcgattcccttatttcctcggttgaagaaagcggtggccactccggtgttaccggctcgaccagttcgaccgattcggtggacgtaatcatccacatccttaggcaaatcgtaagaaataacgtgagtgacgttgggaatatccaatcctcgggcggcaacagcagtggcaaccaagaaaggggttcgaccgctcttgaaggtgtgaagagcgtgctctcgctcccgctggcttcggtctccgtgaattgaggttgccatgagtcggtggtgacacaagaaatcgcaaagcatgtcggccatcttcttggtctcggtaaagatcaaggtcaatccaccagcgttggtggactcctcggcgtggaggatatcgagcaggaccgatcgcttgtcgggatcctcgacgtactcgacccgctgggtgatgttctccgaagtagatccaactcgtccgaccatgaggaagctagagtgaacaagtcaatgaggttcaacttatgtatcgtgaacacggccgcagatagaaagaaagatgactaacatgtactccttcaagaagtctttggcaaggaactggatctctcgagggaaggtagcactaaacataagagtctgtcggtcattgactccaggcatatcctcctgctggacgattcgcctgatttgggctgttaatagatgaaaacaataacacggccacagatacgttgagtcaaagatcgaaattaaggttcaacaaccccgaatagaaaaagaggaagacttacgttcgaaacccatatctaacattcgatcagcctcatcgagcacaaggtacttaacgttagccaacgagattcgtcccctctcaatcaggtcgaccaatcgaccgggagtagcgcttaacaagtcgcaacccctctcaatctgcctgagctgtcctccaatgtcggctcctccgtaaacgacggccggcttaacccaagatcggtagcagaacttcctagcctcctcatgaatctgagagactagctctcgagtgggagcaaggatgagggcagtagggtaagcctttcggcctcggtgtccattgaaggagtcaccagcgctgggaggagctcggggtccgttggtgaaggaagcggaa

SEQ ID NO: 2839 - DNA, 2823 bp, Xanthophyllomyces dendrorhous
ttccagaaccagtctgggcacaggccatcaaatctcgaccctgagccacgatgggaatggagtacttctggacgggggtaggagtagtgtagaaggcataaccgatgttctcgaggagaacagggtcaagaggggggttcgtaaactgggtgacggggtcggggacaccttgtccggtagcctccacagggattgactcgtacttgtcgaaattgattccggtgtgctgtttatcgtaaaaacagaaatatcgggaaaaatcaaacgaaaacgcgtaaacggatatccatttcgactagttcgaacaattggtaaggagacgaccaacctggtgagtcttatcatcggcttctccgaaaagctccttctccaaccgagggtttcggggtccagggacatgcttgccatcccgccacgaaccatcgtttcggtttcctccgtatcctccacctcctccagagttactccatccacctccacctccacctcggctgtaggaaggtccgttgctgaatccgttcgatccagcgccagagaatgcggtggaagaactgatagagcaaagtgtgaaaggcacggcaggtgcgtaagcaaactcgccactagaaatgaaaaatgaagataagtgtaaacatgtctactaacggctggttgatttggggagggggaacggcagcaggtcgggaaggtgctccagaatttcgcatgtggggaggcacgtaggccggtctagtagggttgagtccgacagtgcctgatgtcaatgaagaaaaaatagcatgaacacgagttcagtacgatagtcaatcaagagaacaaactggttctcaaaagaaaaagaaaaagaaaaagaaaaatcctttttgcctcttctcaaaatggtcgccacacaaaaaaaaattccacccaacctcttgaggcaagaggtgaagggcagtacatgtatttgtgcgaacgaccagagaagagaggggcgtaaaggagacaggcaaaacactcttgaagacataccgaacttgttggtcagtccgttgacatcggcggaaccgttagaagttccgtttccgtttacatggttgttgctcattctatgtgtacgagaatgtgttctgggtatgtgcttaaagggtgagtgggtgagaagtggaaaaagagcagaaggaaaagaacatgaaaaaagaaaaaaaatgcgtggtggattgaatgagaaaatgcacgtggttacaaatcaagtaaccatcacgtgctagttctacacggataagagataacccatgttagaaaacgacgttttgagattgtcttcttgatgaacacaaggtctatgtatgcgttcatcagttggaagggttatgatgttattctcaatgcctatatgcgccaattattttgtcctgtgtctatcttctcccacaggactataatatcattaatagagctatcatcgtaaagctattgtgcaagaggaggtatgtgtctagctagcagccactttgatctgttttaaagacaacacaacttcacagaaaatcagacactgctaaaggaaagagttgaaatctcagaacaagatcaaacacgcaccgcttcaatgactaccgtcttgtcgccttctgaatcgagatagaacaaccaagtcgtttctgacttgtcctctagtctgaatgagtggaggacttgaatctcctcatacgcatctgagatatgaaggtgatctgccgaaggcagcgcaatagtattcaacggacgcgagacatcctagaatcgaacagaagccattgtatatgagctaataagcgttattgtctttcattcgcgaacagagtggagaaaagttgagggacaaacatttgaatctttaaagataagtagctggaaaggaagaatgtgaaaaaatcgacgacgaaagattagggtttctggagcttgaaccgtcagccacttttcgcgatcatgattaagattaccccaaaaggtacaggttcagaacaaagagagatatcagttcccagctagacgatacagacggaggaaatggagacaaaaagtactcacgccatcagccacgacacctccagatgatctggcgatcttgagctctttttggattctgttcaacgtttcgatctcctccgtttgtagcagagcatgttcattcctctttctctgttcttcgtctttcctgtgcctcctctcggcttcctcaattgcaagtgtacgctcccgagccgactttaatctattcgcagcttcttcttcccgacgagcctgtcataatccattccgaaacaccgttaaacaaggttgactacgaagcctcacacagctcagctcaggatatatgagacgtacgatttctatcctttgctgctcttgctccttgagccttcgtcgttctctgatctcatcctcctgtctagtccttctcgaactgggctcgacaagactctgggccctttcaatcaagtctcgatcaacttccctccgtcgttgttcttgatccatcaaccacccaccactcgtcccgcgtagcctaccaaaactatttcttctctccttctgtcgttcctcttccttcttcaccacctctcgatcctcatctaagtcagcctgagctcttaaccgatatttgtcaaacgtaacaaacgaatctctcagaataggtgactgagaggtgtagaatgttttttgggattgaccctcctggcgttcgctcgcttttttgggtgttgtcatcattgctgtcgcctccgccagcgaggatgatgcaggcgcagaggcactgcggttagatggggcctgaggaatagcggtagatgagac

SEQ ID NO: 2840 - DNA, 7182 bp, Xanthophyllomyces dendrorhous
agcggtagatgagaccgtcaacgatgtcggatatttgggtcgatcgtagtagcttatgggacgtatttcagtgggcgtattgtcaagaataatctcatgaacttgttgatcatgatcgtgatcatcgtggttttcaggagattgagtcataaaattcttcaacgaagaccagttttcgccttcgtcgtatgcatcttcataggtacacgagagcactgaatctgttgacgcgggatcctggttggaggaagtacgcattcctaggccaagacctgcgttttcagacggtcgattgagttgagtactcagtcttctgaggattgtctgatggaaagcgctctctatgggctgatcagaggtcgaggatgcggaagaggaaggaagaggaggaagagactggacggatgaaccaggcagaggacgatgtccgttggagaccgagcgtgttccattcttgtcagtaaccccgttagattgtgaggtctttgatccaactcgggtgtctgagaatatagggagatttaatgtttttgatacaccgtcctttggaggaacaggaggtggagttatggtgtcaaatacagagccactttgtccgtccaaactcggtgaacgttcgttggaagaggtactccttccttttcctttccgtcctaagattgatagatttgaaaacagtgggatggacggtcgagagaaccggactgatgatgaatgttctttgggagagctgggcggagattgaacagaagaatcggaagagtaacccttatgagaacttctcaacctggatactgggttatcgttttccttcgagacatcggcaggttgaactgctgatgatgatgatgatgttattgttggaggagaaagggctttgaccggaaggggaggtttggtttcgataggtttaggttgtgaggtatgactcggatcagataccttggtgctcagcagacttgtaacagggtcctggactcgttcctgtttctgagcttgaatggtattgactggtccggaggacgagccctgagaaactgggtgagcgttgtgtatattgatattagagaaattcgtcgatagcgggggcgcaaggtttgggtcccgagccagacgatcccgggtgatttctgaagaggaagaaaccatgaactctatatggtgaggctatcaagaacgaggttcaacccataccggttgaagccacgtcaataatcagtaccgaacgttttgctgggactcgcgaaaacaactcacatcaaatagatgacttccaactagtcgtccatggatggttgctcttgctcttttgacgccccttaggtgatacgaaatatcgttctgttcaaaaagagtcccgatgaacgtaaaacatgggaataaaagaacatacccgattgtctgtccgacataggtgatataggttatcatacgaccttctctgaacaacgcgtaagctacatcttgatcaactttgtctaagttagtttgaagatcaacgattcctcctgagcctgccttggtcaacacaagtttatctctttgagcagagtagctcagaataagcctattgtaaattgcttagaatatctaatcagctcagcggcattcgaggtgaatgacaggatcggaatgactcaccaactatgtagttttggtccataaaactcatccacagtttgaatgactaaaggatcagataggtctatcgacatcgtctttgttggtgttattcaatctatctgatgatattgaagatgaacgatcaatggggtatatgctctgagctctataattctcttgtctgttttgagaagatgttaatctgccaggaatgatcatcaaaggcttggggtatcatggggtgattatgatgtacatgggcagatttggggtggaagcttgtcagcctcaagcacagcttgaaaaaaataatacaatttggagttatgtccgaactttcaactttcctctttacgaaaactcactcttcaccttcgattatcactcaaataatggacgtctctcagcatttaaaagctcacaggttggtctattgggcgccttcaccgaccttaataagaacactaaactgaagttatgatccttcttcttcttttagccaggctgctatccgtgaagccgaggagagcactctccaggtggatgcaggtctcttggccgtatatgatccaacgcctatcaacgaggccgaatacaagtacgttgtatatctgaaccgaatcagatgaaaacacgaaaagagacttataacctactactctgtgtcaactcttctgctttcttctttcccctttccataaaaaagcatggacaaggaagcctatttgacttctcacgctttgccctccttgcaaacccttctgtccacactattctcccttcctacttctcgaacatcctccggtcctctcgccacacttcctccggttcagacaatgcttccacgagaaaagtctcttcccaagccgaagccgcctacgaagtgggagcgatttgccgccgagaagggaatttcccatcgaaacaaagacaagatggagtgggacgacgatcgacaagagtttgtcgcccgatggggacgaggaggtcttaacaagaaggtcgaggagcaatggatcaccgaggtcaaggtcgggcctgatggtaaggatatcgatccggcagtgacggccaaggccgaccgaaaggcccgaacggcaaagaacttgaggcaacaggagggaaatatccgagctgccgcaaagctggagaacaaaggaaagggaaagaagggtgtctctggtccagctcctatttcaatctcggagggccacgagttgggggccggaccggcgggacgagctggaaaagagcacaggaagcaggagttagaaaggagggtcatggtgaacaagctttctactgggagcatgggcaaggtatgtcgtcacgtcttgttgtgttggctcgtgtcacattgcgcccttccttttcaatcggttattcactcctgataccttgaatatgacaaccatcagtttgacaagaagcttgaaggagagcccaaagtcaaggggatcaagcgaaaggtgcgctctgctatcctctactctatatcacttcttgtgttattctttttcttgccgttgtttaatgcttgactgttgcttgctgaacatagtttgatccggtcacaatttccgccaaacatgagcacgattcttcgatgaacgttctttccaacactcttggtttaaacaccacctcaaaacgtgtccgagcggaggatgcgagcgagggtgttgtcaatgttaggaaggctattaggttcgagggaaagcgagaagctgcctccagaggtggtcgaggtggtcggggcggtcggggtggaggacgaggccgaggaagaaagtaaagactgttttgtttttggaaatgatacttatggatggactgtttgcttggtttgcttggcctcctgcatttccttgctgctgatgctctgtgatgtctataactctgtttcgttcgtatatctgtccgttacaccaagaagtaaccggagaggcaagacacaagaacgaagatcggcttgaatgtgcttacctaagcaggcttgtttgttgatctttctttcttcttggctttccgttttgaactttctcctctcgcaaggattgttggatcccgttctcctttctttactctagcctcgttttcgtctgtttctttcttctttgtccatcctttaggttttctctgattttaagcggagtagattggattttgtggtcctctgtttcaaacccgaagatgttctctctagtacccttcttggccgcactcgcgctgttccctacaaatgcattctccctccggatcccgctcgaacgagccgtccgaccatccgacctcggctcaccgttcgaaaatctaaaccaagctcataatgctcttgaagctcgctatgcccgtttcttggctcttgatggcgatgatacgcgacagtcgttggagcgtcgttggagagatcgagcacaagccaggagactcagacgaagacagattttgggagaggaggcgagcgatgatgaaagtctcgtcaaacgagcagatgcagagatttcgttgacgaacgtttattccgatgcgtgagtcttcttcttcagagttgacccgaaccgtactttccgaacaaatatctttcatctcctactcccgccctgccttctcatcaaaagtattttcagcctaatcgttaaatacctttacgtatgtttcaattgaaccagaacgtacattgcggccatccagattggaaccccttctcagacggtcaatgtcattgttgacactggatcgtccgatctgttcgttgcgagtacggaatgttcgggttgtacagactctgcctatgagtttgatgctgctaagagctcgtcccttcaaaagtaggttgttactcttgaaaacctcttaaactccgtctgggccaaatagatggtctgctctgagatgttccgtttattcagcgtgatcggattgaacattgatcggatattttgttttcgtcttcatttttattccgtccttcttcgtccgtgcgaaaactagatcgtctacgtctttctcgataagtaaggctctcacccccgacctttctttcctcgtcattcacgttccagaccatacgagcctgatcattgtactcttgactgaaaccaacgttgaatagcctacggctctggaagcgcgcagggtgttcttgcaacagattatgtctccatcgattcgttcaatgtctctcaaacatttggtatgttttacagattccatctcacttttcgcagttcattcgtctcgaagaaaatctgactctaaattttacataatctcatttctgtgcacgttggttttgtttgacaggcttggtgtcgaaaattggtaattctttgatcttcagtcctctctctggtatctggggattcggttttcagagtctatcccagtctggtgccatggtatgttctcctctattcttttttcttccatatagcaggatcttgccgcattttatctaaaccggatgtatgaataaatattcttcgcgatctgtgggtattgtaacaactcaaacagccttactggttaaatttggtcaactcgaaccgtctcacggacaccatcatgggatgctacctcaccagatcgagctccaatgccgtcacttctgacgggggagaatttactctaggatcgattgattcttcgcggtacacgggggacatcaattacatcaacatgccttctgttcgcctctcgcttatttgttgactcttctctccttttctatgactctgacgctttaactgaccatgtatctggggattttggttcaaatgtttaggggacgcaaagctactggatcgtagagatggactcaatcactgttggctcaaccaaggttgctctatccggcaagaaggttgcaatcgacactggtcagttccctcaacttattttctccttggcatgttgcacactaaacatccttgcctttatttcccgatttgtgatctcaacaaactcgataacatgttcataggaaccacgttgatcgtgggtccttcggccgacgtagctgccatctacgctcagatccccaactcccagtctggcactgggggtcaatatgcgttccgtacgtcgtactaagtttcttctacagccgttcttcttttgagctcagagctaatctgcttgataaattacaccttatctcgtcgtgtagcatgcaactcccaaacggtcgtctcgctcgtttttggagggatctcgtatggaatcgatactagagatcttaagagaggatcgtacggtggtagttcgacaatgtgtctagggtccatcgctgctacagatcttggatctagtgcgcctatgaattggatcgttggagatgtctttttgaagaacgtctatactgttttccgatattctcccgcctcagtcggttttgctgctctttctggatccagcaacgttgacttcgtttcgactgcgacagtcgccacatcttctgcccgtccgagctctacaacctcatcagctggaacagtatccgctccatcagcaacctcatcaaactctgcttcttcagttccaaaatctagcattggatcgtcaacatcttttatgcggacggttctgacaagctcatcgggcagctctttgggttcagccactgctacgcctctgagttcaacgacgatgaccactgaccagtctggatcgagcgccgctgtggtggtcgttactggtggaatcattaccgatcggctgcctgccgcttctgctatctcgtcaacgtcagcaacgagtgcatcggttggggtttcgacatcgagtggagagagatcaaagctggtggttgggttgaagatgtgggtgggggctgtagtaagtggagcattggtcaatttgtctgtcatctgagtcggtcagtcctctcttgaggtggaacttaacagccttgtgaagaacgacactttctcttgaccgtgatactcttgcttcttcttgctgtcttttctctcgccaaattctattctgttttcctgtcaatcgttcataacaattcttacaatctttactcgcaacgcatctatttcaacttatccatgtcgtcggcctctcctttcattcgtagaagtttttcttctcgcattagttgtcatattactgtctactgtccttttcttcttgtccatgttcctgtctagtctgtcattcttttcattatactatcaatcaacctgatcaatcaattccccttaccaactctcctcttcggccctaccggatgatatttcgttcgctctctgcaaagatggccatatctctctttctcttctttctgatcaggtcttctcgtcgagataggttgatgttctcccttcatatagatggactaaaccgattggcttttgtctaaacctctcttgtcaaatcttgtcaatctctgtcagacgatcaaacagacagtaaagaacaggtctaacttgagtttaggaaatgaagatgtctgccccaaaaggattgacagaggatacaaccgtcaaatgaaacacgcatgcatttctcgacatgtacatgacttcgtcttgcgtacttttcttc

SEQ ID NO: 2841 - DNA, 12672 bp, Xanthophyllomyces dendrorhous
ttgcgtacttttcttcttatatacatatataatatcacacgactcgtcctgtatgaatagacaagtagagaacgggagaaagcaagatgaagcagattggaatgagacgatcaagctccgaaatccaacttgcgcgctacttttctctctcgttctccttgtcctaaactctgcccatccggtccacttggcggaacctttcgttttcgagctccagctccattatcattctcgctaccgtttccattaagctttcctcccttggggttttgtccttgtaattcaggatccattactctggccacttgaacggcaggtagtggtagctttgagggatgagtaggataaggttgagtctggaaatattgatgtgctagtgactagagaaggtccaagaatataagttcgcttttttccacccgatttagatgttcataagagaaagggaaaaaaaggaatcggagccgcacttgtctagcatccaatcgttgataaggatcataggccaacaaagattttattagatcgaccgcttcgggtgaggcggctgagaaatgaaggtgccagggttgcttaggtataaccggtaaaacaacataatctggcaaggtagtatggccctgtattacgaaacagcatgagaagaagaagaaaattgataataaacaatagttagtaatccggacttgagtcttcttgagattcttatgtgaactccgttagaagaggagatatgaaaatcgaacaaaccggccagtcagcttctgttgggcttcccatcgcttgccagatctttttgagctgttccaggtcggtctcgcctgcgaggaaagggacgcggagcatgagctcggcaaatatgcaaccgacagaccacatgtctaccgcgctagaatatgctcttgctccaaataatagttctggaggtcggtaccatctttcgatttggttgcatccaaatcaatatccaagaagaaataaagtgtgactgagtcagaggcaaagacggccacagaggtatacttggagaggaaattagaaaagtactaaccgagtgatgacctggcaggtcatttttccactgccatcagagaactctctagctagaccgaaatctgcaagcttgagcgtcccgtccgcgctgatcagcaagttatttggtttcaaatcctgtgcacataattcgattttgaggatgtcaatatcataccatcaccatcatcacctgggaagtgcgtaaaacaagcttatagacactcactcggtggagaaccccgttccgatggcagaactccaagcctcttagcatcatctgcatccagctcttgacatctcctggcataaagatcagggacttgttacggatgagatattcgaggtcggtcgtcaggaattctagcacgagatttaggtttttctttgatgggaacaccgagatcatctagtgtatgaattgagtgaaaacagcagttgaagacagctcgaagagagcaagagtaatgcgataagcatcatgggcaacaatcaaggacaaacctcgatcacattctcatgcttgagttctctgagaaacttgatttctctaatggccgacatatccagcccatctttaaactggccaatcttaatctttttgatagcgatctcccggcctgtcgctatttctttgcctgaatagttggatcacaagataaaagacaggcattcaaagtccggctctgatggtgatatgatgatggctggaataaagaagacatcatacgtacctcgaaaactagaggggagcggacggggatatatagaggtcagtttcgttgaggaacgagcggaacggtatatatagctcaaaccacactcacacactagcataggtaccctctcctacttttgccaacttgagaaagtccttagaagacatctgatgtgactgcgatgtgtgtgtgtgtatattcgagaggacctatatgggtatgaatgtatagtaacgactttcaaaagagccgtttatgcaagtcacgtgatagatattcattcaacccagatccgactggttagacatcgaaggaaaccaccgcgaagccggttctaatctcccttaaactcacacgatgtgctcttcttatcaaagtcgggtagagagatgacacatgcgaacctattggtgatctttcgtcagctctgtgctaagaaaaaaaaagaagaaaaaaaaaacagatctgatattctttcctcctgtcattcattctgttttgctcgaggtaaaaaggtcaggatttagtcatagtctttttacgttgctatttcgcatctcgcctccaacactgatgaatcttaagcagcagatgaccaagtattggttcttaattctcttgtcaaagtgtgtcgaccagtgggtcatcgggtattttatctgttgcgtctgtcttcgccgaccacaagtggttcgatgccgagacgcgtcgagtgtcgagcttctcctggacttgattcgagctagctatctttgtcttatccagtagttattatcgttatggcaaatggtgcatacaactgtcatacgtagaaaacagttgagtcattcgatagtggaaatcaggcaataagaatggagagcgcatattcggtgttcagtcgtcgttccgaaacttccctctggtgaccgagcttagtaggcaagaacggaaagactacgcgcgagcgtctcttgatcttaggaatgtttcaataactatggatttcataataaaatgctgaatcagatattttcatccgtacccgtggctcttgacatgtaatacagcctatgtagagacttttctcttgtgatacgtgtgggcattcattcaagacctaggtgaacacgcgacaaccaaattacctacaggcggtatgtgtggactaattatatgatgggctttatttatccgagttacataagccgcagaatactaaactcgacgcaaataattctctgaacaagcccgccaatcttcctcgacttctgctcgtccccctagatgacttctcacttgctcttgctttcgttcattcgtacttagaagtgaaattgcttttttgcagcactcttatgctacttctactaatcctgtagtggttgttgcaggccttggttttaactgtgggcccagcggtggtcgcatagagtaggaatctgcatagttttctgctgcagctgagttctgtgccgttgcattctatcggctctatttttaaatcttacgctcttcctgttcttatgatggatggtcgacttcattcatatctccgtgctttcgttcttttcgctttcttcttcgttccgaacaacaactctctccgtcgtgttttcactcctctcttggccaggctttaccgttggtctcgcgttcttcgtagattcttgaagaagtacaggttcgtggtttcactgcatttaaacatccgctctatctttatttttgacttgatcactcagaatttttcttgatcgatataccctggcctatcagatcacaagattctctatcgtttctcggtcagctcgacatgcgcttgcttggtttcaacgtcgcccccttcggtaacacttatgagctcgtaccgacatcacaggatgcttttccggtcccaaactcgtcaaagtcaacgacgcagctgaacttctcacgaacaccatggcttaccgctgcaagggttagatggacaatcggcgccatacccgccctttctctcttagcactcttagggtgtctagagaaccagtcgatcgccttgcccgcctcggctccgaatgagcagacacccattcagtttacagataactctgctgtgccagaagaccactggcacgcgaccgaataccttctcaatcatcctatcgttcaacttcctgcagataaggccgttcgatcatcaataccgattccttatcaggcacccagttcggcctgcctccttcatctctacactcttgcagatctcaccaaattcaaccctgcgctctgtccctgttcggaggttccttcaccgatagatgtggtagtcacattcgtcaatggttcggacccgttcttccgacgagcgtacgacaattcgatcactcatggagagaaagcccacgatgctcaaccggctatcaaacgatactcaaacatgggcgagatgaagtactcccttcggagtgtcggcagaaatctcgctggtcctaggctacaggcaggctgggtccgcggtctcggaggggactacaaagatgagagaatcgcagatgatcaaagactaggtcagatcccgacctggttgaattggaaaaatttgcaacagaaagcgcatatcgcaggtcaattgacttctcgagcggaagacggattggatcaaggtaggaagctcgcttggcactttcactcagagatttttctaggagatgaagaatggactaaagaagccctgccaaattttaactcgtgagtggcctcccgtctgctccgaacagccctgatcggcaagcgtagggcagaaagctcattaacattatcttcttatcaattcagattcgccatcgaatcacaaatatcgaacattccttcactcaacccaaacttcatcagcatgaacgacgacttctttattctccgccctctttccgcttcagactttcacaccgacctgttcggtccagttctcaggttacaggacaatttgaaggtgaccggaaagcaaaatgccagggtgggtgatcctggagaatggggaggactagaatggggagcgtatatccttggtgagtcgttggttctctctttgtttgttaaagcaacttatcaatctttaaatcacctttgtggaaactcaggtcggagacatccgaacaatggactagagtatctcaatcacttgccaaaaacgctgtcccaacctcatctacatgagcttagtctgacatttcctcaagcaataagtgacgcctcgaaacgaaaatttcgaaggcagaaaactggaggacctgacgtatgttctttcctccttgaaataaggtgtctttgttaacccagtatcacttttttcttggatgatcataacgggatgaaccagattgagatggccttcctccaaacacattacattcgacaacgatttcgtgaagcccttctatacgcatacgttgttgctcgccctacacgttccgacggatcttctatttggggtcggatcgagcgggacgaattaatcaaactaggagtggatggatggagtggtgtaattggagatttccagggaaagggcgaattgaacaaggacgtgttcaaatcgatcttgagcactgcaaaagaggagaccgccttgagtactgacttgttcttcggttcgtctgttccgttttcttctcttttctgtacctatatggactaaacgacaacaacaacaacaacaaacatctactgttttctggtttgaatttggtctggtcatcatggctttttctgtattcgcagtctccgcctctggactcccacccaatagttttggtcccaaaaccaaacgatcaatcgatctctccagttgcctcggtacatggtggtctaacagtgaagaggaaatcgactcggttgagatgttcaagcggttggcatttgagagggtagattgtggagatatgtgttcgttcagctcctccgttctcttttttaccgaagttgtctgggaagttaattattggcttatggactgcgcttgataaacacagtgatctcttctatattgtctctgtcagccgaacctggcctgacagatctccttcctcgacctgatacgttcttcaatccgtctggctcagaatccgaggctgagccgccgatctatcaagttcctcatttaccgctgacgcccacatgggaggaagctgactttacccttcctgcactctttccctcctggtcgggattagacccgagaggagtcgatctaatggattggacggtcaggattttgggccggtatcgattctctttaggtttgttttttctctcttccttgatttcctcaaatatgtttgtgcgcgcgtatatggattgttgactgacaacgaaggtgaaatttccgacgtctcttctctttcttctccataggacaaacaccttcttatttcaagtctatcacagataagagctctgtcccccgagttatgacacacatcaatcaacacccggacctggcgctcttggcgcttaatgatgatcttagggattcaacaacggataatgatcgggcattatatgtggcccagatcagaagctggggagaacagatgttccctggggaagaatggtgggagttttgaggaagttcaccaaggagaacgagagattgtttagagttttcttaagtttatctgcatgtagagattccacatatttgtatcggtataccatgtttagattgtttattaagagatagctacgatcagtgcgtgcttctttcgttccctagcgcgagaatgtgttcaggaaagaggaccaagttcaaagtatgggtatcatgatgtacaataatgataacagctacagaaacccaacgagaagggaaacataaacaatctggaatgatagagaggggagaaatagaaaagatgaatgaggctatgttttagacgatcaatcccatctgtcgttcctatccagagcagtgagctccttttcgagctcctcaacctctgatgccagtctctcagccttaccctttatcatggcaagctttctttcgtcggctgctgttggtcttgatctaggtttgggttttggctgactggactttgatgaggacgtagctcccgatgaggatgagttggacgctatttgagcgagcttaggaatcaggaggggttgggtaatggaaaaacagtcaagatcgtgaagcggttgtcaagactcgacacttattattcaaactagaaacccgtaagaaagaaaactccgaacttttcgcttctttaagacttctctgcgttcccaaacggccaaacctctttctgcccgactgatgagctcatcaatctgaggttccatctcgttcgccagtctttgtttctgagcctctacaaacggttctggaacgaaaaggtatctctatcaacgtttgtttagatgcccaggtagagagatcgatcagaaatgaacaaggagacacaagagagagttcagcaggctttcgcgcgtttcttgaagacatccgaactcaattatcatgaatggactcactctagaattctccatcacgtgagatagtcgaggaaagtctgagacggctgattgcagaatttgaatagacgttttctcctgttttagagaggatgtgtatccaagaatgaggtggtcagtatctcggttgcctgatgtgtttcggtatgatgtagtaatatttgtagaacgagaaaaccaacatgagctacacatgattcggtgactctaacacactcagaaaggaggtccagaaactggccacctgaggacatcgctgtggaacaggatcgagttggtttgtgggtagataataaacgataaacgaaagaacgacggatgctagagggcgtgtgttggaaagagggaaatgagaggatgttgttgatcagacgcgtttgacttttgacaattaaccatcgtccatcgttcagctcgacctgattccggaaagatggcatcccatacaaactccgttccttttactcccagaccatcatcctctgcatctaatcgctcgacccattcaagatttagagcgacgggtgctacattgagtactcgcgaggaaaacaaggtgattacatcctttctatcagcggactgaacacgcatcctatctgaacccgcgtacagtccgtgcgtgttgtcccttgctgatccatcgtttgtttctccttgttcatacttcttgaccattttatccatagatatctcacacattggcgtccatcagaaaacctgctcgtccgtcaacgctctcaaaccaactggaacatgctgatattccccaacaaccgttccttcgtccatcatcctcgtcttcttccgtcgcacccggctcaaccgtccggaacggattgatggctccgccgcctgtcccatcagctacctcgaggccaagatcagaaagacagtcgacaggctcatcatctggctcatccagaaggcctcttacgagcttgtcatcaatagagcgaactgtagatagaaagccggatgagaccggtcgaaaggagagtaggagggacgatatcaaacgatccgctagggatggcaaagagcgaggtacgtgtttctctccatttagacctcgctagctctgatccagacgagctcacgacttaccctgtaacctctgctctccatcatgtattcacgaagaacatgtctctcctctctcaacagccccttcgcctccagcggaatacatgccagagccttcaccttcacctcctgctgacagtgagaacttcccttttccttacacaacagggcgttcagcgtactgactctcttgttccgctctcatgggcatgtttctatctgtagcttttttagagaaaagtagccttttagggaagagtgaaccattagatattcaggaagcaatcgtcatgtgcgatttgatctctgtcctcaaggtgtgcattgatgtatattcgtgaatatgctgaccaaacgcgtagcttccactgacattttcgaaaatgtgttatggaaaatgaaaacaaaagggaatagaaggtcatctggtttcgtatgatcctgggtatgaccccttggacgaaggagaacgcataagaggccccggctgggtcatagatggtaatctaggtatgaacacaaatcccatgaataagcttcgtttcccagatcttatcatctcattaagataattcttgtcttgcttttcgttctccattgtttcagatcaaagttttgcatcggttcttagggagattcttcctatagcctcatactacatgggtgtcaaggccttcgtcgagtccaggtacgtttgatgtatctgtcttcactgatatatcagttaaatctcttaaacttacatatcgtgtgaatgcagatgctctgcgtcatgtgggaaagtgaatcacgctcttgggagaggaattcaggagctcttactagagtacctcctcctcttgactcagctgcaagatttactcgacacaacgccttcgctgaatttacggaccatgtactaccatcttcgaccgacaatacattcgctttcaattctccactcacttgccaatacgctttttcttgccgacgacgacgatgacgacgatgaagaggacgaagaggttgatgacgatgacgacgatgatggtgtgttgggagtaagaattaaggatatccagggactagtaggtgaaggacccaagatggggagaggtggtggtgggctggtcatgggcggggaggtcctcgaattaatatgggagatacattggcaaagcgggtaggtagtctttcctttcggttctcttccttggtgccgcttgtctcaaattccttctgaatgaccttctgtctgacaatcatattgaacccttttgatgacgatatcgttggtttttcttcagagacccgatagcacaagatatttattcaaacttgttccttcatgcgtctcagccatacgccgagatgttggttgattggatctcgactggtcatctttcggacaagtctgaagaatttatggttaaagaggcgacgagtatcacgaaggagcagctcgacttggactttacagacgaatattgggaaagaagatataccgtccgtcccattcttctcatgtccccaaatgtccatccttattcaggccacgcaatctttctctaattatttcttcccctcttttctcgtttctgtgtatgggactatctagcttcgggatgggtcgacagcatcaaatatcttccgaggtggtcaacctccatcaactgctggaattcctcttcctcgccgaggaacagaatcgacgtcaaatcctcgtcttccaggtggagcctgtatacccaaatttttggaaccatggaagcacaagattttattggccggaaaatatctaaacgtgataagggaatgtggagcaagtgaacgacagggtcggccgtccgagtttagggcgggtggagggaggatgatcgacatgagggatgaattgtgagtcatctactggcctgcgctcctcaaatttagaatacgctgatattcctggttccctacagatttcaaagaaggattgaagacgcatatttctatgccaaccaaactttgctcaagatgctgatagaagaacaggatctcaagtctcatcttcggtacgttgtctaactgatattatagccttcgatgctcaacagaataatgaaacgtgtcgctaactccttctgatgttttcgatcaaacgaagttcgttgaagtaccacttcttcttgagtcagtcagcttggatgacccattttcttgatctctccctatctgaattcggaaaatcctccaagaatgcctcactcgtcaaactccagtcgctgctcgagttgactcttcggacttcaggtggacaggtcggtgaaacgcataaggataatgtccgggttgtcatggccggtcagaagttgcatgattttttgaacgcggtcgtaaatcagagtgcggagttaagtggagagaatggccgagttagaatgaactcggaaattgtaggaagcgtggcgccttctgggggcaggaaacaagaagaaaagaagagagagcttcttggtatgtaacattttagatttgtatcgtttcactcttaaagagcgctcttgactgacttcaaagttccaatctgatttgtttggatgatattgtgccgcgcttccagcgttcgaggcttttcaattggactataccgtcaagtttccactctcccttgcgatctctcgaaagacaattgctcgttaccaaattcttttccgatttcttctacaactccgacacgccgagctccagctgtctctgatgtggacggaacataccaccgatgactggcgtcgacgtacgaagctaacttctttcgaagcttggaaacggcgagtatttgccctccgcgcgagaatgctcgggtttgtacagaacctgtcggctttcttgagccacgaagtgctggaaccgaactggagaaacttggaggaaaagctgagcaaggtgactacggttgatcagatgttgaatgaccatgtggatttcttagatacgtgtttgaaagaatccgggttgacgaaggccgagcttatcgccgtaagtttttatctgttctctgtcttctttgtgcttcaacctgttttctcacaccgtcatgaatgacttcttgaaacgactaatgcgctcatctttgggtgaattttatggctactctttgccgaaatttcatctaggtcatcgccaagatcatagcactaatccagaacttctgccaccacgctaaagttctctctagctacgcccgaaatgccatggatgctatcgatcgagcgtcttcttctgagatactcatcaacgacgagaaatcgcaggaacgttcggatttattggaaaaatacgagagaaacttttcacatcagatctcggttcatatcgatcggatgacataccatgccgggtcggatagtcagtcttctctcctctctgtttatctccctgtctttgatattctctcagtcctttatgttctgagtgggtgaactgggtgtgctcatctgcgcgctgctcttcgcacgtctgtggttctcttcgattgatagatacggctctggatccacttgtcgctcggctcaaaggaaacctccgacccaagacgagtctctcgaattgagaagcgcgtctacatccaagcttctttcacatcccggatctttcaaactgcgctgtgtatgttatcctctggtctctccaatttgtatttgtatgccctcatcatttgcctttcttttctctcctcctatctctggttccttgtgtttgatacgtacttgcttgaagttatttaagactcaactacaaaccatatatagatatgtatagtaataatgatgatagcgaattcaacacaaagaagcgaggagaggaagaagaaaagctaacaagtgagacgaacaagtgcaaaaactggagcaggttgtagaaagaggagaatgcacaaagccaaatttacagacttataataggaggaataccacaacggtatttggagtctaacgagaaatcggaatgaaataagagaacacttgtttcaggtacgtccttttctttatcatctctttgagtattcggtgtctaacagaggttcacattcgcatgtctttgcggataaaccttgatggtagtacccaaagtcacatcgcgcctcaacctcgtttttttcgaagaacatcgcggtcgtcatgtgtcgtaagggagagtcacctatatggttcaacagccagtaaagagcgaaagaaatccggtggtgagctttacattaggaaggcggcctgttaagagaaatagacgaaggagagtagatggtacttaccccatcggtattggaaaaacccgagagggtacgcggcgattgctcggatccattcttgtatgt

SEQ ID NO: 2842 - DNA, 5542 bp, Xanthophyllomyces dendrorhous
tgttgtctgggcggtcaagccccctataaggcaaaggagggcggcgccaatgataccgaggagcagagatactccacgaatgggatgaatcttgagcatcttgagtgtcttgagagcctgatgaggactgatggacaaaaagggggatcaaagtgagattgagatgaacccgagtaattagaacgtagaggagactgagaagggcgaacacaagaacatccttccttcatcttgccctcggtctttgtcttttcaaggatggtctaagatgcaagctcgaggagggataccaagacgagactgagtgtatgcgtcgaccatacattgctcgtgcgtcggttgtgcatgaacgaattcatgatcgtgtcgcgcttgcaactaccgataagattgtggatgtatttttcgtatttaactgaatataccgtgagttgtctcaccctaccacagatcagaacgggaacgaagtcccttcgaaattaaccgctcatcgaacagcttacattcattcaactctaagtcacatgctcatcatagctcataagcccctgtcgacccactgaaaatcgggtgaagaagaaacggacaagaacgaaagagatacagtgtaggaaggacaaatagacagagaaagagagagaaagagaagcaacagagccgatcagtatatcatcaagagaaatcccgtttttttttcttcacaatagtcattaggcgatatagaaaatcgttcccttaccgaattaagtcgatgagcgtcgtgttgttcagagggatgtactggctcgtcatcagcttgatcgcttcctgagccaccacacctccaacgaacgccgccgttgttggaatatccgactggccggatcgagccctgtatagtttcaaaatttccatttacacgatcccatgaagtaccaagagaccatcagtaccaacagaaattgtgttttgcgtcgattgtgagatcccatcacttacatctctcctaaagcatctttcacgctttttggcaaacctcctttctctcttgtttcgacttggcccattccatcctcctcctctttctctgaagcctcctcttcctccttccacccacgctctcccagaaacttggccgcgatccgttcaaggacgatcgtatcagcctgataatcagcatccatcggtgtaccaggataccgaccgtgggtctgatgaaagacatctgcacatcggaatgctatgtactgaactatcggtggcggaacataaggtatttgccaggttggatcaggagagaacgataggatcgtttcttcgttaaaccctttttccttccgctcctgctccaggcttctccctctaatgaccttcaagaacgctgcgtgcttcacaaaatcctcaacctcatcctcacctaccgcatcctcgtccagtcctatctcaagcaggactttggataaacatccttgaaaggccactacgtcctcctttgcttttgtcttgtagactgtctggagggccacataagactgggtgtctgacttcatatccggaagaaaggaggacgtagggagaagaccgtcccctccaccttcggatagaggtaggcgaacgaatgagcgaagtgcacgaatgagcaaccaaaagttcttggactgccaaagaacagaccaaagagctcagtcagtatataagatacacgtttaaagtcatgtctcgaaagagattggctcacattctttgtcacattttcacaagacggatcctcaaacaattccagaatctcggaaggtatctacaaaacatcgtcaaatagaccggagactatcagacttctgatacaccgacacgttcaacttggtaaaagacgaacctttgtagtttgagtggcgaggaaacccttctcctgagcttcggcaaagttctcctcatccccgtgccttctctgttgatcaatcagagtcaaaaactctttcttctggctctgtttgccggaccacttgggtggctgtccatcgtgctacatgggtagaaaggatttcaatagctgtcagctcgacgccaacttgatgcttcctttcagggacaaacagtacggtcgagtctaagcaaagactcactgtcctcttccattcttcgagcgcgcggatcaagatgatgacgaaaggtatgttcccatgttgcattgagtccatggattcaaagtctaagctgttggcatgttcaagcaaggccggaaaggggttgtcgattcgaagagaagttagagacgcagggtgtgtatcaacgactggattgtagagtcaagtacccagtagtgagcagtcagatgaagcaaagtagataatttggacaaatgtggtgaatagcatattcgagaagaatagatgctttacaaactggtatgctctctgatctgaactcggacggatcccatgaacccagccgaccgaacaaggataagaggaatgtctgggtgagcacccaaggaagtagctgtagatgaggaagggtcactggctgatgtacacaaacaataatcagatatcaccagtcaacatttgtataggcgcgacagcactaatcggttggcttaccggaccaaagcaaggatgacagcgcttcttcgtctgatgcaggtaagttgacagcgatgatcaatgtaaatccaaggaaataattaggatcctctttaagaagagtttggacgtcctgtggtgacgaatacgcgcagtagatgtgagactcatgatgtccgatcgcgacagagcaaggtcatcaagtagtgtccgttaacttactcctactttcccaaccccagtcacactctgattaagttccccaacgaaccggacggtttctgaagcaaggggtcgtccaatggattctggcataaggaagaaattctgtccaatatcctgtggggtcacatcccgattggaaagagtttcgaaacagccgattcctatttgtaagagagaatgaacgcgctgctgggtcaatggttaattcatagattggtcgagacacacatgaagatacgagacgccaagcattgtattcaaagttctcaccgggtaagacgaggtttttgagtgattggcaaccagtggctataggattaataagcagtactctagcggactctaatcctccttgaccagaggctccccatagtctgatcatcgccggttcaagatagattctcatgagtcaggatttactcgacattgagttcaagaagaaatatagctaattcaagcttaagaaaaagcgcctcaacacgtacctgagttgcctatcgtatctacgagtctttgcatcaggccgaatgatcccttcagaccttcgatgaaagaaaggctggatatgagtttcaaatgacgaatagataaatctgactcggaccgatcggtgataggatcggagagcttactgggaggacacagaagggacgaaggtttccgccgctggaacggatatgtgatcttgcatttgaatagcacaaatatggcagagaacaaataatgggttgggtggcccagaaagaaagattgtctatagatcagcaagatgagatggatggcagagacggagagggaagaacgaggagaccgtggaagcgactgctgtgcttgctattagatcagacacgtgattttgacgtgttagatgtaaccctaacatctctgtggtgtaatctaacttgctcttctttgtgtttctccgacatgaaatgctccgaagactccttgaccatcttgtttgtgtcttctgactgtcagatgggtctcgcatgtcgctcggtttgaaaacttcggcacaacaaatatcaaacgttgaattcagtatccattggtgctcacaaatagcagaacaaatctccatctcagctcgctgtcacgatagtttggctgctgattcgactccttccgagtggccttctactacattcacacttcagagctgacgacgtataatccatgcaagcgaccaagatgcattctcataggcgatctagtcaaagacggcacgcatgatgacgcgaagatatgaggatgtcaaatgtagatgtagatgtgaatgtgaagatcaaagctgctataagactgatcgtagacgcgtatgcatgcagtatgaaagagaacgaagcataagatcagttatctaacagagcatacaaacaaagtgtgctcttacgatcatcatcgctgtggaggacagttgagcttaaccttctatctctcctcagatgtcttgcacttttcttgactctttcagcctaaaaccatatctagagattgtatatagacatacatagacgccctttgtatggggtttcaatccgaacactcaaaacaaacggataggactctcctgtctgatcgtgattttacatacatgccgtattctgtacttctcgggtatatgacctcaaatctctaccgcgatacatctcagctattgccatgtttcccgtagacgatgcacaagaaagctatcatgtctgtcgacacagacatctgccacagtgactacacaacagatgtcatctagatggtcacgcttgctttaagcaagattccacaaacgtgtctacacgatctctataactagtgtaatttatttatcagcatacaaagagaccatagggcgtcccgttttcactataggagcgttattgagtcagacaatttgttgacttcctctgagttggctccaattgaacaaggacgatgtattttctaacagaaatgaaccctctatctagagccatacttgtgatcaaacgtacacttgcactttcgtatgtgggtgcgcgtgtgcatgcatctgttctgaacgggatgggcgatattcataaggatgcctaagaggcaaatagacgaagcgactaggaaatcgactgcgacccaatacaaaagacaatagaattagaatgcttcgattttcctaatgcatctcgactgtttcctaatgggcagactagaaagaatgaaatttactagacatctgaccacaaaagtcaggtcatttttcgagaaaaaagtcagacaccccaaaccgccgggtcttctctaggcacacaacgagagcctttgagccttttttttacctccttatcctcaagtcaagtagtcattcaaggttagtatgcccgtccagaatacgatagatatgacaccagtagcacctccggataccgtgtgagagatacgaaccacaaatcagagaagcacacacacgcatttggggccgtttttggggaggaggaatccattcatttatcgacaaaaatctactctgggaaacgtttaaggtggaattcaaggatgggtgtttttgatgatctggtgcccgagtcgaggttctggatggagtagagagaggacatgcagatagatagggatgattcggagggagcgtgtgtgtgtgcctccatatctacttgtgtttcagaatcgggctctagaggtgctccagaaggtctgtcgtgtccgttcaaaaggtctaaagagctgactttcagttctttgttgcctacactcctcaaaaaact

SEQ ID NO: 2843 - DNA, 12318 bp, Xanthophyllomyces dendrorhous
caaaaaactccgtccttttaaaccctaccaattcaccaatcttgcccgacgactcccaaaccattttcccataacgttctattgcctcattgtcaatcaattacgacaatccgtacacgattccttctgaaactccgatctctgccaccacttctttttaaaacaactagatgaaggtcgagatctgctctttctccggttacaagatctacccctcccggggacgtctctacgttcgaagtgactccaaggttcgtcaacctaatcagctgttcttggtagccgacagcttgatggggaaatgaatgaagtctgatcaagaagcatatttttcctccttttacccgcgatttctgtacctcttcccctccgaattcgcaacactgggcatccatatgactaccacaaaaccacaaccaatctcaatcaacttctttatcctcttatcaacacttttgacttccctgccaacccctcatattcgcacttcttcaacaacaggtcttccggttccttaaccagaagtccgaatcccttttcctccagcgaaagaacccccgaaagatcgcctggacccaggtctaccgacgaatgcacaagaagggaatcactgaggaggtcgccaagaagcgaagccgaaagaacgtcaaggcccaggtgggtactcttttgtttttgggtttgagccggagcgagtagaagaggtgcacgaattggttcagctcatcatattttcttgttctccatcctttgccttgattcaatgtgatatatctgatttgggttatcgacttggaaatgaacgataatcgactacggttgtgtagcgaggaatcgttggtgccgacttggcttccatcctcgctaagcgaacccagaagcctgaggtccgaaacgccgcccgacaggctgccatcaccaaggccaagggagagaagaaggagaaggcttcccgacccaaggtacgtttgactttggagttcttatcttctataagcttgttgttttctgaccacctctcaactcggctatattctcttttttttcttttgggcctcattcactctccgatttttgattgtgtagaccgcttccaacgttcccaaggtcagcaagcagggcatgaagggaggagccaagccccagcgagtgtaaaaaccctctgaggatatgaaccctttcctacccaccctctaccgtcaccgggccgacccagacctgatgatgtcttgattacttccttgaggtttctccccacattaaaacattaaaacaaaacaaaaaaatctttttcttgaacgtttgctcatgatacatctccctatcatggctttcccatgatctgtgcacaccctatttcttcgtgacaagacacaaccagatgagctaacttgaggataccctctagggacacatgaatggaaagtgctaactgttcaacaatagatcaactttctcagaataaagtcgatcattctcttgtcccgaaaactaacgctagtcagttcttctcggctctccgctcgtgtttgcagtcgtcttagaacgattcacatcgccagcctcccctaccaccatcctcgaaacgagttgacggcgttcagccaaacacgccgcgagattctattacctcgtatatttttacctggtagctctaaccctaaccaacctctgtctaaaacgcatctaactaaatccaatgagcgacctaacctctagattgtctaacccgggtcagatgtacagacgtacttgaagaacagaggccaactatctcctttctctttccattcatgtattccctagaagctagaacgaatgtccaagatgtatttttatttgtttgtttgtgtgttcacgtaaaatgaaagaagaacgagagagaaccagggcgaggcaaaataaatagaaggaaaggggagagagcggcagaaagatgattaggaaaacacgatagtggtagaagagaaagaatcaggaacaagaaagacaaacaagagaggaactccggtttaaagagaaaaaaaacgagggtcgaacgaatgggttatgctacgtcatgcaagtacataagaagacagacaaggaaggaagaagcaagggctaaggagcaggagaggaatgtgaaatagggtatgaactgattccgtcagagcacagaggaggaacaaaaagtctttgaaacaagtgaaaaggagcaagtttagaaagtaagacgaaaaaggaggaaatttttacttcatgaaccaaatagacaaggatggaaacgacgaaggtaaaaggtagaatgacttgtttgttttcatcaatcaaagttgttgaactggtgcacaagtacaaagcgcacaggagcaaatgagcagccaagaatgtttatgtgaaaagtcggaaagatacctgtgtcagctcgctgtggtttcttgaatactcatcccagatcctccctcacagaaaatacttactctgagagataaggaactgtttctcgtccttcgatagcaagaaaaagcagtatgaacaagatgttagatcaagattgcctctagacagcggtgaagttctgaattaaatgacttgaaccttacattgaattgttcatctaaccaaaaggcaacagtatgcatcaaatacgaagatgcagacaacacatcagccaagaacgtcgttttatgatccgacacagaatgtggagcgcgtcatagaaagctcagaataaggcgaacgtatcaggaaagaggaacgaaccgtccttatcgttatggaaattcttcaagaaactgagtaatttgtccttgtttcgttgaaggatcaggacaattgggggtggtttgtttgggttagccacaaacacctactcggaggcatacaggcaggacaagataaagttgtttatcaattattcattcaaaaaacgatcctccatcatggccagtcagagatagtgatgattcagaagacgaaccttgaacacatggaacgcctcgaactgaatgtttttactcttgtccctcagtaggatcatcatcatcttgaggtttgcttcattagcaatgtacctcgtcatgactttgtaattcgccctatcgagcaggatttcgccaagtagcttaatcgactgacgcttggtaacataattggaggacaaaatcagggtggtatatgttgagaagaactagtgtttccatcacaaattttgtgttgtagttgtcattgagaggatccagagatgtagagggtcagcaagcatgactaggaggcgtcagatatatttgagtggataacaaacgcggtcataattcttgtccaagaatgaggctaccatcggtttgtgctttgtcaatagttcctatgagtcgaatgatcatatccccaaagaagaagagttcaaactatgttcgtggcaacgctaagccttgtgtgtaaaagacaaaatggaaggaggcttacctttagattccctaatacgtcacacgagattccgaaagtcgtgttttcgatgtaagacgggaacgtgtagaatctttgtttcgaccaagacaccacaagagaaatccaaagagacgggtttagacataatcaaccaactgcactggcgtccgcatacgagggaggagaacattcaactgactgttccgaatacagaagtatctgcgcaagtgattcatacttgagcatctctttgagcatcatccccgtgttgagcgcgacatcctcatttgagtatctagcgcaggtatgaaaggtagaggggatcagcgaataattagagaagccaataggcaaagagtagagatcaaagcctgcagggcatgccaaaggattgcgaaaagacacaccctttgagcgtagcaaagatgatctgaggtttcttggatatatactcgaccgttggaaatcgagatccaatctgtctgcgaagcaaatgattgaagatttgagttacatccttcttggcctattttaatcaaaaagaaacaaagaaaagacggaactgtaagctcaagcgatgcaaaatccgaaggcgaaggacgctccgaaagagacgtaagaataaatcgagagcgccgagacagaccgacctcgaactcaaatacacctatacgttcgatcaagaggagcagaacatcggttgagtaggcttcctgagcgagctgagcgattccctctggcgatacgtcgttttctgtaagtacaatgcgaatgggtaagtgtgatcgattcccagttgctcacaacgaggcgtgtcgaaggtcaggaaaggaaggatggaggaacatgaagaagatgaagacgcacctgaatctccatatagacatgttttgatctgagccagtagtttcgagagttcttcgttggtctgatatgaaaggaacaaagaaagggagagatgtgcgagtagagagttgagaaacattcagtcttgacatgcttgtaacatggattcctcagatacagagccttaataatgccaccgtttgaaccttccaacgttgatcttgctcttcaaaggtgtatcaagaacagagaacgaaccttctttcttccatcatagctgcctgtgctaccgtccagccttccgccgggtgctacgaggtctctgaccgcccgaataagctcggttggtgactttggtctcttttgaaagaagttgatctttgtagaagaagatttcatataggaatgcgttgatatatgagtacgacgttgagtgtccgtttaggagagaataagggcaaaggcaaaacaggaaggtgagaggacgatggttgttgttttgaacgcgtcataggaaaagcaacatctttaacttcttcaccttcttttccttcttttccttgatctagacgacaacgacgactcgtagcaactgtcatggaggtcgcagacatgacgattgcagatgcatcggacatatctatgccatcagatacttcaactgaacgagattatagcactaatcatcgatcctcgttgactgactggatcatcccacctcttgtcattctttacatcgtgtgagttcttctgtcagatcgctttctcgcctgaacagttcgattcgataatttctcaatccctcaatctattgattacatacatccgaatactgtgttacttcattgaagaacggggtttgtgtatactactcggacagtctatcaacaataccttgtcgaccacctcaagctgatctccttcttgcctcgttcgtccctcatgtctgacaatgcgttcgactctgattgatgttagatcactcaaacgcttgattctgatccgattcatgctctgtctcgctcagagctctaccttgcttctatctgtatattccttccaatcatcttatgtctctatctatctctctatctgcttcctcagtaccattccgctccgccagccgtaccacctcagcaggtgcttgaccggtcgatcccttttgagtgcgcggatcgagagggaggttatccaagatgctggaaagatgaatgtaacggtagatggaagccaagcagagttagacattgtgggatttgtaaaagatgcagggtcggattcgatcattgttgtccttggtaagtctgtctctgtgatggaagaatgatatcagaagacatctcattcaccacggtcttctttgtttcctccctcttaaccaaaaggctggcgtgagtcttgatctttcggcctgtgaaaggaattaaaaagctcactgcatagaatattccatcattcttaggacatgtgtcactacttcgacctacctccctttcctcctctttctctctataacccctgtggccgtgttcttcctcctgcttcctcttgccaaaccgctgtttgctcacgcaagtgaagtctgggcgtttgcacgtgactccgaaggcccgattaccatgagatggttcaactggaaatggagttgggtcttgggaataggacccgtaggaagacttatggttggttttatatgggcttgctgggtttggaacaagaggccggtagaatcctgggagtcgggagggggacttttcttaagcttgattggagtgttggtcgctctgatcgctgttgtatgtctctcttctgccttcatccttgggtctgttgcgcatatttctaacaaaacattcctaatctgatgttgcgaaccaacaagggcctgttcatatccacctcactttcaatcaaccgcggtatatcacccatcgagtctcgcatttacctgaactaccgtcgtattgaccccaggttatacaatgccgctttccctccgtcacccccacctctaaccgaacgtcttgcgctcaactctgtttcttcacacaccctactgagcgtatcacgcgcagatccaagggtcctcatctggatccctcatccgacggtgaaagggagaggaaaagcggtctatacaagacctgatgaaaaaccttttgatctaggatggagagaaaattggaagacggtttggagggagggtataagggatggatttcgagtttggagcaggggtagtgttagtgacagtgccggtgccagtgtcgatgtgagctcgagtgggaatgaagcgagaaagaggggtctgattgcgttgaatgagaatgtgttgcataggctgaggtatgaagccagtttagctttcgatgaggaagatgaggaggaggaacaggctcagtatggaagtgacgatgaaggagatttggttgtgttgtaaacctggtatagatagtcaacactgtactatatagaatagaatgatgtgtaaagaagaggaaaagcaagatgacagcgtaaaacagaagaagcgtctaaaccagatgccctgagaaagagaggacgaaacgaagacgaaggcgaagataaaaataatatatgtaacaacagtcacatagtgagagttctgatgaggaaaacactgtaaatggcatttattcttccatatctctaaggggaagcaggtggggtttcaggaagagttggttctgacgaaatatccttcttcgactgacttccggtcgtgtcaacttctcggagttgacccgtttcgacctcactgaaagatacaaaagagaaaaagacattcgtaaaggatagattaagaacacagatggataggaagaaaggaaacattcgctcactagatccagccggtcacttcggttcttgaatcaaacatcgggttggttcttagccaatcaacatcccacttcacactttcctgcaacctagcctcatgctcatgtgtatgcgcatgtccctctggtgcttcggggaacggcaagaaggaggtcgaagatatttggaaaggtgcagttgaaggaagatggccggaggtcgattttgagagaagcttagctcgaagagatcgttcggtaaaggtcagagcggcgcaatctgatgatcaaacacatagaacgaaagaagagaaacatcagccggagagggcccatcggaatgagtccgagtatcgtaaacacgccgactaaccagtgtgttgaatctggattcccatccaatcattgatgcacagatgagtaaatcacacatcacacatcacttaagttcagtttgcttttcatcgcttagaaatatacagagtccaatcctcaatacagatcaaccgcagactcaccagcatcacttcgttcaatccgatctgggtctgggagataaccagacttcgaatagctgtagagtacaaatcaggagaaacaagactccatcagggttctgtatatccatttatagagtgaatggaaccagaaagagaaggagaaaacagtatgcaactcaccatcttgaattctccctccggcagttcggatgatgtgtacatcaccctcatcgacgcctagcatatcgaacacgttgatcctactgtccatacctgagaaaacaaaaacaaaacgaaccgtaacaagcctatatcaggactggaatctgaaaggagattagagaagagaaggaagacgtacatgtcactatggccgtcttaagagccagaccgagaggttttgctttagccttatcgaaccgagctacgtgctgggcgtttcgctgggaaaggagagtagcgatccggggtatgggagacatgattatcgtttcttctttctcgttcttctttcctttatgtgagtgttcttctggagaaggatcgttgccgttggagttattgatttgtttactacgaaaagaaagaaaaggagtcgaggagcagagagaaaattgaataaatcaccatcgtcggttggctcgctcttcgccggccaacagaaataaggagataagaaaattgggatgacgatctactcgactgtttacctttctttcttctcttccctaaagatgatttgccaatgaacttttttctttttctgaaccaattcttcatccaactatttcgcacttagcctagcaatcatcagatacatattcgatagatgtatggacggatgtgcgcgagagagcaagaacttttatgaatcaacgggcaagagagatgatgcaattaaaccggaaaaattaaagatgaaatcttgaccggtgatttcatatcggaccgaataaacattcctctattcatatttttttcaacactgttgttcctctggtttatcttcttcatcaagctttcagtgagtcatatcttgataggtccaaaaaggacgaccatcatcaatttctgagaatgccaccggcccgacagccacgattctgtgggatacaccagtctttttggttcaatcgatcagtgttccttactctcataccaggcggcaacagaccaaagactacatgttatgaccatacaagcagaaaacaaaaaagcacaacagggatataagaaggtgagaagaaaggaagaaagaaaaagaaagatagggaaagggaaagaggaagaagaagtgattgccgacgccatcgcattggcgccatttaatctatccaaaccccgtcaaactagcattttccctgtagtctccagatactgtcaagctgatgtagtatttagtaatgggttcggtaggattccggacgaagatgctcgattcccttgaagtctgttttacataacacatagaagaggtcaacattcgttccacacagctaattggattacaatcgagtataagactgaaagacttgaagcgtacaatcttgctcggtgttgtgaaatttgtggttggcgaagttgaaccttttgcaagacaacgagaaagatttagattaaactcttcaagataattgagaaagagttgatgagcaagagctatatgagaaggcttaccaggggaagacagctgaacatgcccatttccgaaccaccgattgacaagaaagaattcatcagccttgcaaacatctcttcatcacgaaacactaagaacacataccaagcctgccctgggagcgaacagattgcctcatagccacaccctgggcatattcgctcatctcggttgctccatatagcggaagacccttctctgctcgttccctcatctcggcgtaatccttagagacctccctagcattctcccatgttccccagaatcggtctatatttcaaagagagatgcacacatcccattcagcattctgagcaacacactctgttaaaggacgagacatacacgaggatcttgcgtaagcaattaagaaacctccaactagaccggtacacgcggtcaatctcatcactggtgcgagtccaaatttgttatgacttggctgccatttgtctaccggttcgacaaagaaaaagagcccacgcgtgtttggaagaggatgcaaacgaaaacaagatagtcagaatcctaatcccttagatgtaaccagatctgatcatctgagaaacacgcgatggtaacgaatagacaggaccgactcatgaggtaaacgtatccacaagagagacctgtacaaagaccgatagtaccgacgtctgctggtcgaaagtatctgacgaccctccagaaatgaggatcagaatcgatgagaggatactctgtgggctctgacttgatgggcatatcttctgattgatcgagtgcgagtatgtgatgctagagacctcccgaggtagtagtgatggatggttagcagacaacttctgaacaaccccccatctcccatctcttctgttggctgaaggggtttttgatatataaatttcatatatcagattacgcacttagataggtcagtttacctcgatccgttcatccatcctcgatttgttcatcctttctcgacctgaaacgacaagctccttataccccacacacaccatcccatccagttctattccttgtctttgtcaatcgacatggctagaccgtccgatcaaaacggaacaagaaacagattcccaacattggatgaggttcttctcagaaagacacgtcctccagtcgacttgttttgtttttacgtacgtgtttttcaactgtatatatcaaactccaactctctttctctcacgggctgaccgccgctcttcgtttgcaatcaccgattacacaacatagatatttctacaacgagaaggacaggaagatattttggacttttggctagacgtccatcaacacgagaatctgtgtcgagcttatttcaaggttagatttctccacgagtttcttcattttcgtcaacatagagttgtcactcaggtttgcaatttgtatacatcctcttcacaggacgtccgtaaatccggtcgtaacatcgctcaggaatggccccaatattggaatcgagcactccaacaggggtcttcttatgatgctgcagctggcattactccacatgcgcgacagtcgtacctccgttcctctgatccattcgccgatccacacgaacaacatcagcagaacagctccacaaatggtgtccatgataatccagccatggctcaagagtctaaggaagctcatcctgctccaattttctgtcgagagcgaagggataccgagacagacgtagcgggtgcttctgtcatgcgtaccgtcgatggaaaacggtcaccgtcgatcgggggcagcttccaaggagagaaagttggcctggtttctcctcaggctcaaggccaagctaaacgatcaagtggtggatcgattggcgggaaatggacgaatggtctgggatggggccaagggccggtcttgggaggagcaaaggagaagcgaaagagtcgtgcaccgaccgttatcccgaggaatagcgcgatcaccaagggcgagttgttgctgagtgcggagaggatatatgcaagataccttactcagggcggggaaaaggaaatatatttgccgtatgtcctgttttgctcttttttaaaattttaatttaattcatcagccagattcggcgcaaacatcttataacctgcttgtgttcggttgcctcattcttgttcccttgctccgcagaccatcacttcgaatccctcgatttcccttgcccggtcacctttcccacgtcgactcaaactcgttggatgtcgatgctgaagcactcgcgtctgttccggacatgtttgttagacaaaaggcctacactcacgccgtcctcgtccaggatgcctatcccagattcctccgtgccaaggcgtttggaaatttaacaccttttacttgcttcttccggctccttcttggattgctcatcacatggggagggctcacggccgccttttgctttgtgttcctcgatatccaacctaggagactgagattatctgtaagtacatctaaactctttcagacgatcaacctggccattgagggatcgcttacgtttgtttaatcaaatggtatcaattaaattgttatacaatacagctcctggtccccttctatatttcacttcaccttcttctttccgcactgtatgctctggatccgttaatggttcttttgttcaatcgatctgaaaccacaccattcagctatttatctatacaagagccctatgtccggaaattactccgcaaacgcagcattcttctggaaggtggcatcttgcttctcttactagccgggatcatgctttggtactgggttcctggtcataggctttagatttaaacgctaccgtggcgtttttatcggtctctttcgttttttgtttcttcttttctccggatgttcccttctttcggtcttacctacgttcctcttatctctctctgatcaaaatcgtactcgtaattgctgctctccttcgtgtctcattccgctatgtctgctttgttacttctcttgatcagtccgatctccttgcttatcaacacaggtatatttctcgtcc

SEQ ID NO: 2844 - DNA, 10634 bp, Xanthophyllomyces dendrorhous
tccgacttacccacatagttaatatctaatttagtgattgctctgttcccttgtgctcagtttgtttcatttcagttgctcgatgcaacgctgtatctgacgagtaattgctcgagttggacgcgtagaatcaaggtttaatgagtcgcgcgggaaaaagaaaagaaataaaatcaatcaacaacgatttacaccatcaacattcctttgggtcatacatacatcatccttcattcagctggctctttgtgtatctgcccgtttccacaaactggagcaatctccagcccctcgtccgcttcttccagcatacatagcctggtatcagactaatggatcagatgtcccagcaatcaacagcatcctcccttcaacaactcatagacgacaacctacctctactccgatcgtttcattcgaaactagcactcaccccagatctacttgaccgagatgtccgtcggatagttgacgcttgcacaacggagtttgaagtgttgctgacggaaaaaagaaggatgttggatgatatgagaaataaagttgaacgtgctcgaagaggtatgtttcttgtgttctctactcgctctttctagatttagaaagtcaaaccgggtcaatgacgtctcactggacgcgacaaaatgcgctaccgacatagaatgtatcaaactgacgcgtctaaacgatgttctacagaatgtgtagctttaggtcgagctttaggaattccaatagaagtcagtagtatactgagcggagaagaagtaagctgcttttactctcgtccttgcgtaggccagtcggttctaggtctgtaactcagtgaaagattctcaacccgcgttgatcatgtctgcccttcaatgtgcttggtgtttcatagattctgcctcagcaattggcccgattggaaacataccgggacaagacgttgcttccagcttatgaagctcgattggtcgagatccgaggttcgtcctcatttattgtatatgtcccaacctttcttggctgaggagggataaacaagaacgtggttattctcacatctggctctttggattatcctatggacaaaacagttcaatccaaacgtttatctacattaacaaatctcctcccatcggaattcgctcttcgagctctccaacctactattccttctcgtccgccatccatccattctcgatcagtcccgcgcgctacccgtcaagcctcccctcgaccattagacggagaaacagctctaatcgacctttcgttgacgatgaatgaggcggataagacgaatttggaaaaggaagaagaaccaagatcgtgttgggaggatgtgagtgaggctagactgaacgagttacagctcttagtatcaaccggtgaaacagaacgcgtgagttattcttcagtctacgttcgtatctagcattataaattgaacaaaactcgcttatctccttaaaaaattgatctatcttataatcctgcgcgcattctctttcgttcaacgatcagtttcggttacttcgcgttcttcgccaagccttctatgatttatatgaactccttactattcttgaagtttccctaccactgccttaccctttgccctcggctcctacaacctcatcctccttaccgacgatttctccaagatcaccgttatcatctgtgataccaccgggtccctcggaaccgacagctgaggtccaacgttatctagaaatcgcagagaacttcatgagatgggctaatgagatgaacgaagggatggatgagctaggagagatgctagagaatgatgatgactcaaaaggatgggaaggaatggaaggggttgaacccgagaaagggatgctggcttgggtcgaacagtctattattcaggtcagtcttcggctctcctgtttctacagcctaaagattcaggctttaatcctgtatgctcattccaaaaaaccttctaaacctacttatcaggtacaagccggtaaagagtggaacgagtttgagattcaaaggctgtacgaccaactggagacactttgggttaagctaaacatctcaagagactttattgatacgttcatcgaggagaacagagggtcatctgctcggtgtttggaaggtgtacgttttttcctttgcgtatgatctcttgttcaaaccactttgaaactgattatattctctcgacatgaacttctcgatcgatgaatcaacggactgctagtacgcactcgagttggagagaaaccttcggcttaaggccgaacaaatggaagggcttgtgatagagactcgagcacagattcttgctgttcaagacgaactcatgatgactgaagagaacaagcagagttatgaatggttttgggacagtatgttttatctctgtgccaggcctccgcggttcttctataatggaaacccacatttgtgatttgactaacgcctattcttaaatcgattgtgtcacttatagcaaactatacggacgaactgttgtctgtgcacgaggaagagctcgctaagttgaaggacgagctggattctgttgcacctttaatggaaacttacaagcaatggcagagatactgtgatctagagaagaagttatccgtatgtcttttcttagagtttgccgtgatctgtttatgaatggtccagctaatctagaagatctgcgcttggttggctggtcttgtcatatctcaaaggacgcagaggcagatacgaaacgatatactcggaaaggattttcttcgttggaagaagaaaagctcaggaaatatgtgaaatcccatgcgaatgtgagttcctatgagttctcacatccaaattttgtgtatttctgtctcttcttttgatatctcctggaaccagttgactgaacgcgccgtttcatacccttcattcgacttcatgtccacgaatcagattgaacaaaacctgctcgaacttgcggctgagtgggaggaaaccaacggccgggcgtttactcttcaaggagaaagaattatctcaatcattcaagaaaaggcagaagcaaaagagctcgaaaaggagatgaagaaggtattactgaccattcaagtcatctgctaggcgtgacaagagttatatgcttatcgactacttggttcggttgtctttctttcagcgcgctcgacaaggaggcaatgtcgtttcaactcgttctcaaacaccagccgctcaacatcgcccacctccaccatcggcaagccgtcgtgtgatggctactccctctacttcccattatcccgggtcctcaatgtctactgtcaaaagaaaacacccacctccacctactccatcatccacccacccgaatggcaaactcgctcgaacaacgccccgcgttgcagggaatatatcccgtccagctggtcttaccgcttgttctttacctagacctggagggtttacgcgaccaacgccactctcgtcggttgcaggaaccagaagactcgttagcggtagcagcgcgaccagtagtagtagctggggaacgatggtcgattcgtgttcatccaacagactgaatagtcattcgctttcgctctcgtcttcggcttcatccacatcttcgactatgtgttccaaaggttactcgaggttaccatgtccaacaccttcaaaaattgggatggctccatcgtatggaagttcaataaagctgaagcagaacccgaggagacagagtttcaagccgagaccgtctgttggaggctctggtttgactggcgagttcctatgatctatcattttttctttgcatgttgtttttttgtcatattcttctgccttcctatgatgccaatctgttctcctcattctgttctcttgattgctatttggagcttgctatccaccctcattgtccattctcattcttgttctctagccacgctatgtctgtttgatttttccttctctcctcgttcttttctgcgtcttggtttgttcttcctcttcttcttgatacccgtctcgagatggccttccctccgggtttctttcattagctttcgctttgtctcgtcgtcctctttgttctaataaataggatttgctttgattacataagcaacaaccctccactttcatgccgtgagatgtaatgagactaccctcccgctcaccaccaccattccatacatcaggtcctgacctgcacaaactcattgagttcgacttgctgggagaattacttggacagcgtgatatcttggaagaagcatccagccaatccattggtccagcttaatcttcgcttacaatggaaattgctccccggaatcaactgacacaaaacccagagtttggtttggccgaggacgctccggccaaacctacatttgcttgtggcacgtgtgggaaattatactctaggttcgtgcattgcttcttgcgttgttcgttgtatgattctatcaatatgtgtgtacatagatcataagggtgctcaatactcaaccgttgattgggggtttattggtcttatgtatgtcttgtatgttggcatccaaatggatgttccaatcgaccagactggagtatgttaggcgtcacgaaagaaagcgttagtgattctatctttatcatctagctacaggaacgtcgcttggttgaccatgagaaaatcattatgtcactacaaccgaatcaacagaccaagactcgaagccgtttccgtgtacagaatgcacaaagtctttcgctcgaaggtgaatgttcattatatgagtatttctattcattgcatcttactgactatcatgcaccgtgatcctcacgatgttcttacagtgatgttctgcttcgacacaaacgacgatgtcatccgaacagcgaaacttctgtaatcgtagtgaactctaactcttggtcgaatgctatctcgactacatcacctcctgctctaacagcgccttcgcctcagacgttagagtaccttgcatcggttgcttcccaatcagagcatcaagaaactctctctcatccgcaacctgtatcaaattctagagatcagcgaagagaatctgctgctccatattctagacctagtctttctagcaattcgtcaacagacgcaattcatactcgacaatctgtatctgaacagagaagtgactctatcccgactcctaatctgtacggttcgaggtcttcacccgatgacaactcaactccctccaacccaataaacagctatccgtttgtatcggaatccattaatcaaagttccaagcctccttctcagtatcagcttccacctcatcaacctgagtatgtccagccagacgctttcaatgcgtcgaataccattccgttcggatcgttcacttctcctgacgtacgtttcaaggacggatccacaaactcacaattaacttcgacgctacctccgttccactcagaaggctctcttctttccaaagaatggggccaccctctattttctcctccattgttctctcccataggtcccctgacgaccgccacaaacggccccgttcctcctctgtctcagagattcttctcctctggacctgtcgccgaaggctttccattcccttctccgatttctccagaggcggtcgattggaaacccgtctcttctttccaactttgtccctctgaacaacagtccactcaatcgtctcttctgttcaactctacacctttcggtccgacaagtccagcaggtagtccttcattgaattccttcccgttgctgtatcctcagctcttcgagagctacctccagtcaaaccaatctagttcactccaccccgaagcaggattcctatttgaaggtctcttggactatcgaacatcacccggagagctcatatcttcaatagcaggacttcgagaggctagccctcgattgcaggagattgcaaatgagcagaaaaaacgagagcagctagaagagacaacattagaaccagaaaagaagcttttggctatcgacagcgagattagactgtcgaagtgtgggtcaggagagtctgcccttcagccgggagatcggtattatatttcgccaacaaagttctcccagtgttttggtggtacgttcttttctaatttttctcgcttgcaagatgctcggggaatacacaaggtctctggaatgatctgaccatatcgttgccgtgtgctgttcttctcttggggcgatcattcctgaatcaagtcgagcactggcagcttcctccattaaaaactatgacaaagattgctcgtcgaactatggttcaattagtacctcatatccctatgcttcaccgtccgacgtttgtcatctgtcaggttcccatctgcatcgccttctcggtctgtactattggaggccctcgaagagggccccagtttagcgacaataaccttcgaatgccgaacgggacttcccgggaggctgacaattggctttggccggtgttctgtaaggataggaaagaagatcggctaagcactaagtcgacaacagagacgccagggtttggtggggtattctgggagcaagagagcgcggatgcagattgttgggacggactaaaaagtgtggttcggagagacaagacgaacatgatggtcaaggtttgttttcttcataacgtccggcttccatttcaaatgaaaggctataccactctgtctaacgataccgccattcttcattgcatggtatcaacagtctttctgtcgatcgaccggtaatctatttaccgattataacattgggctggtccaagccttgtacgttacgccacatattttgagacgcttcgagaacatatagattgattcagatctcttatgtgtgattctcgtcataagaataatgtacaatgcccccgctgcgttgagtgattctttggtacagaggatggctgctcacatgaactttggatctttagccaacgtaagcctttctccttttacttgcttctgtgtctgtttggtgttcaaagaataagacccggctatgtgttgatcatgctgaaccatttccgtattctctgagacgtgttctacagattgctcgtcaggttgggatcttcgatgcttccaacggacaaaccaaaacgacgccaatatatgactgggaggatcgtagtgtagatttaagttggaagaagtgggtcaagtcagagggcatcaggaggttcgcttcaagttctttattctgtcttgctgtcgggttgagacattcgctgaccacttcgcttctctcaatgttactattttggggttcccctcttatagaaccgcttgggtgttatatattctcgattctatatgctcgattgagaccggttgccctcgactcgttgcttccgtcgacctatccgaattcccgcttccatcccctgattcaatctgggaagcacctacggcttccagctgggccgaagcatgttctaaattctcaaactctgaacacgttttcgaaaagcagatgagatcgatttacaacacgtccagtggctcagaacctgtctcggaaaatcattcggcaggtccgttctcctggcttatcgttattttgactctgacgagggagctcatagacctcggggagggcaaaccaagggacaaggcgtgtccgtggattggaaatgttggggacgatatactgaaagaagagatttccaaagcattagtaagggtatgtgtaatgctatgcgcgccatcataagccttttctttgctttattttaaatattttgatcttatgcgatagctgcaacttactttattatacgtttacagtgggaaacgagatggtggcccgacagtctatgtggtcctgcgccatctattttctatgaggatgagggcgaggatgtcgatcaccggcccaataacacaacgtatgatagctgcatagatctggatgattctccgtcggactccccatcatcgagtacaaatactagggacactacgagggagaggactggatcttcatcttttgacgggacttcgtgctcaaacccagggagctcggcggcttcatctgtgtcgagtaaaggaagtaggttaccgtatgcggatgtgttgttctgcagggatgctgtgagtctatttatctttcttgattgtgacaagtgagataatcagtgattcatgttcacggcttttctccaatcagctccccttcttctggttctgtaaaattctcttaggtgtactggacgaacatcaagcttctattgcttcagatgacggttcttggtttgttcctggattcaacgttttcaagtccagagagatcgattatcgggccgcattggagagcgctaggaagtttgtacgtgtccactccctcctgatcttctccttgctttgagtcaattcgctcatgactggccaactcgtcttatgcactcttctcggctcgaacaacaatatgaatgatagtcaaggaacgaagggggtgcactgtaacgcgtgatatacatatatgtgatttcgttcaattccctacaagcatcagattccacatccacccctcttctgtcttacctacttttttatgatttgtaaacatctaagctgtacctgtttcaattgttatctttgtctttctctattgtcaatcttatgtagatatagcgagagaaagataatgtatttgtatcttgcttgcgctattctttttcttctttcgatcaatctgtttcctcatcatcccaaccgtatctatatctgggtttaagaagcaaatttccatcatagtagtaaaggagaaggaaccgaaatgtaacttgtcttcctctttagatatctcgtatcatctcgacttgtcactatcatttccgacgatcgacacgacccttctgatgagccaattataggctcctatccttctgagtccgaaaaatatcatcaacagcatccccacaagcggcaacgaagagcttggaatgacgcctaagtatagtggttcaagagtgacaatcaactctggaatttgttgtgttgtgagatagatcgtggagatttttagatatattttggaagggtcagaagggctcattacaggaccagcgatagagagagttgttgatggctgggagaagagagatcagcaggcaactccagaaaggattaatatacgtgatagtcactgagagaaagaaggagaagagacgtactcgagcaagccaagagaccttcatcatacccttcgcttttcccgtttttccttctgataagataactgaatctaactccacccaaacgtctctagtctgttcctgctggttttgttggtcatgtccgaatggaatagtcttttttgatgaactggattccgttggttggaaacggacagactttttccaagaggaaattactaagtccgtagatgaaggaatcaaccccgttgtagacgagattttggaatcaaagtgaaaaggtaaagagaacgtcagaacttctgtatctgctctgactgagaggacagcacagagcagattcagaagtccaagagagatgaaacgtctcattggatagggtgtgttgctagacgatggggaagtgatgaatgatacagaagaaagtttacccaagaccgtcgtgagaccgtcttagacatcttcgaggattatttcaaagctcaaacttcaatgtcttattcatttcacgagcttgtctctcgcctggttctgatattgatgaaagccatattatctatgagcagacaagatcacagttattcagatagaagaaagaaggattcaggatacagagaactaagggggagattttggttttccatcgtacccaagccgagtctgactcatgagcccgacccggccaatcttttgtacggagaataagaggccaacctcaaggctaactctctatgttcttcttcgcaacgtgctttagaacgaaagaatcaagaaagtgacaagagcaaacatgagacgaaggtgagagtcgagataactatggctgactaagctaatgacgtatgatctctatccggtgccatcggtcgatgtctgttcccttgcgcgatggttaaatacggcaagcagcagataggacaggttttttcttcttccttctcttcccacatccatcttcactatctctcaattatcattcatgtttgcccagactattcgatcttcagtccgaacaacccggcttcctgtatgtatgctttttcgtgcgcgcgctcttaccttctctcatacgtcgtctggccctgtaatctgacccaaaattgctccatctccttgcctccaaaggctcagctcaggtcttatgctcaagctcccggacctcccaaagagcgtcagggagtctctcccatcctgattggcgctgtgggtgttgtcactcttggactcggctggacatactttctgaatcaggaaaaagccatcaaacagggtatctccgtctctggcagtgacccgaccaaggtttgtgttatgttttcgtctattcttctctgttactacgtcttgcttgaaggaggattactcacggtcgagttgctatctttcattggtaacctcagggtgttaaggaaggacaggaaagacaggcccgaggttgaaatttggagtcaagac

SEQ ID NO: 2845 - DNA, 11678 bp, Xanthophyllomyces dendrorhous
gaagagaggaagacggctagaagaaaagcagggagcctggttagaggctgagagagatggagtatacaagggaaactgcgaccttaaaggaacagtaggtcaactgataaacgactgcgcatccggccagtttaactatcttaaatctcattatatattattgttataccatttgatgttgatccgagtagagaaatgatattggaatcagaacctcttcataggtctagccggcagatatcgcgctctaaacatcatgttcacgaagagcctggcagtctgcgcaatactgaagagttcatcaaaatcaaatcgatcgtgtgatcaagttctttagatgtcgttttgctcgggtcttttccttgacggttgatgataacgtcaatccagaacgcctgaacaccattgaatgacgatagtgttggacattagtgaacttcaagaaaaagaaggaactaggaccatagatgacaagagacgaaaagagggctaacagctttgcatgaacacgtttcttcttagtcaaacgaggatcgatgaagtcgtctttgtcaaatccttcttcgaccttgacagcttggatcgttgatgacataaaggtcttagccaaaaaggtagaggggtcgggactagaatcaaaaaagtaaccagtatgaatattcgatacagcttccagtgaaagcttgttcgacttacgaagtctcaaccttgatctttccaaatctttggaacaaagcaaaagaagcgtagaatttctcgatatcagtatcctacatagtgcaagtatagagagtgaaggaaaataaagcaacgaacggctcatcctgatccaagcctatcaagcacttcacaattctttcttcttcctcgtccgagtctctatctgcgccgttgttttctttgtctatcacctttgcgacacaacttatcatcactttgttttctgggtcagttgagcacgacccaaagctgttcgcacttgagaaaaatcacgcgtaagccgattgcgcgatgtcaaagaagactacaaacgtgtggatgaaatgacttgactgacgtagttgagggctcaaagcaagtatatgcgctgtctaggtgcggcccggcgaggactgtacaagtgctgatatgttataccgactttagtgactaagcctcgactgccttggtcaattcagaacactcacccatggcgaccgaaagatagaggagtcaagagagaaggcgcctttgatgacaagataaagggatcaaatgatacacttaagacgcaaagcttctgatatcagacttcttggaacatagcttgagtcaaagacgaagtgagaaaaaaacttacatgtgtcccaaatttaaagagcatgagatccacgaagaggagataatctgtcaagcaatattcataggtgtcagtcgttatggacacatgatgaccctgcatcattgtaaggacacaggtatatgcaccaatgtcgatgtgtccttcagcctgaatatcagatgagagcgcacatatagggaacgacctgtcatcaatatgcttgagatgcttcgaagcaagaggaagaagacatggcacgtactttgcgtagagaggatcacatcttccgtcacagaagacgatcttgacatcagatacaacataagaggacgaattttccaccaccgtaccgccattctctccttgataccaaaaatgatcgatgattaaatagataaatccatcagcacgaaagaaagagaagatgagaataccagagagaggactgactccatcgttgaacatgcaacctatcagaagaagcagaaaaccaagcttcgaatattgatgggtgatattgtaagcatttgaatgtatcgacatacgatcctttacatcatcagacttaccagatccaaatggggagaaaaaattactttgctgctgcatcgtaaaagtacgagatgcaatatgaggaacaatgaagttagaaacgtagaaggaatgtcatcccaatgcagtacaggaacgtgacagataaactgttagtaggatccagatgacaagtttatatgatggtttctttctttcgcaaacaattttttctgatgacaatcaagtcaactagccatggcatacataacataaacccgaaactcaagaatgcatgagactaattagatggataaagctggttctgttgtggtctagacaggatgtcgaaataggaaagggaaaaagagaaggaaaaccaaagggaagtagagaagacgacatgagaagagaatagggcgaaagaaggtttgctgtatatcggaggatgagggggtgtctagccctttctatttggcataaagatggaacctgctctcgatcgcagagaggagagcgttccacttcggttgcggccagtacgtaaaccagcttctgcgcgaagttgatcttgtcgtgacatgtgcctggcactacccactccggataatcggctttgacttcgtctaagaccggcaactcctcctccttcttcggctgcaaagttgtaaccactgccacctccaggagttacccggccggtcgccatatctgaataagggcatcgatatcaagaagtcgagaatgatcaatataggcgcagtgatttcattgatgaactgcaggaacatcatgataaagaagacgtaccgatctgactgcccgtcgtagccgttctgttaagcggtctcatggaagtcatcgattctcgaggattcgcttccacgttatcgcgagcaaccgatcgtcggttcgaagccggatactcttcctcaggctcggccgcgttctcgaaagcagcttttcgagcaccaagagcaggatggtcggcaacattgattcctttgtcttgtttactgttggacacaagtggaattgaagaggtcagaaatgcttaggtgagaaagataaagacaccaggccagaggctacagagacttaccgaacagctcgcatgatatctatatctgtcggtcggtacatctgagaaatggtgttcagaaggtacttgggaagaagcccaataactttgatgcacgcgaagaaaagacatcaaagatcagtcaattagccactacaagcattagaaagagaaagtatttacccgaaacaaagatggttccgaaccagaacagggccgaatggaagagataatgattgtttccgctgtgtatacaaaaaaccttggggtaagtcgagtgtagagaagggattttagagggactatgaacgaactaagagtaagtgatcaacaagttgggcggtaaagcactgtacaccgcgacgaaagactgttcgttcaaagaattacccgtagtatcagaatccagaatatagtgaggagcgatgatttcggcatttcacgcaagtaaatacatacccagagaagaacaggtccgatgaaacaggctagcgataacaagatttgatcatcaatatttgaatctcgcgtcaccaattttacaaatgcaaaacctaccaccaacaatccaccaagggaacgaatgtgtcgtgatagcatggaattcgtctatagaatatggaaattcaaataaaaacatgagcctccttatattcttgttgagttaagaaaggaaattaggagaaaactcactgcaaaccatcaccgcgccaatgaccatgacctgaagaatattgatcatcaatacgtgagcatgactgtctatgcgcgatcgatagccagaacataggcgacataccgttgagaattcgtataaaaagacatcaaagccatccgatcgagcagttgtgacatcgtaagtatagttgatgaagaaaaagacgatggctgattgtagaacaccctcaaagctatcgatccccagcgtcccagattaatcaagacgagactgtgagcctggatgcgtgagataatatatatgagatcctcctaaacttacacaaagtaaatgtatcgagaaaatccgaagtatcgaccctctcgaccttgtctgtacagttccggaagcgcgaccaagatgtcatcgttcagatctcgatcaaagagtccactgtttatagggatgataagatttgtgttagcgaacgagaggaaagtgaaaagatagaatatagatatgattcaatgcttacattccgatgacaggctacgcgagagaatagttgtaagatcggagtcagtgacactcgaggaaaacacgatgattgtagaagagacgtacagcgatggtccagacaacattccacagcaacaagtagacgtaatcgtatgcactatcgagaagacaagattgtatcagtaaatgtgtccttattaaatcacaaaagagacaaacactcactaggtggtactgacaaaaaaatattaagacatcgagttagcagtaagaaactaagtcgacaaaaagggcggcacatacctccaggtacagtagatctggaagaagaacaggaccgctactccaacgatgttcttgaagaagctgtataggacaagaacatatatataactatcagcaaacaggtcttttcaagctgtacgagactgaaccgactaacaagttcaaaatcatgtttgagtttcgcacgtagcaccaatgaccatgcaccagaagaagtcgagtcaagtaacggaactaatcgggatatgttgaaaacaaaacacagtcagttgccaactctggtgaaagacgttcaagtggaaaggttacctgagcgatggcataatccgaggctatggtagttgaagaaaaccacgttaacaagggaagttacaggcggttaagatcatcagaaacatacagttgacggcttgcaaaccctcttctccagagattccaacacccacatccgccgcctgaatcatagacacatctaaagtaagagaaggaaacaagtggacacaatcaattctgttcttaatgacatggtcgaaacaaggatgaagagaatcaactaaccgttggcaccgtctccaatagcaagcgtcatggcgccgatattgaccttgatgagcctgacgatctgagctttctgaagaggggacactcggcagcagatgacagtgttgcatcgagtagataactgaagcagaagatcctcggtccactcctcggcaaaagtctattgttcaagcagaggatgccggatagacgatagttaggaatataatgaggcagatttctcaattaaaattcttcctatcatagaaagcaggaagagaaaacatacatgcgtcaatgcagaaccttcgatgactagagagtatccacctggtcgatctccattatttctaccgatgatatctgatagtccagtgttcgttcttttaagttgggcagatcgtctgtggctggacctacgttgctggaatgacggccgtccgaaccctgacattcgagatgtcgtcctttctagatcaggcgggtgatagttcacgtcctgagagacttccggtccaaagaactggtcgattgcggctttcagctgatcgtaagcagagttcggggttccatacgctccaccacggacaataatcaaatttgaatccttagtgagcaagttggtagagtaaccaatcgaaatcgccgtctcgagtttatcacccgtagcgacccagaccttgattccagctcgcttgagatcggcaatcgcctcaggcactccatcttgaagtttgtcctcgatagctgtcgctccgagaagaactagagagtgctcaatctgggcagatacctcagccatcttgccctctcgatcatctagagaggtagaggcattgtggtagtcactggaccactgagcaaactcttgttcggagatcattcggtaaccaagacagagcgttcgcagaccttcgttggcgaaaaactcaaggtccttgttggtctgttctttgagatcgtccaaaccaggagcgagtcgctcaaagatcacgttgtctgctcctttgataagcaagaaaagctttccttcatcgtctaactttcggaggatgaccgacattcgttttcgagcagaagtgaactccaacacattcaggagctcatactcgtcgatgccgtcagaatgaggagttttcaaacgaaggatgtttcgatctttacccttgaacacgaaaccaacgtcggcagcagcttggactctgatgagaagaagaaacagcataccgattgtaagtatcagcgtcgaagagatctatcccgaggagacaacctgagaagaaagcgaaacgagaaactaacaaggcagcctcatccggagactgtgccatgtactccatcattccattcgagtcttctgaggccaaggcggtatgacaaagcgccaggttggtaaagaatccagaaacattggtgtactgttcggagtcttcgttttccaaaactcggtccagttcatccgaatggaatcgagggatatcatctttggcttttgctttaggcttaggtgcatcagaaggcgtgtcggaggcagagccagaggacgagtcctggaccaactcggacttggacgtgttctcggtcggcttcattccgggtccttcgttgacctgagctacagggggtaggtcggcaagtttgccgtctcctttatagatctaaggggaaccaaaggcattagccgaaggtatagatagaacaaagtcgcatattcacaatgtttctgagagaacgaacaatatgtccaatagagcactgctggaaaatcatggcgttctgagtcaacgttccggtcttgtccgagaagatatattcgatctgtcccaaactagaagttgatggtatgaaagaaaggagcatgaggaatcagagaccacagttggatttttgtaaatcaatgtgatcaagatgtgtaaaaatctaaacttactcatctgccaagttccaacttcgagccaaagtttttgtatctgtcttctcataagtcatttcttcatcatagtagatgaacgcagcctgagcagttcgaacgaattcgatagagatgtagagtgagatcggaatgatgttttggaaagtgatgagcgagttcaagaaagtaaaaagcccattgatctgtttgaagtgaatcatataaaacgagagcgggcttagtgatggacggttatgtttttggtactgaaagcgtatactaacgctcggattatcaccacttcgatcgtcatacaacgtccagtatgagttcaatcggtagtacttcttttcatggaagtaattgacaattgcgcaaaccataccggccaaaccgaggatgagaagcgaaaatagactgatgtgacgaaagaaaagcgaagagacagcgcattagagatagaagaacgagtattcaaaaccttgaagaattagatgcgagaacacttacacctgggggttcatctgtcgttcgactttgcttcgcttgctgggagttcctccagagttggcaacaattttactgaacacatggcccagttcacacaatacatcaatcgagttcagttcacaccgaacgattttgacccaactagatgagtcaatgatgattgaactcacgtatcggctccggtgaacataacaataccgatcacccaggccgtgttcctgaggacacagcctctcaacaatgaagtttccaagttgataggatgcttgacctccactccatctggtccaggagcaacgacggcagcgttcaatctgaacatattgacctccgggggctcgcaatcaattcggaaacgggcagttgagcaggagagagcacttcggagatgtgctagttcggggacggcgtgtcgagatttcaaattggtttccccgtcaagattttcttaagaaaaccatgtgaaaaaaggcggttaagcatcctagtagatagcaagagaggctctaatgcatggtaagagtaaaatgacgtttactcactggtctcaatgtacgcaacatcttcttcctcggaagtagcgcagatgacgacatctagatggcaggaaagataacacatcaagacaatagctaaagacaagagtcaaataaagagaggcacgtaccggccgggaaaccttcgttgttgtagatctatgaagcagtgagttcgatcagattagacgatgattcctaacgcgtaaatctaaagagggaagaaagacgcgttcttttcgaacggaaactgttgagaactcaccttgatgaagtccccgactttgacatcttcccagatagtctttttccatccgatctctccactggtatctacagcctccacgtcgtgttcgaagtcctccggaatgccctcggccacttcctgatctctactcctaattccccggagatcctctccagggaatatcacggcggtcgcgtcgtcgacaggaatatcgtggtgctcatctctgacgatctggtcgaaccctgctcggtctctggcttgtttggcccgttttttcttagactgagggagcctgactcctttgacgaaggtcttggccttggctcccataggattgtggttgacataattcgggccgacaagcgtatggacgacagagtggttcacgtttcgatcggactgatgtcgtttgatgtcttcgtaaccatccttgagagcggtgatcagaaggacggcgagcagaggcaagatcacaagacctggactgatggtagagaattttgggaagaattgaaggatggcgatacctatcgagaaagagtgagtgtcgcagaaaacggagaaatacgcgtgatgagtaaggcatctcggccacccctgtcatttgaacggatcttctgaaaaacgtacccaggaaaaaactacacaaggaaaaacataggattcggtaaattgatcattgttatgtcggtctctatcagtattggttctgtggggaacgaagaatcgaacgaaaaaagaagagaaggatagactcgacaagaacagatcaaacgtacatgttggcgattcttcgaaactgttcaaacaagtttttaggaaggaaagtcaagatagtgtatttcgaagtgacgacctgggaggtgctataccgcatcgccgcgggcactctgcccttcttgtccaacagctcgactggaaggggttggttaatgtagattgaccgagcgacagcaggaagtggtttttgtttaaataagttctctgggttgagatagtattgaaccttatgaaagaatgccgccgtcttggacggcttgtaacggggtggcatctgatgcgaggcgccgttgttgtaggataaatgtgtggatgagtggagtaatgtgctgatgtcaagtagaaccgaccgagtggcaagggaaatggagaagagtgatgagtgctacactttttggagaatgagtactgtctttgtaaggagggcccggggatgaagtgcaacgggaagacgattctcttggaagagtcaaaagagtcggatccgattcaagtttgtaaagagacgcgtcgttggtcgcctaggagcgtcggattcaaccaagaaaaaaaccttctcaagggagaggggtaggtgggagaagaatggaggaggaacgacgatgaccctgctgggcaagaccttgatgagtggaaggatagatcgaatcccaaaaggcgatacacgatgacggaaagaacttgaaacaggatgagagtacacggcgagaaaatgggcagagaatgccgagaacggccaaggtgatgatgatgatgactaaacggttcccgatccggccgacatcgggtaccggccgcacagatggtttttgctcagggaattctattgtaaagtgatattgaaactatgaatatttcctgatactcttctctcgttctttttctcgcttcctcacacagcgatctcgtaagatcagagtcttcatagcattagatattcgtcagaaggattatctaatactgataacaccatgaaagctaccatgactgtgagcagaggaatggatcgcagagagagaaaagagtcgatgagatcaagccttaaagtatattgaagaatttgctatcaattacatcgatctgatacatcttagaactgttctgcataagacctacaagaacaagacatacattcactatacgtggtttcttgatagatctgtggacaacatgatgataaacgtgatggcgcacgtcgcgccaactttcgaataattttatgtccgggaacgggtgtgatccggactatctcggtaaaacaaactggctaggctgattttttgtcgctcaaaaagctcactctcttccttcgtacacctctttgaacgatcaattcgtgacgaagtataccatcaaactgccatttatcaggatagtctcttatgagcacttcacatgtactaggcgacaaattcttggaggcgtcatttgggaatttcgccaaacaatcaagtagcgatgttttcacattccacatacaacaagttcagcattaaaaacaaacaacaaaatatcagaagaatgaaaacccggaatgagcatatagatgagatacgtcgccaggtaggaaacccacaaccaagtcatgacattcatgttgctaacgcctcacattgatattcggtataactgggtcgctttgtttacaaccttttttattattaacgacggtacaatgatcttgtaacagagtatactttcgcgctgaggagccacaactgtatagataacatatcagccaatctcaacaaaaggtcaagaaggcctgatccggcgaacgtgtgactatgatcacgcgtctagacgcgtccaaccgccaaacgcgtctcaggcgcgtttggagcgtgttcctctcatttaataagttctcttgatataccccatcttagctatcactaacgtcctcaggttcagtctttggacccgttgttcctcgtgtcttttctttcctcctctctttccttcgttcatgttaaatgatagttctcttggtctctcttatatatctcccgagccaatcctcagagttcgactgacgaacctgttggcaagctcggccaaacctcttcgtgggctcgatcagatgtcatccgggttctctgagggtagacaatttggcaggattcctctacttcaagtctttggcatgactgaggccggccaggtaattcggtcgagttcacttggattgagatgagctgctatgctaacaaaacgtcctgtctctttctctagagagcatgtgtcaatatccatggagcatttccatatgtatatatcgagtatccgagagacaactcgttggaacccaaaacaggtaggtcatctgtctccccagacgttgatatagagccctccagtcttcctcgctacctacacgctcatacatgttgattctataattcctctaagtcaagcacttcatatcccgtctcggttctgcactcaactttgctcttgctaggaccttcaatgtcgaccctcagattcgagccaaagatcactacgcatcttccgccaacgtcattcaatcgataaccctcgtcaagggtaccccgttctacggctttcacattggtcacacatatttccttcgaatcgcatataccaagccaacctctcgacagcttttgatcagagttctcgccgaaggcgccatccttggtcaacggtgggacattttcgagggtcacttgaactttgagctacagtttctctgcgactttgggctctcaggctgtgggtggctagaaat

SEQ ID NO: 2846 - DNA, 989 bp, Xanthophyllomyces dendrorhous
ggtgggccctatggcttatcatctagttcctattcaatacggagagctcaacataagagtaatcgagagaatgccaaagacgcgcccttaagcctacccactgatacttctgaagcgacgatagaccagccagtccttaacccttcagtcattcgtcagtcggatcagttgtcttttttgcctttttgtctcggtttgagttaacacgtttggctatctaatgattgcatttgaatagcatcggtcgactcgatcatctcctcctcagctcagctcaagacatcggcgtttatcccttcaccttcgcaacaatctaaacaatctctggcatctcccacagaatatggctgtgatattgattatcaagatccctacttctccaatccagtcgacgttccaaagtttcctagagagtatgccggaagactctggacgtttgataaaaacggtaattctatccgtcctgaagaggtctggtcgccgaacgtgttcgatggcattcgagatcaacccgaaatcggaggtagcagagtctttaaatggggcggtcttaagggaggtctttcaagattcagacgaatggtcgtgggagaagtagcatctttggaactaggtcatcgcgcaccatcgaggagtgaggctaaggagtggctaaagaaggatattcaagcaaaagagaatcgtgggtttatctacttcttggtatcctgttctctttttctactcttttatcttttatcgagatcaatattattactttgtgtctatgttatcttgttgtatccaaaaagtttctcacaaactacttttttaatcaatttttaatagggagaaaaaagattttcgcatctcaggtatgtctccatgtttaatactcattccaacaattcttggggggtttcgaccagcgattgtttgctaaccgtgtatttgttttttttttgctggggaaatgttctgatcataagatagaaggacctactcagttg

SEQ ID NO: 2847 - DNA, 11761 bp, Xanthophyllomyces dendrorhous
gttatgtctctagaagtccttcgttagtcttaatgtgttacctcttttctttgaccatgaagctaacttatgcttaaacaaactggctctgctttacatcctctcttctcacaatcggtttatagctgcaacaaggaatggccatctaccagatgccagagaagatcctattctcgctgtttttttctgctttcaaagcgatgggcaagctttcgacaactgttatatgccaggatgccatgtcgggctcatcatcattatgacagacgaccattctagcaatcacagtcaaccaccttcgacagatcccaggcgcactataggatcgcgtccgatagagcctgagtttgtgtctagcgaattggaccttttaaatttattgactgagaaggtctgggcttgggacccagacatcttgagtggctgggaagtacagggagcatcttggggatatgctacgaaacgaatgtcgctttatggaggtgatatctctccgatatttcttattataacacttctggagtgatgaactgacagcacttactccatggtacatgctctttgggttctctttgaacaggcgaacagttctttatggcggagctttctcctgtactggatacagacggccaaaacacatcgtctgaatatgactccgatcatagctccgccttccagatccaagggaggcatgtctttaatctatggaggatgcttcgagcagaactgaacctcaatcaatacacattcgaaaacgtggcttttcatcttcttcatcgtcggtaagcagcttcctttcgaccatctgtatcttcagggtgtggtcttttgtctgaagctcttctcgtcatgtggcatgcagagttcccaaattctctccacaaagtctccaagattggttctgctcggacataccgtccaaagtgattcggtgtatcaatcactttcttcttcgagctgtgatgattatcgagatgctagatttatcggaacttgtttctcgaaatgcgtgagtggtttttcaaaatcatccggattgacattccatatgatgggagattttacagattgacatggacccaatttctgcaaggacagagagttcgcacgggtatatggcgttgacttctcggacgtttatcaaagagggtctcaattcaaagtagagtctttcatgttcagaatagctaagcctgagagtctgttgttccgtacacctactcgagaacaggtcagtgttttgtcaacgtggagtcgatatggtatgtacgtcttcggacaggcactgatgcccttagtacttctttctttacaggtcggccaacaagccggggcggaatgtattcctatggtgatggagcctcaatcagccttctacaaggacccagtagtagtccttgactttcagtccctctatccatcaattatgcttgcgtataatatctgctattcgacttgtctcggacgcgccgaccgactgaaggataaagatgggaatccgactgacaggtttggctttaccaacttagagctctcacctgggacgcttgaggtactcgaggatcacatcactagtaagtttggctgtgtagacctccttcttaaagatattgatagattgatttcaaactgaaatatgctattatacaatgctctgtgttggtagtttctcctaacgggatgatgtttgtgaaaccaactgtgagaaagagtttacttgcgaagatgcttggcgagatattagatacccgggtgatggtcaaggacgctatgaagggatataagagcaacaaggtgatcattgttacgtatccatctacgctgcgacagtagtgatataggctgatcagtgtgagtttactgccatacagagcttgacgagaacattaaactctagacaacttgcgttaaagcttttagccgtaagactgttttatcgagattgtctactgcctcgattttgacttcaagtttgacatgcattgttttgaatctgccgcttttttcaaaccttcagaatgtcacttatggctatacttccgctagtttttcgggtcgaatgccccatattcaggtggcggactcaattgtgcagtacggtcgcgagtccctcgaaaaagtttgtcttttacatgtctatacttgaataaccaatgctggaggtctcatatctctcttactgcaggcgatttctctcattcactcgacccctgaatggggcgcacatgtcgtgtatggagataccgatagtttgtttgtccatcttccgggaaagagcaaagagatggctttccggatcggatatgagatggctgatgcgatcacggctaagaacccaaaaccaatgaaattgaaatttgaaaaggtttgcgttctatcaactttttctctggtatcaataagtatagtgctgacgaacttctgtgttcataatttcgaccatgacaggtttatcttccctgcgtgttacagtccaagaagagatacgttgggttcaaatacgagcatcccgacgaacttgtcccgacatttgatgacaaaggtatcgagaccgtaagacgagatgggatacctgctcagcaaaaggaactcaaagaatgtataaagtgagttttgtttgatttctaacatactgcacattaggttattcagaagcgtgtcttgctaacatacttgagactaacgaaactttgtcggtctattttgaacaggttgttgttcagagatccagacctctcaagagtcaaagaatattgttatcgtcagtggactagaatacttcaaggccgagtttccgttcaggacttcactttcgccaaagaagtccgtttgggatcttataggtaagttcagaatacggttgtttgtttcatgtgtttgctgttcagttttctcatcgcttccttgctcgttcttctttctttcttttataatcaacatcaatctaaacagcgaaaaaagtcatccgcctcatgtagtggttgctgcgattcgagcgaatcaagatcctggtgacgagcctcagtacggagagcgtgtaccctacgtgattgtccaaggggaacctggagagcctcagtatagacgagcgcgtcgaccggaagatgcgttggaggacgagtgagtcgtttgtctcctgtgacccgaccgtactggcgccttaatagacttgatttttttgatggctgattttacttcgtttttttctttcaccgatccacagaggactgcgactagatggtgaatattacatacaaaatatgctaatcccgcctcttggccgagttttcaacctattaggagcggacgtagcgggttggtaccgaacgatgcctcgtccgaagtggattgagcctgctccttttggtataccttcttcttcggctgttactactgctgcttctgctgttggtccggacccattaggtcctgcgcagatgattgagagcgctagagggaaagttgttgctcgaaagattaagttgacagaccacttcaagagtgatctttgttttttgtgcaaagctgaaacccatctaggtaataatttcctatctttcaggcaaagagcttttcgtttagtgagcaaccctgaatagttgctgaaacgtttgccttctctctctgcattgttcgtgatcgcggcttatagtccccgcgatatgtaaatcgtgtcgatccgatccttacaccacgatctacgctcttcagaaccatcgacaacaagccgaaactcgattaacgtccactcagttgatctgcagttcctgctcttctacgctcgcttcagagagaatagactgcatcagcctggattgtccgatcatgtatgagcgggtcaaattgaaccgaagggttaatggtctggctggcgtcggagagtttatcaagggactggaagaggaagaagcgaggagacgagaggcagaggtgattgatttaacgttattttgagagcatgaggtttcaatagcaggtaggagagagacaaagtaatcaatcgaggggagcatacacgtcagatgataaggtaggtgtatgtacgtcgttcatcaaagtttacatgaaggcagatacaaataggagaaaggagaagggaggaaggagaacatagagatactttgaatatgatcacagaataattcgtacaaaaacaatgataaaggacaactggtgtatatgagcgaaagaatccctctggggctactaccatagttccccacctcgaacaaagggcaatcggtttccagatttctggcgcttctccaactcgtagtacaatgacctgtatcaatcactatcaccatcagtgacaagacccccgagaaaggagtctactagaaaagacagacgacctgaaattgaacaagaaaataaatatatatattaaataaactgcttacccatcgtactgctttcgaacactcctttcatcaaggatcccagtttgggggtcggctgctaggagccaaaggtatccccacaggaaaacctgaaacgtctgtacataatttacgccgcgggaccaaagaggtatcaacatatcgaggtgtcagctcgtgaagcccgtggttttgaaaggaccgttcgctctgctttgtttagatcaaaaggggaggtgataaaattcgaggaaatgtgcaacgaacccaaccgatgagatccaggacgtttcggtttgctttccacatcgtcacgatctctgaaaaatacaagcctcctttttggtctctatcgaaatgagagaaggacataaagaataggtgagaaaagctcgaggcaggcggctcagaaattcggacattacagtacgtactcgtcaaacttcttgaagatcctatcatatcgaccttcatcaaatgttccttccatcgtataagattccgtatcacttccggtcgcaaaataccgatcccggtccgggtacaagaggatcatcatgtgagattggtcatcaacgttagtaacttgtttttctttgaaaacgggcttgctctaacaagggtatatgcgcgcagatacagaccttccgtgcttagctcgcgcaatcctcctttaacgcagaagtcggatgaatagataagatctcaatctgaccgaatctaagcgatcaaagagagaaagaaggaggacatactcgacgtaaacggggaaccgcagatcaggtatccagctttcacatgtagggaacgagacatgaagtatgtggaacgccagagccgattggagggctatgaaggtgttgaagccaagtgctctaaagccattgtatgtatccgtcggaaatcttgaggaattatagtacagcttcagggtatcagatttctatttggaaagttttggttggctcgttcatagaatcggagggacttacatcacaccagtttttcttctatcccaaaatgagacatctgcacccaaggcagacgcaaagaacctcgtatgcaatcagtctcatatatgttatctcgaaagatcgagacctgctaagaggaaagaaaaaaccagaaggagagagccctcaaatatatgttgacagtttcccgtccactcacgcttttgtagagcagtaggcttccatcccaaccgagagagttcgcagaacaaaccatatcagagccaatcgccttgtttttcttgaagttctgctacagacagcctgaacgaggattcttaccttgtcttgttcactgacgatttgtctaggcatgatgctgagatgtgtatatgtgtgttcgagggggagaagagtagacaaacggatcgatttggattcgccagaatagctagcatcgagatcgagctttcatctctggacaatcattctgaaacgtcatctgatcaaaacgttgctcgccatgactgcggacattcttctatctacctctgtatacacatatagactaatcatcgttccctccacctccgaaagatttccacttgctggtactcgattgagaagcttccatccgttttctgtgttcttcctctgtttccggttcgtcttcaatgtttctgaacacttttggctggtttgcccaagctccggcccatacactatttcgtttacatgccgaggacgacgcggttagttcttgtgccgtaaggcgagagatggaaaagagaaacgaaacgaacggatttgtctcggccacattggcatatttgagcaaagcttctcgaggctatggaacagacgacgaatccgaacagatgaaaggatgagctgagcaaggggttgagaagatcgcgttaagagaaagagcaagaaacttacgtcctcctctcgggtgttgtctttgatgactcctcgtaggagatgttgagtggcactcgctccgactcttccaccctttcctggtccactcattggttccgccggcttcctcgtcttgaccggatccgccctttccttctcccgcttccgttttccgccacccaacagcctgttctcctctctgtacatcggaagtgaatgaggcgtgatgatcacctgaggcatggtcaagtccgtaatagaatctaggtggatcggtgccgaccgggggagtttcgataacggaaggagcgctccatgagttgaggctgtgggtgaatagaggacgttgatccggccggtggaggacgcggtgacgatctagtttgaggattaaaagtcaggattggacgcaaccgtatgtcaataaagaccaaagagagggagaagataaacaacatgtttacctgattaattctggaatgccattcaactctgacgacacttccctcaccaacatccacccttcgttcctcttccaggccttcctttccaagcacgacaagctcacccgactttttctctcctccaggcctgagagcgactccggtgaggatatgtctgtcgtctggtgagaatatcacgtttgtctctgcgtacaagttcggaaggtttgacgcggtgaaaagtggttgacggatcgatcggagatcccatactttgagagggggaggaaaaacatgcgtcaatttgagacagtctggttcatccgtctacggagtgtgtaaggtgctttggaggggaaaaggctagtgactcacatttgacagtatcgtccccccctcgggtaataaccgtgcggccgtctatcgagaaacatatcgagctagtctccgaacctttgatatgagcggtctcatttgtcatgtttggtcgagcaaagttgcccgaggtggaccagatatgcagcgtgccgtccaagccggctattcaggtttaaattcagataaaatcagggatgacatgattagactacggaatgaacaatctctgggggtttcctcaaaaattaatatagagaacggaggagtgaacgaacttgcaccgatgtgttttccgtctggactataagcacaactggtgacctttgttcttgcgcctctttccttagacttcacgttaatcaccactttctgcttccgacggttctcgacgtcccatattctaagtagcagtgggaaggaaatacatatgagtggtttcagatgacctcatcagcgttcatatctagatgaatagctagtctcgatcaaaggaagagaagagagagaggagagaggagagagaaatggaaagacgaacctgacggtactatcgttggagctcgtcacgaactctgcattattttttgggttgaaccacccagaggtaagctctgctacgtgtcctctaagaggaaagagaagtgaacagggcagaaacagtctaagctgtgtgttgcttttctttcctcttagaaacaagaggagaagaatcgaatggagaaaacgaacgaggtatgcttcatgtctcgaatgtatggatctcctttcatgtactgcgttccttttccgtcgcttaagatcgatcagagaaaacaatgagttgcaaatgattcagtgcatggttagcgaacagggtctgtaacggataacgaatcagatcctagatgactcacccaggctctccgtctctggagtaaacttgtggttgactggtaccagtgacgaccaagagatttgacccatcagaagaataagacaagttgtgaatctatcgaaagaggcactgttagtagaataatctacagaggaggttcctgtccaagccgttgactagaaataacaggaacgtacatgatacgatccagccggttcgaaacttctgaaaggcttgtagcccccgttatctggtagaccggccgtcattcctccgaaatcatacaacttgacgtcatagtcgtgggaacccgtcgagactcgagctcctgccggatcgatcgctagtgcagatacgggctttaagggaagatgagaggcgcgaaaggttagactaactaggtaagatatgctacagagggtattagatatcagtatagggctaagaaggacgcgacacgaacctttccatggtctttccaggtgatctcgtgcgagattggtaggaaatcagtttgctcttcaggacctaggtcgtcttcgtcatcttcattatcctcatcctcgtccttctcatcgggtctgtcgatcccgtcagccttgatctccttatgaacgggctcagcgttctctgacgaagagattttggctgtcggcagggttgagggaacgagagagggggaaggctctgatgggactggttgaggtttaggagacgttgccacaagctcagactgacgtaatcgtcaaagtttgacaaggaaaagaagttgaaataagtgaaagagaaggtatttccgaatcggccagtcagtcaaaagcatcaggagcgaggaccaacgcgtgacgcgtggaaggaacaataaatgagaaaggaaacgaagaaggatgagggcggaacttactgttcgtttggtctgttccagcttagccgaagtgttcactttcttggccggggcctttttcccgaacgagccgaagcccatcatcgctgcaaagtctgggtccatcttgggttgggtggatgagtgtcgcaggttgaatggagaccgaagaatggatagcgactttgatagttgagaccggactggacgacggatgatgatggatctttgttagggttaacctctccaacagactgtaaccatggctcccgattatgacattgtgtaaggctcggttgttaagaaggtaaccaagtgtaatcacttggttcgcggggtgacacttaggctctggcgattaatatatctgaagcagaccaaactattaacaatatactttggataagaggtttcaacaagaatctcagcttgaggaaaactcttatccaagaaggcgcgagggcgtccccgttttatatcaggacccctcgcgcatttggtctgccactaaagatatacatatgacgagcctagagaggctcgagatcacgagaactaaaaagatgaagcatgaaacatgcaaactagagcatgatggaaatgggcgaagaggcataagggatggagggaacgaatagcctgtaggggtaacccacgtaagagaacacgtgatacttaactcgtatccctgacagtgaatgtgtaacggtgaccgtaaagctggttacagaagataatgctgccacaaccagatagggtgaccatgttgcgcagcgaacgttcagggcttctagcgaagatcaaacgtcttggcagtctcggtccatatcacggaaccatacgctgtatattttggtcacaggcggccattcgtcaaagaggcactcgatggcgaaggcgcagcaactgttcgggagtggttaatcacccctcgcccgggaagaacaaccgagacgatctaggctgagcctcggggtctcacggcttcagggctcccagagagaataaacgtgccagattaagccaagaactagactcttttcttatttctgtatgacacactgaatgaccacaacactaacacatacgacatgcatactcccttgctcgcttacccgaccgttcagccagcggccggacaagctacttacacttacgaattaatctgatgctacagagcccggaggtcgcgtatgcgtctgatagaactcactaaatgaccgtttcctctctttcttggcccgtatttacctgatcttttgatcaacgttcggtccgtttgaccggctgtgtgtactcatacatcagtggagatcacgtccatcgatgatctcttatgttctctcttctgtgatacttctgaatgtgtatataaagcttgaacccaatcagaaacgttcttccgattcgcccattgcaccaatatcaccgtcgaatttctgtttctaaaaacagacgagagttcaatcagttgttgtttttccttctattgcccatacttcctgtgttcgtttactttgacggaactaaacctgagcgaatagtgagacaatctgttcgtatcccgacgtcgaatttgtgtacctttcttttctttccgtcgtttgattgggttgagaagagcggtctgctcctggtgataacgacggtggacaggccgttttgttttgtctcgttcgcttcttccctattgactcttatttgccctttcttccacattctttcatcagcgctcgggacctaatcaacccaatcagtcaagactttcgttttgctcttttttctccatccgtccgatcacatccgtccatctatttgttcgatccctcgccacgctctttcccctataaactctcttctcactcacctactcagatccatataattgtcaatcacttcaagcccaccaccaatgtacaaagtggtcgcttctccgaacctagaccagaggatgaagtcccacccaccactcaagatcaagacgagaactcagttggtctcgttgataactagttgtcagtgtacttagtttcttcctctctttcttctcgcagggccatagagtctgatagcttccctgttctctttccttctctcactctctttcctctctatctcagttggagccttccaggacaagacgttgatccagagagcgttggacgattactgcagaggaaagctcggaaacaagtcttcaaaagaaagactagagcagaagttgcatatggtcgaagcagttcgttctttcctcgttctctcttctctatatatactgatcttcccctctttcttgtgcaactcgctcctgcagacaatgtatgactaccaggacttgggtttacctgattactcttcagagtaagcccgcttcttctcctcgtctctttctcttttgcacacacgtttcttcctctcgtctcacacttacaaacgtattgctgtcagattcattcatttgcgtaaaacactgggacttcaatcttccaaaatcttcacccaggcccgatcaccaatgtcgtttccggaaaagaaggagaacgaacacgatccattcgagaccctgtctacgctgggaaagtactgatctgcctcctccttctttcaccttatcttcgtgtttgatatgttctgttttgtcttgcgtctggttctcgttcgctcttctgggtctctcgtcttcttggtctctttgtctcctggtctcctggtttgagtggaaggttcgcatgccacttgctttataacacccaaaatgaacaactgtaaaaaaggacttctagcctatgtcgtttatcatattttccttccaacattgtctgatgcttactatttcggctttcgctagcttaatctgttattacaacttctatttcaacatctatacgttctttctgtttttggttttcttttaatagatcgta

SEQ ID NO: 2848 - DNA, 58616 bp, Xanthophyllomyces dendrorhous
tggtggaacgggcattcttttataaatttacaacaagaaaccccatcgaaagtcaaaaagaattcagtctcccagaacgagtggagcaaccacacgaggcaaaaagagattgaggaatgaacagtaaagaagaaaaaaacactcaccctggccgccagccgggaggaggtccaggaagagggaaaggcggtcggaacattccaggaggtggcatcggaggcattcccatcccaccaccaccaggagggaatgcgaatgaaggtggaggaattcctccggccagcccaggaggtggcagaccaaatccaggaggaggagccatcactccaccgcttacaggccctttcattaatgcgatatgggccttcagctgggcttgaagatcagcctcactgatcggggcatacgagatcctcactcgtttcaccgtctttttctcggcagcctgagggttgatcccggcctcctcggccttacgttgtcggtattctttcaacgcgtcagcaggaaatccttccattccgaaaatctcaacatcgtatccatcacgaccaggaagacaattgtcaagcctggaagaaacaagatcaaacaggtccatcagcttttctgaaggtcccccatagggaatttggaagagaaacaaggataaagatgaacatacttctcgggctcgagcttgtggacctgctggatatgaacggccagacctcctgcagtgttaagctttctaggacacaatcggcacttaaagtgctttgccttttgatgctgcatcaatactttgaaaatagaaggaaagaaaaacagagaaagggcacgcgacgagtcagtaatcgatagaaacctaacttaacacgtcgcatagcgtgtaccgagctacgagcctagtagatggatagtagaaaagagaagaaagagaactgctgatggacgaacctttctcatcttcaaactctcgttctaaaaggtgaggaagaaaaaaggagaaaaaaaggagaacaagattaaatatcattgagagctgctgatacgttgatatgtatgcgtgtaaagattatacacataccgcaatagtagcaaacaggtttctgaacgagctgcttggatttggactttcttttacccataatgtagataatgtagatgatggatggatggaaaattgggtcaatcgatggaagatgcgactacagggggtgtaaatccttgatgtaagcggcgcacagctttctaacacaactatccagatagcacccatttatcatccatatccaacctccatcaccatctaggctcctccttcttcctagatctttgtttcctatctgaagggatgcaacaaatgggagatcaaacagattgggatatagactggggaaatcttaccttagtattcaaagtaacctttggaacagatagccggcaagtcacctatccgaaaggtagacgatgtcagtatgagggtcttagaggcacagtcagttcgaatgctactatcctgcctttcttcttccaagaagccatactgacctctttgtatttcttggcatttgaaaaaaacaccaccaggtggaaagactcttttctctgtccgcttcgtccttcctaatcgcatataccgatgacgatggcgatgagaatcccatccggtccgatctcgaactctctgaagcagtctcttacttttactccggcacagatgatcttggttcaacttatacctcgctgacaacttcgacatatgactcatctcttccgggaggaggatatggaggaaccggaaagatcactctaccaattcaggtcattgtcgagtatgatggcccgagtctaagcgatgtggacgtgaatagtatagcggagagcctagaggacagggagagtaaccattcgctcaccgacgacgagagtagtcatcgaagcgggagtagtagctggagcgcagaaagcagaagctttatcgaaggaagtaatggaggtcactcttacagctcatgtaccagagctgccatagaagaggattggggtcaagacccggtggacacatcagtcgatccgttcttgacgtataccggccgtacccagttcgaacatgcctaccgccttccctcggatatgtctttagcccggcctcgttcagatactctgttctcggacagtccaatttcgacgctgcctacatctcgccatccatctaataaccatccatcttcgtcctacactcttgcatctggatctacttctgatacactctcttctgaagacgaaggagaagctcgtacctccattccatcatcgcgttttcaccctagaaggaccaagaaattgttctcggatattgacccgaccagctccgcaccatctattccctcatcctacgaatctttccacgctccctccttacattccaaccgtcagtcatcacacgatcaatatggagtacagacctcgcctgagtatggtaatttcatcgatgaagagccagacatcttgttcgagcacgcagttggatatgattctttacaccaagcatccggatcatccgcaagggacagtcaagaagctttcatcacagaatcctctagcagctcgtcatctggaccagagattaatgagctaggagccagatggttgaaagagcaggaggaaatgcttcaaagaaaagctagaggcataagtggaaatctagatggtagacgtggaagtgaaaatagtgtagagggtgaaaacacacagcttggggggttggagttagaaagagacccctctggaaggttagtttgacatcttactcatctctatctttactgccatcgttccccttcctcctaaccattcacttttgtctcgacctacggaaacagatggtattatagatattcaacagattcatccaatctttcttcgaatcaggactatcctgctccctctatgtctgcttcgtccattaattcatctgcctacgaaccttcgaattctagcgcactatcttgggctcacccatcaacttatcagcataatcacgacctacatcagcgtccccacattcatcatcatcgaaatcatgcacaacatcctacccatcaccaccaagatatttactcttcctactcgccctatcatccttacccagcacagaacgattcatatggattatcccaccagtctccatcgtttagataccctttatcccaagtgcaatcgtcatcttccttacgctcggtatcgagaagagagcaaggaggaaggctcccacaaattccatttgagtcattggcgattgctgatagagatgatagcagaagggtagcggatggaggagggccatttatagcgcctacatgcaatggttgcggaacatggatgggatacatgcggtacatttgcgttcaggtcagtgaactctctatctcatcggagacgaggtttgtgtgtgtcgtcttcgctcacgagttagatttctcattcactcggttggaatgaaaatcccttttcaaaatcgaacttcagtgtggagaggcagatagccatcctgaaggacagtcacaccacggccatcaagaaagtaatgtacgcttcaatgggaagaagatcagatctcgcacatcagcacgatctatcacgtctatatcaggagatgaaggctacgatgatgctggatattcctcggatcaaaccgaacacatccaacctcactccccttcggtcgcatctacatcacctaccagttctttgtctcatcaatcacatctctcatctggtagcatggtttccctaccaccccgaaggagaggctttgagctttgcccatcatgtatcgagacgtctggggttgatcattcgaggacgttttataaagttccaggccaaagcagaagcaaaacccaaggggctcatgcgtttagggaggtcgtctgggatgatagagacggttggaaggacgtcggttcgtttgccaaccgcttatcaaagtgtcatttttcaagtgttcttcgactaactcgcttatatgaaatgatatatatgcgtagagtacgacgatgattctgtgtgttctatctgtaaaagcgtcaaatcttatgagcgctatcgatgtaagtgtcttatttcgctgtcacttgcacaacgctttcttatgaacacaagctcatcatactgttaatctaccggcttaggcgtttcttgtcaaagattcgatctgtgttcggggtgtttccgaaagatggaagagatccatccaagtcatgctttcttatctttgcctccaaaggcgggctccaagatggaaccacgagcatcatcacctggttcttcgagtgagtgctcttactctctatcatcaacatgttgtggtttactgatagagcgcgaaaaatcgttcattgatctctgtcggaaatcagatgttcaacacctaggagctttttgtcacaagttcgtgtgttatctgtctcccgattgagtaaacgcatcactgatggcttgaacaatggttttatcccattcctctccaccttgtgtagctgtctcaaaaccatcgttggccctcggtttcattgcgctatctgtccttcttggtaaggaaacgacacacttactttaagctacagactgggccctaaaagagttttcatgcctcatttcacagggatctgtgtggagtctgcgaagggctcccaatcgcaatccaaggagctcatcaagccgaccacatcatgatgaaggtatgtacaaaatccgtattgactatatagtctcatacaaatattcacatcacgttcttttctatagatcccggtcccattaggcatcgctgaagtagagcaagtgagccgacgagctagggatcagtggctcacccaagatgcccaagccatcgctattcgatcacagatggattctcgttatgccccttcagtctcttccgcatcgtcgtttccgagcactacgtttacctcccaatccccgccagtgtcttcacccccaattcgatatccaccagtcccgccgatgccaccatctcttccaccccttcctccactgtcacctcgacgacacgcacctaatcaagctcccactatcgagcgctcagctcagaaagcgtcatggaacataggagcagcactgacaggaattaagtttagaaagccacccactcagtcttcaacagaagctgggccatcaaggtcatcatccatgtcttctgtcactccagtcagagttggccacatgcggaggtgtgccgactgcgatctgagcatttctgggtgcgccatagttccagctacttgttttctactatatttatttcatataacgcaaaagctgaccttctttgtccaatatttctactgatcaaacgaacttatattcgtaactatcgaattccttagaccgagataccaatgtgctaattgcccttccgaccctttggcttataaccttgtgagtggattatcacgtttttgtctgcgtatatcttttctgaataccttcctgaataccttcctgaatccgtcttgtcatagtgcgcgacgtgcgagagaagatcttatcttattcatgatcctatgcatgtgtaagcaatcagatttgactccatatcttcttttgttaatttgttataatccattaggattaaagaaatgctcatcagaatcaacccttcacaatcacacactgaaagcttcatccgattcgacagaccggtcgacatccctgtgaagtcccttctcccccttctccccgtattatacaagaccccggcgggaagttcggttgatcctaatcagcctgcacctcctgaaggctactccgaggccgcgttaaagaacagaaacttgaataaccctacgagtccgttcaatttccgtcttttctattcttctcgaaaacgatgagacaaacccttcctcttgtttcttggctatatatgtgtatgcacatggcatacagtgtatctcaaccacctctaccaccccagcactgtgtgtgatctatgcatggtaagcatctcttcttcctcatggtgtttgcctctcctgtgatatcatcatgcagggtatcttacgtttacccgtaaaactcatcattcaacattgatttgaaaaacagaccccaatctctggaaaatggtatcggtgtgcagtctgcgaagcttcgtttgatctatgtgctgactgtcatggctcggccaaccacgacaaaggtgtgtatctccatccgtcactggctctgcaagatatctttcgtggtttctcaccttctgtgcacaacttgtgaattcggggcggtggcagatcatgtcttcgttgtgttcaaatcgaatgtggacatgtctgcttttaggtgagttttcctacgaatatatccgggctctcgttgcttcttcttctcttctctacagccaatacttcaaatctgaatgaacaatctttttttttgctcatcttttggtagagatcttacggcgctttcactttcaacctcccgtccgttcatatcccagcaaatttatttttctgatggaatatcctctttacgttcttagggttacactttgcatttacttccattcatcttattcctctctgcttcctagtatctgatccttgatggacgttatttgtacaatttcttcttacgctgtacaccattatctcttgtctgccatgctcttcataatccaagtactgttattctagaactccgcacacacgctgaatgatatacgacgaattgattagtaatgaccacgagttactaccgtcttcggccgaaacctgcgtcggcgtttaccgtcgtttttcttcttttcattcctccttctgaacacatcataccctaccgactaactacttctcctcctcccccgattatcgttctatcgatatcgctatggcaacgtcaactaccaccccaaatagttcagcagaactccctccagtgtccacgctggagggattcttatgtggaggtctagctgctgtgacggctgttaccttctgttagctgtctctcaacacttctctctttcgacgcttcttgtcttctgatcttttcgtaatcgttctttcttctctcttttgctccattccctcttcatacagctaacatcccagaggtgtgcaaaactcgacttcagctccaaggtgagctaggaaagatgactgagaaggtatacagcagcgtgtttgatgttgcaaggaagacttggaagaatgaaggaatcagagggttgcaaagaggtctgggaacggctgtaggtgtttcttttcgttgttctcaagacttgacgttcttggttcaaatctgatgtattttctttgagaactgaacagtacggctaccaggtaatacaggttcttatctcttagaaaagcagtcagtccggttaatcaactccatttttcgatttgaataggtccttttgaacggatctcgtctagggttctatgaaccaatccgtcgatctgcaatgaagcttgtgggtaagagcccggatgatcagaactttgctgtagcagtagctgcaggtgctggaagtggttgtatcggaggttggtcttcttcttttccagctatcttatctctgggcatgtactgaaaattcaccccttcagcctcccttggaaatcctctctaccttgtcaaggctcgaatgcaggtcaggccctttcaactcgctgaaccctgatgttgatatatttgtttacgcatccacgttcgtaaccaaataggcatactctcctttccttccagtcggcgcacaacataattacaagtccagtttcgatgccttccggcaaattcataaagcagagggtttccgaggaatgtttcggtatgttctgtctaacctgcaagagctaatgaggagattaagtatttgtgaggtaattctaaatatctgttggctgaatccgctgcctctgacgtggaaacaaacaggggtatagacgcagcgattctgcggacgggaatgggaagctcggtaaggatcctcgattctttttcttcacttctgatcacttattgactccgcctagaatcatttgctaatcaaacgtcgctgtataggtgcaacttccttcatatttctttgccaagaacttgctgacagaaaacggattgacctcaccgactagtttctggacgtatctcctcagcagtagtttctctggaatttgtgtttgtgtaagtcctgactgcaccgctagccttctcgcgttatctgctgtattgaagagtaatggcaaacatgagtatacgcgtattcactctctctctttgtttcttctatcttgaaaccagattgtgatgcaacccgccgacactgtcctgacacggatgtataaccgtgcgttctgtcaatctatcttgactgttgacagtcgaatgcagtcattctgaaacccactaatgccaattaacgtacactttgcttctgccgaccttgcgcgtctttagagcccacggaggttcttcctaacgggcgctcgaaaggactgctctacaagagccctatcgactgcatgatccagactacaaagtccgagggcttcttcggactgtacaagggaagcaccgctcacttcttgagaattgccccgcatactgtcattactctaggtttgtattgagtctgttcttcttgttctgttcatagccgttactagtgctgacaatttatggtccgccctccaattgcatactacacagtcgccaacgaggtcagtcaatcaccgatttccttgcgctgttaagagagtagcccggaacaatacgtatctgatttcttctgtcttgtcttttaacacccaagctcatcgtcaaccaatatcagcagtacaaggctcgtcatgcagctgtcgaagtttagtttttctacacaaaaatgtatcatgtcaatttgagagccaacagaaagcaaagtttcgtgtacctgtctacctagcagtattgactcgcggacaagatggaaacctctccgctttcgcttactaatacttgctgtaccttgcatcgcacttaccctctccattaagaactcctttcccgaacgatcacgcttgaagaggtactatccagcagaacgggccgtacctcgatcttcataggttcgaacgggttcctaacataaattcgtccgacggtcctgtcttcctttgtgccttgaaactccagcgattatagtggctctgctctcgttcaaaccctcgacctgaataactctaataccgtcctgattcaccaaagaaatctcgttcctgtccgatggacgtgggcgcattctttccatgcatcggaaacagaatcgttgaagtgtataaaaccctgagaggatgtcgatcttcggatgtatctattcttcttcccccattctgacctcctctttcccaacacattcttttgttgatttgttcttgattgaaactagaagaacaccacagccccttcttacattctttcttgactcgtttactttcgttttctccttgaccggatcgaccacaatgtcttttgccaacaacacgagcggactagtgaaggaactgcagtgtaagccttagctttcccctcttttcacttccagttttgtctttttctctctgttcttggctcttttctcaaatttcgacagtctttctttctatccttcagctatgaaagaggtaggactccagaagtcatcgaatctgattcggccgactcctcgagggcccaaccgatccgctcgatcgttctccatttcatcctcggtctcgtcctcggtctcatcctcgacctcgtcctcttcatcttcctcctctaccaattcatcccgctccgcattcactttccttcggagcccaccggtcttgaactcgacgccgattcctatcaggctgagggactcgcctttgcttttagatcccacctcgccattcttcaggaggtcttccatgccatcgtcgctgacgaagcaggctgagactggagaagaaacaaaggtcaggaagcctatgcaaccaatcaagttccagagaaggtttcccaaccttccccgacctcagtagttgtatgatgaattctctatctatccctgtttttattcgttatatttcctagggtttatggcctccactcttacttctttgggttcaagttcagggcgtttctttcttttcctgggtctacacatctatccctcaatctcttctattccttttgggttctttagggacattttttttctttaacgaacatcccttttaaatccactattttccgtctttatttcctgggcatatatttcatccatccatcttctcaatctacagcacatctcattccttgatgatttaaaatcaaacattaatttatattgggtttacggttgtcctttccttattaactcttgacaagcgaatctagttccttcctcttccctcccttttcttctcttctttgggcttcatctcgtcaggacatccacaccgttcggagtgataagcacctgatgctcgtactgagcggatcttgcgccagccttttcaagaagcgattaaaagagtatcagttagcatccggccctgttccagacgatgaagacaagatcgagacaaaccttagtaacaacggtccaaccatcgtcccacatgtgacctccaccgatatcaccgtctttgtctataaagatttgctcgatcgaaggctcgatcgtaaagcagtctccgggctgcatgatatcttgttctgtgtttctgttatgtagtacccaaggcgggtggtgaaagactctagatattccgtgacttgtattcatacgaaaaggaaaaacaacaacaacaacgacaatagatggcatacagcgaacggcgagttagttgatggaagtgaaaaggggaagatgaaaagagaaggaagcgttcttacccggaaaagagatcagatactaggaagccttggctctctgtgaatgattctatagcttctccaatctggctgtacggtacttctggtccgcagactgagattcccttttcgagcgcttccctcgctacttcacatagctctcttccttccgaatcctgccatgtatatatcaaattaaattgtgtacaaacgtagactcattcagcccgagagcaacacaatagaaataacagccagacaaagagaggagactgactaaatcaggtagcatgaacgttgcgcttgtgtctccatggtatccatcgagataaagtgtgatgtcgagattgactagatcatgtgagtctagtggtcgactataggtaaggttggtttgcagtagtgattagtcagtctgtattttgactttgaacaaacaaatgaactgatagagaagagattcactcgtcagggatgccgtgagcaatgacctgatccaaagagcgaaaaagtaagatcttgattagttggaagcagggatacgaagcgcattaaaagtctgggatgggacggacgagctcacgttgttgacgcttgaacagagtgatttagggaaggcagaatatcccaatggcgaaggatatgctcctttagagattataagttcgtgtatgcgcttgtctatctcggcggttgtgactcctggctgggtagacgaaaaagagaacgaaacgtgagcctctggcgacgtctagcccagaatgacgtaccttaccttgaccatctcgccagcctgtttgagaacatctcttgccaatgcagcagcctttctcactttgagctcttcttccgttcctagatcgatccgaccaccttctgggataaggctgactggttcgagtggagataagccggtgtgaattgaccagaaatctctgggaacataatgtgggatgggtatatgcgcgggaacaggaaacggttgtgggaacgaagtaatctgttctttcgggggatatagcgggatgaacctgccaaactgagagctaggtatctgtcttgtcaatctcgtcaatgtcgctctcatcgattataacagcagtgaaaggaaggatgatggaggaacgagatgaagttgacagggtggaggtgacaggaaaaagacgagcgtaaccactgtggccagaataacggcgggcacgtggtttcggattaactattctgtaaccaagggtctagacctttaatttacgctccaattcttttgtgctttttttctttacctgcactttcgtttctcgttcttgatctcgtccgacttcatctttatttggtgtttcctcttgttcttggttttgcgttctttcttttcttttgggtttctcttttctccttcactcacctcctctgctggttcttcctctctcatatacacgcttgagaaggaaagaacaacaacaacaaacatacatcctttctgccgcttgtctctatctttttttcttccttctttctatatatctttctttctttcttctttctatatatctttctttctttcttgttcgcttctatcttgttcgcttccacagtcagctcgcttctatcaacatggagcgttcgccatcttccgacgttataccagctccaggtcaggtctccttctttccgtcgacaactgccagaccttctttcgtgcctcattcgtccccgaggtcatccacctcgtctttctcggcctcccctccgatccctggtctggcagagcttaacctgaactcggacgacactgcctcgacatcatcctctccatccaaaaacgctataccggccgatccatcggatccaaactttgaattcggagaagcggtattccatcaaaggcgagcggcctggcttgctctgcctgcctcacggaacgaaagaaaagagcaaaaaagccccggtcggctgggtctgctggaagaagtgttggacgagctcccagagggaaacattcccgatgatatatggaagggaggtctcgaaggagtctggaggggcttgattggaggtaggcgtgagtctttccaatccttgaacttctcttcttctccttttgattgtgctcgtgcgtgtcttgaacaatgtgtcgttctggaactctcacttctaaaaggcctagcaaatcctatgccgctcccaacggtcatcaaggtatgctttcccgtttttccttggtcatctctcgtttgtgttgaccgctcaaaaagttcccccctcctccttcatccaggttctcaaagcaggctggatcaaggatgggacatggccaaccaactatatcactggcccttcgtcctctcctccgttgatccctccgctttcagctgttgaacaacctatcatccccccaaactttgcccccatccccgacgctctctctccagaatccaaccaaaattctggcctcgttactgattgacaaataagccttagtccagtaagacaaagtatctctcctcatcgttcggacgaccaagcacagggtggatcttcgacctccatatcaagtacttcgactttcccggcttccacagttttacttggttccactctcaaataagactcttatccaatttaattaaatctctgccctcctctttctcgtctctctgctcttcaattcttcataaaataacataaactcgtagtgttattttgatcatctggcgctctagaatctctaatcttcaacaatgtatcgataactctcctctttcttcctctttttctatacacatccatattcgactctgcatcggattgcacggtctccgtctctttaccttatcatatatgagttctagaatcttgtctcatctcgttttcaccccaattcctttttggctattccaatttcgttgctattgattgtgctattgtcgagatattgagtcgttaagaagaggagaagagagaagtaaagggaaaggcaaagcaatcaaaaaaagggcgtcgtgctgacgtgttttgtctggagactttctctttttcagtctacctgtttttaaagccctttgctctttgcttttcctttatcggttgctcgcttcgcttgtctctattgagcaacgcacatcatcccactccatcctaatgcatttttacagtgatgatcatctcgaacgaaatagagatggatccggatgagaacaaagaaggagagagaaaaaacgacgtttgatcatacaagttttcgaccttccctctcgccggctcgctgacttcccttctttctcccccctctatccctctcgtcttgctacgttgcctcccagatgacttatttagtcatgtactgatccaacaagatctgttttctcctatccaataagactttgtccatctgactcttcgtcaacaacgtcggtcgttctagatccttttggttgaggatacctatccctatgaaacccactcctgctgctccggttgtatttgcgctcgtgccatgcatgaggctagcactggtgtcggtcggagattcggaatccggatcggtcaacttgagttttttggaggactcatcctcggtcggctcctcctcagaaacagcctgggcctgcccgtcatcttcctctgccgatcgttttgatgggccggtcgtcggtgctgttgttgttgctgctgttgacgatgatggttggacaggggttatacgagggaaaggagggatggattcagttgatgcccccaataggtttgataccctctcgaaccctgctatccaatctgttttttttttttttggtcgttcatccatcaagaacaaacaaacacgtacgcatatattacgcgataagcaaagaaaacgtaggtgatcgacttgaacgagatagaaagaaccaaagaacataccactctcttctcgttctctctcggcatcgaggacggtaccgtccgtctcgtctagatctccataatactccggtccttggttcctgtatcgtctaaagagttcggccctttgagactcgtctgtctctgccaccgctatcgaaacgaaaggagaagaaggggagagagtgaagagagaatattagacgtcaggttccaaagatagagggtgcatttcttcacgcgtctggtcgacgaaccttttttcgagaagagttctttcactccgggcaattcctttgctcgaccgaaatatctggaggaccgatccaaaagaatgtcaacagatggccttcactttggcttgaatttctagaagaggacggaagaaaaggacatacttgtaacccctggtcccggggacttcctttccatcctcatcaaccatagcggtacttcgtttatagtttgctccaccaagactgacgatctgtcgctcatagtgacccttttctcgcatgagcttattaatctcgtcgttcaagtctctgatttcataatcagttaatccggctagatatcggttcggcagtttgtgaaagggggggaagaagaaacaagaagaagacgatattccattcctcctgtcagaccatgattctatgcagactgaccgatggaaataaagtccttcgaggaggaaaagaaaagtcaagaggagatgttaaaaagggaggacaaaccatcctgaatctttgaaaccttccgactgatctccctcaagatctctcctctgtaccgctcacaatccttcagattatcaaccgagctcgccaatcttggtcgtctccctccctttggtctggcgaacccgagctcgacctgttgggcctctcggaatcgatagagcatcgatctggtttcatccgaaaggatgtaagaaagaaaagagggaggaaaaggacgcgttcagcctcaattgacttctttctggttcttggttgagattcagccagagccttcatcaaacacgccttctcatccattcgtcttcgtaaaccatacatttcaactgtagctgttcaagaaagaatctccgaccgaacactcatacagtcgatcttcagaagaccccttctccaactccagctcgaccgacgcgagatccagaaagaatggaaagaaaaaatagatacgcactgtgatttctcttcatttcgagcctacagacgtgatcgattgaggaaagtccccagtacgaaaacaatacaagggcaacagcgatgagaataaaggatcaaagggaggaaatcccaaagaaaatagagagagagagagagagagagagagagcacattgaataaatggatctcggatgtggaaatgccggggactctcaattgaactcaaacacataccattgttgtgaatcaatctgccgacacgtctttcttcaaattccaagctcaagcactatctctaaagaacagttctgggtcaaccgagagggagacaaaggagggggaagagggaaagattgaggaagaagatagtttgaagggcgtgtgaggtttgatggttaggatatcaaaacgccttatggccgcttgggggttgatctgatggattggttacgcctgatgtaaccacaatcgttaccgttcacgttttccttgtacacagacagacacctgatttcttggttgaagggaatgggaccgatatgtacgtatccatttatattggacgatgatagatatttatatagtgaaaacaaggtttttttaagcaagatgatgtctattctgatgaacggagagaggtacgagagagatacgagagatgaaagaaaaacgataagaacagcgcaaagaagagtacgagacagaataagtaagtagacaaagagaggaaacaacgaagtaaatgagatagttacgaaacgataacgttaccgaagaaagccaataggaccaacttttacagtatgactctaatgtcaacgccagaaagagaggcagagaagaaggagaaacatggtacaacgatgacgcagaggatatataagaacgaataacgggagacaatccgagagagccagccaaagggaacacgaaaagaagattgaaaatgaggagagaaaagagcaggagagaaagacttaatccgctccccaaagcttataagtcgactcgaccagtccggaatccccctgacggaccgacatagactgtaggcctagatcgatatcaaaccctgtgcccagattcagacccaaacctaagcccggaccgatgaggatggggacgttgtgatttgtctgttcttcgaaaggaacagttgaaaatccagcggctggactagagcgggacgttcggagcgggcggtggcctggtcgatgagccagctgagggtacgcgtctggatgaacgggcccaggggccactccaggccaagttagtggcgatggacaaggtgatagagaggaagatgaggaagacgaagatagcgaggatggtgggaagatagaatggatcgaagagatcgaccatgagtgggccggtcttctcgttctgtccaataacggccgagaatgcgttttcttttcggactcaggcgaacgacgaactgaactcgaccagcgagaactgtcctgttcgggagaacgagggaagtgactggaccaacgggatccatctggaaactgtggatgagaagcttccgggctgaagaggttcgtatgaggattcaaatgagggcccttgtccgtttgaaccggtgagcgggatgagtcaaacaaggtggacgagagagggctaggagtaggaagaaatgtcgctgtcgatgctgtcgctgttgttgtagagcaagacgacgaagaaaaggaaggaggacggggcgagggggcgaaatatgaaggctggagaacggatgggaattggcgcggtggactccgtcggtcaggaaaaggggaaaaggtctgtgagagattcgaagggggagtgagcaaggatagccaggaagaggaagttcttgagggaaggatccaaggatgattcaacgactgaccttattctggggagaccaacccttgaccaacagaccatcctcatcaccgatttcggtgacttccgaccggatgtctcctctccttgccttcaagttgttttttcggtctctggccgcgcgggcttgttcttctgatacctcagtatacacgcatgatctattgaggcgggagcaactcttgcacggatcgtcccctgaacagcccgtttttctgagagagatggaaaaatccccaaggtataagagagagagagagaggaataaaaatcgtcagaagatcggaataagacggccaaatgaaaaaggagcgttccgattaacgaagcctaagaaagacggacctgcttcgacatgaatcgcaagcccttcgaactctggtgtgtttactcgtccttgagcctgaccaagaccgaggccacgagggccaaggagaccaacgagggtgatggtcggctgccggcgctgttgtcatcatccccgtaggtgtagacacttctgagggtacggctgatgggaaggatacaccgagggaagaacccgaggatgatgaggatgatgcgatggatgatgttgcgaatggtgatggcactggtgtgagagtaggattcattcttcttttttccaaagtagagaagaaaagaggagaaaagaggagaaaagaggaggcgagcgggatgataaagcagagtaacgtgttgaggctgattgacatacaagagaacaataaaaagctatcggaaccgaacgaactgaatggataaacaaacgatataaccacccaggaagaaaacaaaaggagagaacgggaagacagcaagaaggaataaaaaaccacaaaaagaaaaaaagaaagaaaagaaaaacggagaacagaaaagaacgccctatagatttatataaacggacgcatgtatggtgttgatcaggatgatgaattgaaccctcacatttgaagagattatcttcatcattgaatgaaaaatattggagaaaaaaaatgaggacagaaatgcccgggatctattacgtgcccggcaagaaaagagccggtaagaagacgtaggtaaatgatcaagatggaagctgtgcctttgagaaagaagccgcgcatgtggcgtagcggcgcatcaaagccggccgcctatgagtgagtgcgatcaaaggtgatggtacccgcactaatgccattgcttgcgctactgttgatgtgatatgtatttgtactaacactggcaccactggcgttaaagtgatggtgtggttagtggccgtatcgctcctcttgctgatcatgttgccaatatagctgtggctactgaatcaatgacgggctgctggcactgctcatactattaccaccgagcttggccttgctgcgattaccgccaccgagttataattcatgcgactggttggtgtgatccgaggattttctccccttgaaaaggaaaaaaaaaaagggggagaaattttcaacagcagcaacgggtgtaatctttccttttgtcatacctgcctctcattctcggtcgttcccttcgatctattcttggataattctcctcgccattgctgcactttgctcatccgacgcctcgtcattctgttcacttggcttacctccttttgtcgtcggttattatgcttctttctttctttctttctttctatatccgtgctctctcgcgctgttctcattgtttgttccgattctctatgcacattgttctgcgtgttctctattccgtgccggctgtcagggatgtgacctgagtgttacacctcggtaaccttcttttggttctggtttctcctgcctcggtattccttatgctctctcattacatcaacatgcaggtatatgaccttccagcgcaggtgcttctagcaccttctatgatctgttctcttatgcataatcgttggagtctaaggatgatatataagacgggtcccctttgccacccatagcatagtctaccaagcctgaatcctttgtcattccttggttccctagtactcttgttccattgttgtatcaaccttattcatacgatttccctgccttgcgctctcgtcacagtcaccaagctagagagcctgaacttccttcttgccagccctattccctgcctggttacattcttgtgaccttcccgttaccctctgaacccggaccctgacaccggccctccccatgcttttctttctcatcaatacgtagaacagcgtgggtctgtctctctccctcttcctatgcaacgtatcttaactttcttttctttctttctttttgtttatgtaaattcaacgcatggaaataagatagacggaccatttcgaccgttgtgtacacataaacacataaacacagattcttcttccggactctgcgtccgaacggagttctaaactagatatacgtccaaccagtacaatcctcacagctctcgtcctcgccttctgccacagggacatccgtccagtcccgttctctaccttttctatcgtccgtctcgccttggttccatggtttggagtatacgttatctgataatggtaaggaaaagaggcaaagatccgatcaatcggggagattcgtgattgatattgagaagagagatttaccaatggcatattgaatggtgtgtgaacgcgtcgtccgatctaatggccacccccactgaggagagacagatagatggatagagagagaacacacacacacacacacacacacacaaggcgatcgtcagcgcgacgcgataccaagaacatgataatgaatgacaagaaacaagagacatcaaacggtaccttctcgacagttcggtagatgatcagattcccctggtggcagaccgaatcgatggagtaacccgcccggccacacacgctgaacgggcctctacagttcccagtagcaatcacatcacctgtatgccacacatgtgtcactgggttgaacctcctgtcggccggtacaggcaaccccaatcgttggacagacaatctatcgggcacagcctcgaacgtcaccgtcggtaatccaaacgtcaaaccgaggagagaagccagggagcctcctaaggagtgaccggtcagccagaactgagcgcttggataaagcgagagtagagatagatacagcttgatcgcctccgggtaataagattcagagtcgtacaatccggttcggacacacatcgacaggcatgtccgcttttttcctggtagcactcctctcttctcacatccacactgctcttttgagaggccgccacaacaacagctaaacagcttgttatcgttcaacctgtccaaccgagccgtactctttcctcgaccggaatcgatcgtcgtgcctttgaaagacacaatcacggtcgagtttgtctcgtccgcgaagacgtgtcctctcatcccaccgtcctcccaaccaaatgggaccgtcaggttgaatctctcgagctcggcccatcgggcatcgccgggaagagcgtacgcgtcgttcgccatcctcgccagattcaccactgtatctagatcactcacatccggcccaattacctcgacctcttcccattctatatctttccgactatatccatccctccactcatcagtcggctcccaatcagctatcgaagcctggtcgaacaaggtcgatctgtccgttctcttccgagccgtcaggatcttctttcgcaccgccttcaaaccggtataaccaaccggagggccatccgaatgggtcgagttggatgatgatgatgatggatgtagaggtgactctggcgaagagctatcccagatggaggcctgtactctggatcggtgatgggtctgaacgggaaacacatcgatccgttccgcctgagctacagattggacttgagtttgagctaccgctaaaggcaagatgagcgggacgataagactcggtttcatttagaaacgaccgttggttcgaccaaactaaggactacggatgaaggagtgatcgagacgattatgagtgaagggatgtacagttgaaatggctgtgtagaagcaagttgctattttcttcctccggaccgaatctaatcggttatgccgatgtaacactaatacccgagatggcctaaggcatgttggacgatcctctgcttgtccccgatacatccaagaatgcacatcctctgatgggtattaatcagctaaataaaacaagacgttgatcttattatttcattctcaatttacatgaccctcctttctttcttcgtttcctctcgctcacccttgaccgagacgaagacttgagctgaaacgagtatgaatgatgtcatttagttctctcctcgggtacgcagcaaaacggtgaattcctcagtgaagagaccagcggatatcatacctggcaagaaagtttatcttctgtccggatcactcactcactcactcactctcattcgtttcgtcatgcctttcagttgtaggttctgctttatccatcggatctgccttggtccttctcatcgcctctctgtgccatttggctgacatcatcattcttcgttcgattaacagaccagaaaaagactagagtaagccccgcccaccttctcatctagcagtcacatggaggctagacttctaaatatttttctcctctcactctcgctctactctagacatttccaattatccccggattcgcctacgtcagtgttaccgggaggcatttccacttttgggcgaaggtctgttctcttctcattttctctttttccctcttccgttgccccgggaacgctccagtcgctatgccagaaaggagaaactgacttgtttgccaatctttcttcatagatgggccggatgagatacgacaagaactagaaacctcctcgactgctttagcctcaagtactctttgtattagacatggctatttaggtcatactccgttttcccctttgcccagtcctagttggaaatactcaagggcctcagctcggctctgttctccttccttcttcttcttctatacacgctactcttccgctctgctcacgctcaacttatttgacgtgttctgtatgtctataacttctgacatgtttgctgaaataagaagagtcaaagaaatccattgcgtacgtgatccacgctgggcggagctgaccgaaaaagtcaacagtctcgaacgtttggtccgacttgaagcgcaacagctcttttacctctcacccactattccctcgacttctgttcttacattcttgatgtctggacgttcttttttctcttcaatagcactcgccttggccgtctgccatgtcttcctgacagcctctctagttaatgctgccaccgtcattagtggactccaagcaggatccctaccggcgaacgcttctcagttgctctcgaacagactcatcgggttttctatcgagacagcctatgtcgtcgactttttaggtacaccggcttcaccaaacagtttggtcttgaacttgatcggtcaggttgccaatcggactggaggaatctctttcaggtagcgtatctccctctctttcttcgcccacgtcaccacatctcaaactggccctacctctgctgtttcttctctttccatccctctaggcctggaggaatcacagtgtatgtatagaaatccctccgagcagttaactcttacgcacaaaagaaaacacccaagttgatgaatttcacgtcttgcagagactcatcgatctatgagccctctttgagtgaacccctggtccggattgaatctgccaccggtgggatctaccaaactcaatacggacccggctttttcgagtcgatgaacttgcttccttcgagtacagaatacatcatggacctaaactttgggaatgattcgtgggagattgcgaaagacgaggcggaagcagctctgagtgctatgaatgggaaaatcattgctctcgagcttgggaacgaaccggatcagtataatgcggctcagaggacacccatatcgagttggggaccgcaggagtataccgaagagtttcttgttcgtcttcttttacttttccttctttccctttctgtttactttggacatgctagctgatgtgaaaggtgtgcttcttaaacctttgacgaaccagacctggtcccgcaacttgacgtcggctctaaacctgagcttaccattctttcaagcgggtgcattcggtaaggtctttaactcgaacccctttctatttttatctctttcttcgtcttttttgtgccgacttgttgtttgatctgaccctctctctaccttttctccttcctcttggtgacagcaaacgatccaacagcgtcggcgttgattacaacagaggatgtcgtcgctttggggattggcaatgattcgtccatcaagacgttctctcaacatgtccgtttcttctctcgatttgtttagagttctgtttgagtaacaatatcctgatctcgttctcgtggtttctttcatctattcttctctccggcccctcctcgaaaccgaaagatgtatcaatactcgacgtgtgattctgctcgggacgagctcgctacgctggatgctctggtcaaccacaagaacatcactggtacagtcttttcctctatttccttcttcgatccatttattattgaacacttagcgtgatggctgacttgttctggagataccttcaccatggttcatgcatgatagcatatgtggatttgtggaagccacagacggcagctgcgaagagtgtaggtgccgagttggtcattggtaggttctcgatcgcttgcccgactgctttcgttactgcttctttattatcgagagtcaaaacaagaacaaggaatataaacgtctttgcacttgtacttacttaattctctgtatctgaacgcaatcaaaaggcgagtttaactcggttagctgttcaggaaaacagaacgtatccaacaccttcgggcaggccctttggtacgctattctccttcacttgatcagaactctacacaaccaatttgtcattcgagacactcattcttgacggcctttgttttggaaacatgtaccaaatctgatcttgtaggctggcggatacaatcctatactctgcttataccaacatttctcgaatgtactctgtatgtctcgtcctatcctctctatctttgtctttctacccttttgttttatattttcttttcgcagcactcaagatgaatactggttgaaattctagcaccaaggcgcgactcttgtcttgcagtcttccgatcaatcaaacactgtcggtttcagttggttcgtcccccccttgtccttcttacaaccggccacgttttttttgccttcctatatccgacccaactcaagccaacatgtccttgttcttttcttcatccttataggtacgactttgtttacccattgaactctactcgaaacgggccatccagatcaaccccatcttttgtcagctacctcctactagccgaagcaatttcctccacagccaacacttcccagataacgtacattcctttggaagagacataccctgacttggcgatctacccgatttacgactcggctgttagagacgtcacagtaggaccagctcggatggtcgtccttaaccttggttctcaatccgatctgtccatcaatgtcacttccctcggtttcacctcgtcctcgggcacgacggtaaagtacatgaactcgacaggcggtccatcatccaccgttacaaccgaggcgacctgggccgggcagagctacgagtccggcctacccgtcggaacagaagccgtctatacactcggatcagacggtctggtcgctctggatgcctaccagggggttcttctggttctgaatggaaactcgagtactagttccggttctggctctggtacgacctcgagtttggcttcgccaacggcgacaaatcttgggtcgggtaagagtgaggcaggaaggaagatgggaggaaccagtactttgtggcttggtggtctcgtttctgcttggattctcattttcctttcctgatcgcatatcttttaatattcatacggacttgctttgtgttgttttctttctgtgtttgtttgcttgctgtttatttatattggacaatttcccttctttctcatcttctctctcgtataccacacacattactttggctctcttttttttcctcacgctcatttctcatcacaccctcccaaggacaagataaaaatcatgtcatgttgaaatataaagacagtattaaagatgaaacgtgatatatggtttataggagagaaagggggatatttctaaatctagttcttggcgctaagagcatcaactccaggaaggaccttaccctccaagagctccaaggatgctcctccaccggtcgacacgtgcgagagatccttctcctttccggcgttggcgacgacggtagcggtatcacctccaccgacgatcacggtcgaacccttctgggtggcctcgatggcggcctcgaggagggaggaagaacccttggcgaaagcagggaactcgaacacaccggcaggtccgttccagaggatggtcttggactcgagaacggtagctcggaaagcctcctgggacttgggtccggcatcgagacccatccatccgtcggggataccctcggaatcagtagcggttccggtctaagagggagttcatggtgataggcacggttcatgagctgtgtgttcaaagcaaagacgaggaaaagaaagaggaagaaaaaaaaaagagcgcaccttggcatccttgtcgaacttgtcggcggtgatgaaatcggtggggaagacaaccttgacgttgttcttcttggccttctcaagaagggcggcagccttctgggctccggcctcatcaaagagagagtctccgatgctcatactctcgacggccttcttgaaggtgaaagccataccaccacagatgatgagggagtcgaccttgtcaagcatgttctcgatgagctggatcttgtcagataccttggcacctccgaggatggcaaggaaaggtcgctcaggggactcaagctagacgaagaacatggtcgagtacttgtcagttcatatcgatcgggactggctcggaaaaagaagcaacgggatgaaacgtacagccttggcaaagaactccaactccttggccatcaagaaaccagaggctcgctgggggagctcgactccgaccatggaggagtgagctcggtgggcagttccgaaagcgtcgttgatgtagaccgttccgagcttggtgagggactgtcggaacttcttgacggcttcaggatcggctataaaggaaggacagtcaaacggagcatacgcatgaaagggggatcagtgttttttgaagagctggaggcaattggggcattggcgaaggtgaataaacaaacccttggtcttcttgccctcagagtccttggaggaaccctcctcctcggcgtagaacctcaagttctcgagaaggaagacctgtccgtccttgccggcggcaacggccttctcggtctcctctccgacacagtcagggaggaaagtaacgggtcgctcaaggagggactgaaccttctcggcctgtttatggcagatatgtagtcaggatgtcagcgctgtgtcgtgatgtgataaattcaggcaaagacaactagagacgcgatctgatgagatgaggagaacgagaggaacgaacgataggcttgagggagaacttctcgaccttgtgtccgtcgggtcgtccgaggtgggacataaggatgacggaagcggcacctagaatttaacgaaaagccgaacgagttttcgagtcaggtcgaagaaagatgaatactacagaaagaattctttcctttcgaacgttcatatctctcttcggacttgtcggagatcaagaagaacgttcgggaagaaaagagaaaacatctagtgaagaatgtctatgacgtaccctgctcaatagcgtacttgacggtggggagggcggcgacgattcgctacagagacgagggcaaacaagaaaaagagagagcgttagtaactcggacgttttctagctcgttggcaagcctgtgttcaagaggtgctgggcttggccacgtttgagatgattgaagatatcatccgggagggagaaagagagggaaacctacggcagggttggtaatctctccggtcttcttatcctgggggacgttgaagtcgactcggatgaggactcgctctcccttgagggagacgtccttgatggagagcttggaagaaagagacattattctgaggaggacgagatgaaagatgaaccagattgatgagcgaagcctcatcggggagcaaaaggatatgtgtaggagtagaacgatggcagcagcagaaccaccaccagcaccaccagcaccgactacaacctagatgaggatctagcctacgtacaagatgagatgagagagtgtatacgagatgtgatgggttgatgatgtgaggtgatgggtgggagaaaaagtgaagagaaggaaaaaaaaacgtaagaaaaaagtatgggaatttttatacttgaatttctatctaagtgttttccccaaggaagaggcggcagttggcacaccttgttcgagaagctgaaggaagcgcccggagcattgtcgtcgagggtggcaatggaaacacggagagagcggggccagcatggagcatggagagaggatggcacagtaagaggacgtgtcaagaggatgtagcaagagagagaacggccaaggagatatcggagggcgcaacccgtggagtgatacattcaccagattgttctacacgttctattacagcatacacacatattcttcctctttctgaacaacgtcctctcatcggatcgcatctctccctctgacttgtactgatcggatgtgtattccgttattccctttactgctcacacccttacatcccgacggacaagggaaaaaatccggatacacctatatgtcatatatctaaagagagctgattgcttttatgtctttctcttcattttcattcttttcttcccttctctgttcatgctgatgacgatccagagtcagtcttgatttccttcgcggccgctcctacattgaacctcttgttgagatcctcataaaactgaacccggttcttgatcgtccccgggagaccaatctcgattccttgtccctccttggtggcagtgtgagcaaatgggcggagctgcaggtcgaatgaaacagtcagaaccaaatgaaaacggaaatagttcagtgtgtgttgaggattaacatgatgggatatgtgtccttggagatgaaagcgaaagacccaacgacagcgaatcgacagaagcaattctcatcctctcccacaaccgtttgtggaactcttttctctctctatattgaaggaatcctggacaacacacagacaaaagccaaagagcgaaggaaactcacatcgctacacttgaacaccgagctgttctcactctcgaatccagggccgataaagatcctgacctttttgtcgtcaatgataaagtttgactttccggccttacccctgtagttcgcgtgtcgaccgggaggaccggtcctgaaacctacaccttccgggaaagactgtctgtttcctgcataagagagagaacatttaaagaggatgtaaggattagtgagcggtctgacggtagagaaagaagaacagagtccaaagagatccacagagcgagagaaaaagaaaggaagaagagaaaggggaaaaaaattcctacaaacccttatagtagtctttgttggcatgcttagacttcagagggaaccgggaagctttgctcaatgcattcaacgtgggtctcatcctggctacgtcggttgatcgatggtcaatggcgaaggacaagtcgaagcgatcaaagtgtaggcaaggtgttaggtagaagcaaccccaagcttgttagggttaattcccttggctgcccacgaacacgctcgcgtacacgcgtctcttgcactttaacctccaatcttcaatcttccatcccactacccgtcgttgccgtcattcggagtatcgtgtacccactattacactcctggtgttgcctctggaattcagactgagatatattagaggtccagatcctgcttagtatcctgtccgtggcctcctcacaaagatggaaccctcgccggcctactccccagtgatcactcagatccttcacaagtcatcttcctcaaacgatctgccctcggtgtccacccttcatggtctacagaccgatctagatcaactacgagccgcagctaaacgaagggttcagcacatcgaaagttcgaaaagaagactagactcactccgggatagagatgctgccagagaaaaggaagccgtcaaggaccgaaagcaaaaggaggcgaccgagaaggaaaaggatcggctgagaagggaaaaagaaaaggacagaaaaaaggaggttgaaaggaaggagagaaaggagagagagagaatggaagaagaacaggaagaggaaagactagtcgtcaagagggaaaaggatcagcagcagcagcagcaggaagatagagacaaagaattggcccagcgagcgaaggaaaaggaagatgcggcccaagcggcagccgctcagatcatggcgagggattcagctcgacagtctgaaagacctaggagtccgtcgttgcctcctcaggtcgtcagacgatcgactcggtcgcgatcaagatcacaaacacccgtgccggatatctccaaaccggtgacccaccgggtcaagctcgagtctggttcgccattcttccgtatctgattctatcatcacgcttttctaacgatggatttcttgttcactgtaccctaggagcgatatccattcctcctgtctcaccaagtgcaggcatgtcccagcctaacgactcggatatggattctgacgcgtcttctaccgtggtgggtgctcctaaaaacaggttcgagtatcctttcttctctctctgcatcaactctatatggtttctgtttgtcttacgcgtcatctattttgtgtgatatcgcacaggaagaaaaagaggaagcgagagcagctggtctcgagtgatgcagaaggagaacacgagctcgttgtgcgaagcggtgctctgtcccgtggacatggtgattcctcaggcaagttctctactcttttctcgtcatactcgagacgcgacatgctcatgccaatctttcctttcttgatatcaacagcggacgtcggtcggtctagagagacttcggtgactaagccgacgtcgacaccttcgatcgtcacaaagacttccccatcagctccaggaggatcgatacacctgacacctcctgtagctcgaccaaagatcaagctgatcaacggctccaaccgagctatttccccattagcgaccgtctcttcgagttctacacctcgccacaaagcgaattctcactctccctgccctactcaagatccttctcttctcgccaccgctgtcaatcctacttctatcacttcttcttcttcttcttctttccttcatcccaatccctccaaccttcctggctcaaacataaacttttcactaccttctgttaccgcttcaaatggttcagctgtcagaacactggtccctccgaaaccagagattcaaaaaccgatgacgcccctgccgacgacacaatccgaggtgaacgaggatttcacccaagccaaaccgggaactcagctgttgttcgctacattctggcagacggccgaaggctacgtccgaccgataggtgaagaagatctcgcctttttgaagacatacaaagaggaagacaaaacgcctttcgatgttcccgcgttgggaagacattactcagagatctgggaggaagaagacaggttgatcgagctgggcttgcccctacctgatccgagctctacaggagggatgatcaattcgcctgcaaagatcaagacagaggacattcattcccgacaggatcagtcgatgatggatcccaacgggtcgagaacaccaaacgatgctaacggagccaccgggctgataacatcacaaggaggaccgaacggggtgaaccgaagcttagactacccacggatgggtagaaagacgtttcattataatcccagacgagatatgaaggatgaagatcttgtccatcaggatcgaggcgaaggaccgctcatggagagagtgctgggtggattcttgcgagtccctagagcacctagtggggggcagagaggagtgatgtttgaggagaaccaaatggacgaggatgatactccagaccgtaggacggatgatcggacgaaatccgaagttgatcaaccctcggaggacgtcgggttgggctcgttagaggacagggtcaagaaggagttgatgtttgtgggactcttgggaaaacaagaggtgagtaccgggctgagagctcgtttcttttttgggtcgtgtttcttccgctctcatattgaatcaatctaaattctcctctctctctctctctgtgcgttatcaacaggtcgattggtcccaaagagaggatgacgagatcacgacgtcactccgacaatgccaaaagctgttaaaagaacaagtctcgctgaacgaagcgcgccggtcgattctccttgagattgcgaaagagcgattggcttactctgaataccaacaatgtctggacggattggaccgaattatcgatacctgttgggccaaacgagcaaagcagattgcgaaacagcaaaaacgaaagaaggaagctcacaccgccgccggcggaacagggccatccggtggatctgcctctggtggtgggactggtgggggaaactcggcaggaccggggacgtcaacgatgacaaagacaaaagaacgtgagcgcgaacgggacgagcgggagaaggaagcgacgaaaaagttggtcgagacgatcaagctcgccatgggaaggcgaaggctgatggtcacccatctgggaacgatgttcaaggatgaagaagaggaagaacctggtagattcatcggtctcccggtcaggagtgtgtatgaaggactagaggacgagttcaggcaggtcggtctggaccatctggtcgagaatggagcgaagccgaggcgggtgatataggcttgctcatagacttgtctctctgtttgtattcatctctctgtctctctgtctctctatctcttcctctctatacctttctatgtgtctgtctcgccctctgctctcgattgtacatatgtaaaccaacatgaatatgtttctgtacgaacgctgcaacgtccatcaccaggccgacgaaagccgaagcgtaaccaccacttccctggttacggttccgtccgaggccgctccctcttgaatattcccagctcatcccaacttgaacccaaccaaccatcccacagccggtcttctctctcatccattctgttctctgcaatgcgtatcgcctctcagcttctcaaggcttccaagcccattcaatcgttcgtgtctttgctttgttttctttgttgtttgggaaaaaaaagctgtctccttctcgagcgttactcgtactaggacgtcatctctcctcacccttttcatattcgagccaatcccgcccatccggttttcaaacccaacagtggaactcgcatacagatgaaagaatcaacatttaataaactaaactaactctgctcttcctcttgttctgttctttctgctcacacacacaattacacacaaccccaggcatgctcttttggcttccaaggtctcagctgcctcactccgacagttctcgtccagcttagtgttcaacgctgagcgagtcaaggttcccaccatggccgagtccattactgagggaaccctcaagacctggtctaagcaggttggagagttcgtcaagcaggacgaggagattgcgtacgtcctctttttttctttctatattgttagtctttcttcaagctctgatggggatagagtcggaaagtcacggaggaagaaggaaaaaaaaaagatgggaaaaagttgatgaatgataaaccggcaacggagagcgcagccggaacatctgaatgacccgctgatgtgaaagcgacagaggggtctgctctttgatactgtttgggttcatccttttttttttctttcacaagaacggaacgtgtcaagcaaaggtctgagatcttacgagaaaaagagcaagatagagggccgtttgggaactgggaaggagggcatcggcagatcttctctcttgtgctcaatcaacacattcactaacctctatgccatccttcgctgtccgttcggcgtccttgctttctacaacagcaccattgagaccgataaggtttgtcttgatctctactagcgtatctatcatccaatcacctccgtttctacccgttcgctgatcttgattagcttgcttttaaaaatctaattgtgaccatttcttatgatggctattctctacatagatcgacgtgacggtgaacgctcctttctccggaaagatccttgagcttctcgccgaggaggagtcgaccgtgaccgttggagaagacctgttcgttttggaggctggagaggaggaggctggttcgtctttcctttgtcccttcctttatcgatcgttagctagtcgacccagccctttctctaagagcgtttcatcagctaacgcgtgaattatcgtctgtcatcgttttctttcttctgcaggttcgtccgaggctgctgccgagccccccacgtcttctgcgtccgagcctgctaaggaggccgagtctggtcccaagaagaccgatggtgagaaggcccccgagccagccaaggccgcccctgccgctcaggacaagccctcgtcgcccaaggagagacaggagagtgcacccaagaaggagagcccgcctaaggccaagaaggaggagaagcctgtcgaggaggccgtcaggggagccagaaccgagactcgagttagtcctctttctcttttctcttctctattacattccattccatcaaatcgttctttctgttgacgtaacctccgatggatcgttgtctcgcgtaaataggtcaagatgaaccgaatgcgacttcgaatcgccgagcgactcaaggagtcccagaactctgccgcctcgctcactaccttcaacgagatcgacatgtccgctctgatggagttccgatccctttacaaggaccaggtcctcaaggagcagggtgtcaagcttggtttcatgtccgctttcgccagggcttctgtgttggctctgaaggagatcccggccgccaacgcctcgatcgagggtcctaacggttcgtcgatcttctttgtcctctatacattctgcctttgtgatgtacttactcaatgaaacctgctcggtcgacatgattaaattcaggaggagacaccatcgtctaccgagattacgtcgatctttctgtggccgtcgccacccccaagggtcttgttactcctgtcgtcaggaacgtcgagaccctcggcttggttcagattgagaaggccatcgcggatctcggagtcaaggcccgagatggaaagctcacgatggaggacatgtccggtggatcgttcactatctccaacggaggtgtcttcggatccctcttcggaactccgatcatcaacttgccccaggccgctgtattgggaatgcacaacatcacccagcgagctgtcgtcgtgaacggtcaggtcgtcgctcgacctgtcatgatcgtcgctttgacctacgatcaccgattgttggatggaagggaagccgtttctttcttggtcaagatcaagcagtacatcgaggaccctcgaaagatgcttctttccgccttataagtagtagcggtcgcagtaaggggagtggaggagcgcggtcgaggtgatgagaataggaagaacaggagacggctgccggtcgattgtgatgatgttgttcaggctggttgagcgggcggtcaggagcgcatggttgaattttgatttccttttccattgtttacttcacacgcttctattcatcccactcgaattcggttctttctctctctaaacgtccacaatgtatgaacaatatgattgcctagatatcagtccgcttgccttcttgtgacatagagctctgtgtggatgtgtgcgattgggcccaaacgaggtgacgaagttaacggctttgtccgaatggaggctgaccgtctacgatttacatcccaaccatcacatcaaccatcaccgcaactgccgcttcatcatgcttgctacaaacacccattcatcaggtctaacaacagcacaaacatcaacaccaacatcacaagtcaactcgtctacacatccaacagctccatcaggtctatcagcttggacgtccagttcgggctacgtcttcccgccgatctggtcgtttcctccattcttcacgtaagtcagactcctcataatttcttctttgtagcctattcgtcctctcccaagagcagattgattctgaagatctgtggattgacgattcgatgcatccgacgtatatatttctgtccgtttatgacggaataaagtcaacaacctaacccagagacatgtcaacatcagacaaatctatggacaaacttgatactctcctgggcaaggtttcacagggtattcgaaattgccgtcgacggtggatccatctctactggaacatccataggagctgagctaaacggagtgggggaaaatgcaggtgtaggtacagcgacgagaacggggacgaggacaggtggaagggtcggggtttgggagaatgaaaggataaagagaaaggtgggcagggatttcgctagggttttgatggatgctctagtccggaatggtttgtcctcctttccctttgctctttctttctctgtccctcctctttctctgcgttcatcgtctctcaccgaaaaaggaaagcacgaggacgtttgactgactatcatcgttttacctgagggccaaaaggacaggcatcggtaatctcaccagttcaaacatcgaaaacatcaagagaacatccaacggccgtccttctctactggctcaaaccggatgagtgggcgtcgattctatattcatgggtgcgcatcctatcagctctccatcttctgtcttaaagaactagtctccatggactgaccgagatgtttctctttgatcgggtttgggggtgttgatacagatcgtggctaccggtcagacgaaatccatcttgacattctatgatctgcagtcatcagaaaccggctctcgtacgtttcttttccccctcctccttccttcgtgattattgactgatccattcattcaatctcctatgtcacaattaaacctcgaaattgaaacggaaacattttctccaaagcggtacatgacctcccattaccactcctccgatcggctctccagatcctcatcaaacaaaacaaagcacaagtgttcaaatcaacaggagaagacggcgaaactgatggagagggtgtcaagtttgtgtagcaggtttcttcctaggaatactgttattaatctcactatgatgttcgcggatttccctgtgatgtgtgtaggcttgctgtgcgcgagttcgactggttagacttggaatatcaagtgaaggagggcggccaaagaacagttcggacaggcatcctttccatcgaatgagtagaaaaccgagtgataaaataaaaagaagaacgaagacgaagagtaagcccaaatagaaaaaggaaaacagagaccaatccgagagaaaatggacgtgaagagtattcgataagacacgagagtctaagaaaagaatgtggtctaaatgagaggaagtttatgacttgactttgatgtgtatcaaccgagagggtatatatatagagattaaggacatttttttccagaatgaaaggacgtcacataatagggagtttagagacaataaagaggctagctttgtatttggacaagagacggaagagaggcgagaaagaaggcaggacagggcagaagaaggttcagacaagataaggcggtctatgatgaagcgtacaccttatagttgaagttgtactctgtcgtcgtagctaatcgaaccaaaaagacacagcggagatctagtgagcaactactcaaacgcaccattaaacacaagacaagggagaagaaaagcaaacgcactggcaaacgtgtagttactgggcgagtaatctacatacgtcgacccacttctggtaaggacgactttcatcccttgaccgccaacgagaggagaagcgagcgaagatattcctgcgttgacagagaacgtagtggaagacgtcccactggaaagagtcacggtcgaaggggcagtggcgaagacaagggcgaagaaactgttgatctcctgtaggatcgtaataagaaatagaaataaaaaaggttgttcagtcgatgtaccgaagaagataagaacatgatggctctcgagcaggaagaagaggctcaccgcagtatttgaaccagaagctccggtttgtgtgagagtaggaggcgcaccggccgtatcagcagtagcgacagcagtgttgacgtgaggtcgagccgacagataaacctgtagatgagttggccccccaaaggtaaatacacacgtcatcagctagcgaacaacggtaaaaacactttgtggattaccgaccttatcacatgtgatcgcagggaattttccagtcttgaaagcagttgtataataagtatttatagccaagtacactagagagaggccataagaaatagggcaagtggttgagattcttgcggttgacaaagagacacagaagagggaaaagagagtgattcaccttgatgatcgaatccgtcgacccaagcttgactgttaggctgcgctccgtggataggtcccatgtaatgagattcaccataatcgttccaagtgatctgttcgaccaagtcgaactgatctctcatcgagatcagttgttgccatcgaagagaaagcggccagttatcggattgatagatccagttcttgttgtaactattcacgccgtaatgagtgaaaaataatggctacaaagcgttggaaggtcatgttgagtgtgttagtccaacaatgaggctttcttcgaagaagtgtatacgtctcatcacgaggagaggggagaaaatatcgttgaagaaagaagagacgcacagagatggaaggcatataggtctttcctttagcgacagcgttagctatccaagttttgtccgaactggtcgtaaccggattggcatccatactccaagcactattccagttgaagatcccgtcgtaagaggtgtagctgtcaaagcctgagaagaatgcaggaaggaaatacatctgttttgggttcgtaccgagaaaacgtagtcagtataccgagtttgcgcgccatcagcaacaataagaatcatcaggacttacagaaacaccttttgcagaaagaacacttcgaaggtttgtccaagcgccatccccacaggattcacctgcaaaagttgagaccaagactttattctggtaataaaattggttggcattggcggcataattcgagatcaggttggccatagtgctggatatactgccgcatgaccaaacgctatgattggtaaagatcaaagaaatagaactagtcaatctaaacatcgcaagaaactgatcaggctatacaaggattcttctaggacgaacgacatgtctagactgtagaagggatttgatccagccagacacactcaattagaaacaccatacgttatattcgatcggagaatgaggctgcagcacttacgagaagaacagcttgaaccctttgccatgagctgcagcaactttataagcggacgcgacttgagttatttgccagtcatccgtcccgatgttcaaagcaaatgcgtctactccagagttgtacgccaacgtgctagagggaaaaaattacagttcagttaggatccgatgataagaagaaacgagacgaaaagaaagaagagtcgattggcgagagggggaacgtacatatcttgtaaccaatctgattcggtgtaagggtatgtgttaccaaccatgaagtgagaaattatatactttgtcgaactcgaggaaggagcggacaaagtaggcgtgtaagaatttgttgaggaacatggtcctgttctggcgttaggaagtgtcggcgggattgagaatgaatacgcagagagtctagaaggaggggttgatcagctaaaggataaagagaagaatccgactatgagtgatacaatggtaaaagaatgttactaacaagtatgctcctccacagatttcgctagagttaccagcgcaagccgtgctgcaacctgaagcggcgactcctagcccagacgtgaagtcgtttccgcaataacactatgaacagaagaaattccaacatctttcaaggcccatacttgacataacatgatgaagaagaaggagagaagaaaacggatgatcgtacctgacttccatattccagacccgcgatggtgtagctcatacttctacaataaacctcacagctctcgattgtcatcgaactcgtagaggtcgacgccccagtcaacgctctgctcgatccatccgtcacacagcctactgaggtccaaacggtagaggatgtgtagaccgagagtaagtaggatcctccacatttctgagtgccgtctccaccgcagatgctgttacaattagaagaagtcatgagtgaggcggaggaactgagggtattgccacagtaacattcggtcgaatctgtcgttgatgccggtcaggaaaacagaaaagaagaatgaggacacaaagaagggagaagagggcccaggaagaaaaaaaggagaaagaaataaaaagacgtacattccattcctgcgtttgaataacctttcgagttgcagagtgcaatacaagactgaacggtcataccagtcagaccagtcgcgctgtaatctgagagagtccgggttgctgaatccgtgtagcaacccaagtaggaccagccagcgacattagggatcgagttggatgaagtcgattggaagacagttaggaggtagtttccaccacctggatcattcatgtttcccgagatgtgtagaattgagaatcagagatgtgattacttgagacagatgccatcaattgaagagagaatctcttacaagcttcagtggcgtttgctaaagcgcaaagagacagaaaatgaggaggaaacttaaagtcaatatttgtcctgatagatcgcgctgcatcagcttccatccgagagaagagaactgaccagcacaagacgcggtacacgacgcgtcacccactatagtctgcgagttagagattccatatccacagtctgtaggaaacgaccatacacatgcattcagttaccaatcaatggcgagtatgagagaaagagaacgcgaaaggctgacagcattgatacgaatctgttgaacacatcggatgaaaaagcgccgaggtcaggccaatcgatctgtatgaaagtgaaggcaggtacgtagagagaaggcgcttacattccgttccggaaaaagtgtatcctttagcaagacaagtggctgcacaagccgcgttggtcattcctgagatgtatcacggaagggttctgttgtatcagcatcttgtgaaccccaatgaacgggggccagaaaagaaacgagaagacggaccggcggtatcggaatacgtatatccggtcaacgctcttcctgctgaagtgtcagacacacaaccataataagttgtgcccgatggggcgctaggaacggacacaatcgccttgtagaccgagatcaggtaagatccgccgcaagtctggctggaactacctccgcatgcagatgagcatgtgcccgcagtgagggaagaaggaagcgaggaggcgcagtctgttgtgggagaataatagaagaaacagtcgggacagaggaagagggtttatcaaatgatgaacgagcgacgttaaaattagaaggacaggaagagcgtcaagacgtacaacactctgttccatctagggaagaggaaaggaaagaaacgagaatgaacacgtttcggcgcgaaatttgtcagtaaccgatgatcactataagatattcatcttgaagagcactgcaagaagactcacattccattccagcgtacgtatatccagcccgaaagcaatacgacgtgcacgaatcgacagctttgaatacacgcgcgagacttgcaatgagcgaaggcatacgtctgaacagaggcaaatgatcgggcttactcaaacttgaagattgtgtcttgatagttcccaacactctgcttgacgcagaatctacataacacccaacaaagttgtacgaggaggacgtggcaattccagttgacgtctccttatacagatttaacgcataagatcctccgcaggtcacggtagtgttccctgtgtgtttcgttcgaccgaacaaggtcattcgtgcgtgtagaaagagaaggtcatcgttggtcagtttggcagctgaggctaaggatatacagctgtagaaacacggacctccgcatggagttgtacacccagaggaagcggtcgttccttgaccgtttgagagcgtgtttccacacatgcactgtgtgtaatctgggagagaaacgacttcaacaagactgcaaaacaaaggaaagagacaacacagacgcagaggactcacactctaagccagcgtagatgtatccttgggagagacaagtggccacacagagctctggcgtcattgagcttgaatcgacagagtagccggtcaaagctctagctgaaccatcggtcacacaaccctggcttgtccacacggtttctccagaagagatcatagtaggcggactagccgacgcccgtctagagagcgtacggctgattcgagttgagtttccaaaggaaagacggggagggagaagattgctgatggaggatccctggtggggttgtcgtcgaggaccgtgggtcagtcttccggtgactgacagaggaaagatacagagcagtgagagaaagagggagaggtaggggagcaggaggaaagattgcatggtgcctgttccgatcaaggccagatgaggaaagggacaatcaggaaaggagagtgggccgatagaaaggaaggtgtacccagagcaaggtaatttgccgaaaacgagtgtggctagtttgaaggaaagcgaatgtgtgttgtcggaagaagaggaggagggaacgaaaccaaaggaagaagagagagaaagaaaggaaggaaagagtgctgatggaggtgaaagagtgctgatggaggtgaaagattattccgataggaacatgcgaaatgaatagaggacgaagaagactcgtcgaaaccagtccgatcgagctctaccggatgtacggatgctagcgagggtgctgctgatgatgatgttgttgttgttgttgttgttgttgttgttgttgttgttgttgttgttgttgttatctgttgccgaagctgaaacgaggaagctgccaggagacggagaaggaggatagacaagaacgggaagagaggagaggagaggaaaaaaaacaggtcaagatagaaggcaaagaagaggagaaaaaatgatataaacaaaagaaggtaaaattggcgaggcgttcgggcttgcgagaaaggatctgactgagccgaagaagaagagaacgaagaacccgaagagactgagggatgagacggatgaaatccaagatgggttgacccgtcaagatatcagccggcaaaaggtcgcttgtcagatagaacggaagtcccgacaaggatgtttgatattcagagcgctcaattagttggcacagaagatatcttcttcggcgtgctcattagctccagctttgattagttctctctttccctctttcgcctctctgccgaggcttgtgtttcaagaggaatgtctgtttgagtgttgaacgagaagagacacggataaggttgttctagtcctatcttgtcttgttttgatgttttgatgttttaacgttttaatgttttttgtccgcctcgtcggagtttttccttcttgggtcgatcactgcgctaaattgattccatcctctcgcgttcttctgagcctgctggttctgcgttgttctttccgaagagaagagaagagaagagaagagaagagaagaagtagaaagaaaacatgtcccgagtatcagaggccacacattaatcccgcctcgccaaaccaaaccggcctgcgaatctgccgacagagctcgtccagccgtccttctttattttcctatctcccggctgttctttcagattcggagaccagcccatccatcctagatcagtcttccggatcgtccgaactttgtggttcttttgttcgttggctgacaacggtcgataacgagaatgagaatgaggccgagattgaaagcgggaaccaggtcgagatggacgagggcaaagctcggtcactgttgtcagctccgtccccgcagtatggacaggaagctcggaaataaacgccgaagagaaggtaactttagggagaagcgacgttgattttgacaacctcggttggctacccttccttccggccctaggtctgctgtcgatctccgttgggagaggaggtagaggaggacgagggaacggtagaggcaccggtgctcgtgcaggcgccggaatacgcccatgccccgaaccctgaagtttcaaatgaccacaggctgcagaaacatcggtattcggaggaaaggtattcggttggagaacgaagtcttttctcgggttatctagattcgcaaaacacgatcgggtgatcggcctcggactgaatacttctgtaccctgaacgggtgagggagtggtcgagctcgagatcgattttgaccggcacacagcaggactagacttggatccagtcaataatgtcggtggtgacggtggtgatgataaatcctcatcgatgatagtagtgttggtactgatcgaatcagagaacagcgaagagaacaaactcgcatgcgaggcgcacgtatggaatgaagaatcgtcgttctcctcatcaattaacacacataaatgaaaagaaagcgttagtcttaaacgacggccaagagcgttagaaacaagggaaaacaaataaaagaaggcttccatacaagattgtcttcctctttgaatgtgaaatcaagtataatccgctctttcgaatgtcgaggaatcccatcaagatggaaccccgactgatcaagcgctccaagtcgtagaagactactcatcctcaatttaccaagtatgtatggagtgaacgagaaggagaaaggatgactgaatataggaaagaaggacaatgtccactctgtgatagatcgttcttctcttttttatccctatcatgtcttcccgtttctttcgcctgatctgaatgatttttctttgcgggaaagtcgaagttgaatgactcccgtccaaaaaagaaaacacgacattcccgtccagaaggcagtaaagacagatccgagagaaccgcctcgagcagatcccataggacgggacgagcccgcatttactctttcctgatccttctttccttggctcagacagcgagagaaatgagtgagaaacacttgatcacacggttatcctgtgcgtatcccttcgtattctgtcagcgagatttctgacttcagaaaatgccgcccgtttcgctcaaacatcttcattcagatttatcgttccagaacgaaactctacacggaagcatgtctcagacaggcttctgataatctttcaaagcttcttcgttccagctgaggaatttaccgctgagatccatcggtcctcctctagctgccagcgccgcaaacacatatccaggactagaggtgtcaatcaaacacacacacacaccccatatcagaatgaaccgaacaatcagtctcatcacagtaacggacgatagatacaaagatacagaaaggaaagacagaacgtaagaagggaacagactcttcgggatcaagcaattcgccctcagcatacaatcgttgaacattttgataatcctttggagtcatgcattcctctcctgtcgatcggatcaaggtttgcatctaatcatgaatttcacacccgcaagaaaggaagaaccagattcgatatgtatgtcaaccacgagataaactcgaaaagggatgacggaggcaaagagagatagatcgtacatcggtattgacaactccgggtcggatggcgaccgtcaagacatctttttcttcctctcccagcgtactgtacatgaatggattccaaagtagtaaacaacgctcagtatgcctcttcttatcagttgacaggagaagaacgaggggaaagaagagtgaaggaacataccgagctaatgaattcatagctgcttttccagtcgcgtaaactccccagccctgcgttcctttgacggaagccccactagagaccatgacgatcgatcctttggatcttctcagatcaggaagagccacctgaatggtatgtaggagtgatagaaagtttgtttccagatgggcttgccatttggctctggataacaagaacggaaacgtacatcaatcagtcaaactcggcaaggcgacggcgacgacaacgaaggaaaacggcaaacatacacatcaatgtcggctactttcccgagaggttccaacaccccagcatttaaaataattgaatcaacaccaccccaagctcttgccgactcgacagccttctcggaaacatatctctcattcacatttccttgaataagctgaagtctgtccgggttttgttttttcaagtcgagcagagcccgaggaagtgatcgagagatggatatcacctgggccgagaatggaggaagcagaaggagcttgagaatggagaggccaagacctcgagaggcgcccgtgagaatgattgtctttggcgacattgcctcgttcaaggtctatacgagatgaagtttgttgcagacgatactagcggtatcaaagtgatagcaacatgtcaaagattcttagggttaaatgtgctgccggatgttacaatgacgtcaatggcgtaacactgagtttgacattgcaacgatgcactgtccattgtttttgtacaatcattttataactaaaagcatcctagtcggaagaataataaagatagggctacatatagagaaccaacaagtaggcagaaagaaagtaataatccgttacaagcgaaaaactctttctagatcttgtcctcaaccttgggggcaccggtgtggaactcgtgggagtgcttgacgtcaccgtggttgtgaacggcctcgccagcgttggtctgggacttgaactggtcgagcgagatggtaggaagggtggtggtctcgtggacgatgggggcctcgtgaaccttctcgtgaacagggatcacgttgtgaatgacctcgtgctcgtgaacgtccttctggatgacgggctggatgtgctcatggacgtggtggtggacgtgctcagactcggtcacaccaaggttctcaccagtctgaatggtagctccggcctctgtatagtggtcgtaaatatcagaattagaatgtgttgaacgatattatcatgagatgataaatgaggtaactaacgtcgggagctctgaatctggctctgctgctgggcaaggagggcctccttctcaggagaaagcttctcaattcgctctcgagtgacctcaggggcaatctgggtaacgtgctgatcggcaaggtgctcagtggcagccacaggctgaactcggtgctggtggtgatggatgtgtcgctccttgtcaatggcctcctgggtagtggtgtgctggtgagtctgaacggtctcctgggtgacaggggcggcaacctctcgatcgacctctgttttgtggagttagagaaagaatagatgggaagagcgtcgatcagatggatgttataattaaaacagacgaaagaagatcgaccaaaaaagagtgatggaggctaaccagtggtggtggcctaaataaaagtacagcaaggacaaaattcaaaaggagagaaaaaaggatcgagatgggtaagctgagtgtaaagccacttggatgcatgtatgcgctaacccagaatagagatgagatgggacatgggagatggaaaaaaagagatggaatacatacctggtggttagatccgaggaactccttgacagtgttgatggcagaagacatgcttatgaagagatggaaagagatttaagaaagttggagtgtgtgtgtttgtgtatgaatgtgatgagagaaagaaagagaaagggaaaagacgctcccctgcagaaaagacgattcttataggaaacctgatgagacaaaaaatatctgtccgactaggtacacaaaaaggcacaaaaagggcacattagtcgggcgaatgatgcgaataccatgcggtcattctgcggtcatccaagtgatattcgaggatcgcagtccggggcacgtatactttatatttggtcatcgttcttctctctagtggctcctgtgctcgttcgggaagtagggtattccctcctccccatcagagcagtctggggtagaaggatgagccagactgggcgagttgacctaagcgtcatcgtcacacgtcatcagctctttccttttctctcttcctttctctcgcccgggtttcacgtgaaactgcgcaggcccagtgggaggatgacggccgagctggaaacgatgttccttggagaggtgacgtaaacattcattttgactgcgcgcattcggctatattctccccaagttcttatccatcaaccttttcatctatccatctttcgccgtttcttcgtctctctttgttcttgtttccaatctatgcgaattaccagaaaaacatgcatatcgcaggtatataaccctacgagagaagcgctaactcatcatcccccctgaaagcgagataaactcgcttggaagtagcttggttgatctttcgtttgttcgggatcccggtcttgttattttggatctatgcatcacaaagaaacaaaacaaccagaacatctaagaacggacggaagatatctcaagacagaaaaccaagaaagaagaacatacgtaccaaaagctcactgatcaacgtctgtccctctgtttcgtcctgtccctcttgtgccaaccgatcccaagcatccatcaaagttctcaatgtcgggtactcttcaactacggccgaactcgtagcgggtgtcaccctggggatctgctcgagcatcttccggtacgtgtctccgaatgaggatccccgtcggaatgacttgtcaggatggaacgacagatgagtcttttcaatcagcctaagctcgacaagtcgcgaggcgggatggcaaagagaaagcgaagcaggaggtagcgtaagagtcaaagaaataatgaagagaaagaagtgctctcgtgaaatggacgaaacttgtaaggtcggatagccacatcccctactgtactgatgattccctccaacatctggctgtccgtctcggctgttgacgcacagatgcatagtgtttaacggaggcgatatgcttggtcagatacaacagatcaaagagaaaatgataaaagaagaacactgagagggacgttgaactaacaatgcatcaagaaacacgactctgctatctgtaatctcaccagcgctttctctatcatctctggagtgacatccgttacctctgttgccgtccccactctgttagtcttccttcctgctctcccagtccgtctacctgtcatctcatcgggcggcgcttcgagcctacctcggatcatcgccgcgaactctctgttctctctgtttcgatactttctcgcccaaccgttaaatccctgcacacagatcatcacctgcgctttgatacccaaccccaactctttcctcagctctctcggtaaatccaacagatcatcctcccttaccagactgacaagctctggggtagacagatagatcagggcggtcgtctctggtacgatctcttcggcctccaatggaagaaaccgtttgaggagctcatcatatcgagctctcagccgacgtctaaaccggatgacgttcgctcgctggaaagggaagaaagataaactcgaatgacgttcgatgatcgcttgttccaactctggtattaaatgatggattgaagatgatgaattttgagagggtgcagagagttcgaccaggagctctcgaaaggcttccgtcttgtctgtccgaagcttgttgacttttagctctctcttcttggcctctcgttcggcctgtttgagtgcctatttataagaaagagacgaagaagtccccaagaagagtctagttcaatcattcacccttcaggagctatggaatgacaatcggtgcaactcaccttggcgcgctctttctcttcaatagcaatggcctttgaaccaggaagaaagcacacatagcatctaagcgtgataaaccgagaagtagaacatgacagaagaaaaaggaggccaaagggagacagagacgaaccttttcttcctcggattttccctttaagattcccctcggtttagcagccccaatgatttggtcagagatctccttctcactcctctgctccctctccttgctcaagcccttctccctgcctcttgtcaatcgaacgggcggacgtcttttggtctcggataacggacctttaccgaccttctctcttacttgcgcttgtgctcttgctttggtctttactctctcctcccaaacgtccatctcaagttcatcctcgtcctcgtcattattcccaccctctaacctccctcctttctctaattcattgatccgtctcgactttccaccatatcgtcgtgatctgttcagaagcgcgccgatcggggatcccctagatgttgttgctgcagatcgatcactgtcttctccttcgtcatcttcattttcagatagaaataaaccgatccgtttcctagctggtgggctgatagacacagagagctctcggtgtccggaatcatgtctctgggttgcgctcgtcaaggagatcgaaggagcgagtttgggccggacgaccaattcagaccgctcaggtctatgctgaaggcgagacattggttcagatgtgcctgccagcttgtcaggggtcaacgaaacaagcgaggatgaagaggaggacgaagagaaggaagtcaacgaggaagacgaggtcgaagctgatactttggcctgatctgcctgtggaggtgtcgaagagataattggttcaaattcaccaccatccgattgggcgtcaacggctgggctggctaaacggatagagctcgtggacgacgagggccatggcggcgtttctatcaacaactgccctttatcggctcgagaggcatcacgatcgacggttgccgttgccgaggtgagatcgacaacctcagtgatttcatcatctgatctcttatggcatattggcctactatccgaatgatgacccggctgagtccgtatcggaggtctgttcctgacaacagcaacgacggctaggccagtgtgtctcgcaaggatcgttccgtttcgagtgtcagaggaagttgatcgaggaacaaagataacgtctgacgggtctacttccaagtctgtcaaagagtctgaagaaggtatctcctggagtgcatgaggattagaagacgaagtgacctgaacgagagagtcgtcaaaagtggtggtgatagaaggtagtgggcatggcctggatgacgaggtccaagcgattctctggtgatcgactgagggaagcccaaaggaaacatctccctcagatgaatcttccgctactgcttcatccgaggtgaggatcacgatggtctcgtccatcgatacgaggaagatgtattttgcggatacgactgcaacagagagagtgcaagatgatcttgattcacactcgcctgtggggaagcgagttcacgcgacgcgtctggtcacgtgagctgacgcgtcccaaccacgcatctgccgcagaaaaacgtctaatctgctgggagtacgaacggatattctgaatgatagcgccggttgatagagtacattccgaggacaaacgacacagatgcttatgggttccagatataacggatatatgtcagagctgtcctctcatgaaacacgctctgtggcacacgtaccctggtctctgggtgagatgatctatcgtaaggttgggcgcgatcaactatggtgtgataaagtacgtttgtttcccgttggaactctcttatgatgacgtcgtctgtctgatacaggataaacatacctgcagtgtatcagcacagatcatccgagcagtctatctgggttgattatatgactgtgatttgtgaatagacgatgccagtgccgatacaatagtaacacaaaagaactacaaaagaaatccaaacgaactacaaaaagaactacaaaagaaatatgaaacatttcaatacacttcgacacaaacgccgtcaactttctgtttctcatcctccatccgattgcgtccatccatccattcgtcgtatcccgttccatccatcgtacaatccatccgtctttctgaaggcactcctctttcttatccggccatcctatattcccccttcattcctatggtcgatatggacgatccaattgcttcgacatcacagtcttttcgcccatcgaaaccaccgactgtgatcccgtcttcaggattactgcccccaataaacacatcctcacaacattcgctgtcgtttgcctccgcctcttcttcatccacaccctcctttgtgccttcctcaacgaggacagctttgtctcgtccagatccaccttctcattcgtctagtataccctcgttctctcctcgtcggccagtcacgatgtctaacgcgtcgtatcctcctaatcaagctgtgtcagcttcttcgtcgcgttctcaaccctacaccttcttttcagaccattcgtcgacctcagccccggtcgcttcctcttcttcatcatacactcgtagctttggtacgagtggaccagagtatgctcatagtccatcacccataccgtctggatcagtcgaaagggtcactacgccgaatggccttctcaggatcagcagcccacggagtgggaagcggaaagctagaggctttggcgacaggttagtttctgtcttacttctattttatcctctcagtactcgtgtcctcagcaagccggttcaggatgggcacttgggcggaaaggtgtcatacaaatggtcgaggaagtcataaaaggctataccgggtcggatggttactatctcagatgtcatcctgtgctagaggagtgtatgcgccttcgtcggcatgactgagaccttgacgactcatgcgtacaaatctatcggacacaacgggtccagtccctcccgatatgaattcatccttccgtttccattcgtttgtaaagaaaaatgacatgttgtagttgacgcaaataaatctaccttgcctcgttagattcattcctacaagagacggatccgacctacactctacgtaccacctcttagcggatggttcaggtggaactccgccctgtcgaacacaacgacggcccaacggtggagatggaacggatgctcagaaggacgaagcgaacgagaccttctcgtatctactgaaatctgaactcttctcaggatccacaggtgtcccgagatcatccccgagttccttccatccaagcgtctcaccaggttcattcttgacgtcgtccgcttccttttcgaacccacatgtacccgactccccctctcgttcacactcacattctcaccgaccatctccgtcaaattcaccatcaggttccatcctccccgtaccaagcacgcctacccgaaaacgactgtttacctattcgtctcccgcttcatcctcccgactagcagccatcacgtcctcctcctacaacagtggggctcatccaccaactgcttcagacttaaatgatccgactcacgaagcatattctttgagtccggtcaccactacatcccaacgggttcttctgtctcccagaaagccaagcagactggtctctaaagggccattcaaagttctagacgcgccttatctggcagatgattattacctgaatttggtcgattggagcggaacgaacatgttgggtgtagggctagcgagttgtgtgtatctttggagcgcgaatacgagtaaggtgacaaagctgtgtgatttaacaacggccgctcaagtcgaggacggtagagtgcttggaggaggtgggcctctgcaaccagagaaagtcaccagtctgaattggactgctaaggtcagtttgttcaccctttctaatttatccacgcctttctcgtttgttgatctaaattatcctccttttctgattaaaaagggtaacacggtggctatcgggacaagtaaaggcgaagtccaaatctgggacgctgagaagtgtaaaaagattcgtacaatgaccggtcacactgcccgggtcggctgtctcgcctggaacgaatctgtcctatcttccggttccagagatcggcatatctaccatcgagatgtccgtgcacccgagcatcacttccgacaattggtttctcatcgacaagaagtttgcggtctccgatggaacgtagctgacaaccaattggcaagcggtgggaacgacaacaaactctatgtctggcagggtacagattcggtcgatccgatttggaagttcggggatcacaaagcggcggtcaaggcgatcgcttggagtcctcatcagagaggtgtgttggcgacaggaggaggcacggcggatagaaggatcaggttttggaacacgatcactggctcgttgcttagttcaaccgatactggttctcaagtacgtcttcgttcctttcctctacttatgaattgtttctttcaaaactcatcagttttgccttttacaaaaataattcgattaggtatgcaacttgatgtggtccaaaacatcgaacgagattgtctctactcacgggtactcctccggacctgttcagaaccaagtatgcatctggaaagtgccgtcgatgagtcaagtggctgggttaacgggccatacgttcagagtgttgtatctggcgatgagcccggatggtcagacaatctgtacgggtgcaggtgatgagacgctgaggtaagtgtcttcattattcaactcacccttctcgcggtcggccctaattgtatcatattccaaaaatcaaaaaggttctggaatgcattccaaaagacgaaggatcgcaaaaagacagacggttcagctcttgatccgttctttgcgaaaattcgataaagctttctgctcttttgatgaaaccgtcattgggtctcggctttcttttctctgataaatgtccttctgcctttgttctattctcataaatatgttcggttactccagttcagtgccttttctctgttcttttgttctgtttgaactcttggactttctttttctctttcttttttccccctcttattttccaattttcaatttatttttttgcttctaattactgtttccattcaaaccccatattcaataatgtatatacaagccgtctagatcgagtacccatctgatcagtccagacataaatttttaatattcgccatgtagtctatcttcctcttgcctcttcgtctctttcccttctcacttttgtgtgggtgtgcttattttttcttctagatcttcgatttgtttactttccttcttcaaaaaatatctcaattcggtgtcctaatttaatatcgtcttcttgctcagagataccggccttttgggttcctaggatttttagtctaagaatttgagaatcgaaatccttctacaaacaatattgacccacctgctcaacacaatcaagtcttaaaaaagaaatagagacaaaaatccccttcctgaagagaaaagcgagaagaatagaaaatgaaagcaaagaggagatgatgatttgtgtctactcctctcgttctatcctccttctccgagatgcgctttgctcgttttatgtcttcccggtgactgtctttcggagatctgttttgttttttaagtaccgattgtagacagatgccaatacaaaggtccagagaggtcaggacgaattgagaaagagaagacgaatttatgaaacagagaatgaatgaacgacaagcaaccaaccataaaggattccatctgcccaagcccaactagctggccaacccgggtggatatgatctaagaattcctgactatctctgatgacttctgcccacgcattgtacctcaccccacctcctcctcgttctttggcgcctgatcgtggtccacctgatcgggcttgagcgattatgaccctcttcgtctcttcctccagttgtctcactctcttttctcttaatacccatggccaactaaatttctgaggtggaatatggaaagatctaacttgcactcggggcacattggggtgattcggagggaacgtgtcggatagagtgcgaagaagggaggtcagacggcgcgtgaaccaggctagccgagaggacgagagaggtgtagatgatagaggatcggcaaagggtttgatttcatcacgggatggagagggatgggaagcgttcatcaggaagttcttgacagacatctcgtcttgagtctagagttgatgaagagttatgaagggtttacggatcacaagagatgatgagtgtctttttcatcgtcgagataggtttgtttgatcaaacatctgatgtcgaaatggcgagaaagacgacatactcggaacatgcctagatcccacgctcctactccaacttccaccaagtctatgtcattcactccgcctcttccgatagctttcaaaattggaaggaaaatctcgttcattcgggcttccgaatcgagtggagggttgaagtgttccgatctgaacaataagagagaagggagctcaacaaccgcatatttctggatcataggatgaataagacctcagagaaacaacatactcgataggccagaacgctcggtctccgaaaggcatatctttggccttcttccaagttccttctttccccactaactctcctttcgactttctacccttttcttcctgatgtccatattcaactactccaggcgtcgtgactccatcgtccaacccattccagaaaccccataggaagacagcatcgtattgatcgatcttgcacagccatgggcgactatgttctgagccgtaagaacgaccctgtctataatgttccgcatagtcttcttctagagtgatcaatcttgaaggatacgtgtcgggagttgtagtgggtgagtagatcgtcacatagtcggctgggtttccttctggccagggaagaggcgttagaggtgatgaaggtgataggaattggcagagatggactgataccaccgagtatgaaagaagaaggacgagcgccgcttagcaaccatacgggtgggtgaggggcggaacctactcgactgggaaggggaacttacgtagatgataacggtctatagagtctcccatcaaaagaaccgttctgcctctcaaccattcaaaatcttcatcgccctcctccgccatttccaactttcgagacttgtcatccatggcctccttccaagacttcattatcatcttctcctttcctctcaacttgaccatcagcttttccatcaaccgcggccttggcctactcttcagcttaggcgatgcaggtgtatatgtagttaggaaagggtttgagagattgtagccgaggtgaccgggagtggtatatggatgagcaagagtagcatggggtttgtactcagatgaacgcaagggatgatgacttctcggaaacctagagagcggtcatgaacgccgaacaagagatcaacgtctcgaacagaatttttgtgtaatgaaagagaacagcgagcagacgtacccccatataaggatgagactggtcccaatgagcaagaagaaaatgaaaatccgacggcgcgaagggtagataccaccaggtttcgtcggcggaggaacgggatatctaaccgaaggcaagttgatcgtcggtcggtttctatttttcaagcaaccgtcaagagaatcacatcaccgttcaagagaaagaggaaagagatccgtcagatcaagtgtttaaacctaaaggaaaacagatagatagaaaacagagacagaagaggaaatcaaagatcgaacctgttcgaagcgatagctgaatgtttagtcgtcatggctcaaaccgactgatacaaattacaatgaagagaggaatcgagtacgcaacactcctttcccaagttccgtctaatgatctgctttgtatg

SEQ ID NO: 2849 - DNA, 37336 bp, Xanthophyllomyces dendrorhous
cgacatatcaggatcattcgggttggaaatcaccgcgcagcgtctctagcgctggggccgaatgatggaccgccaagacatcgctacaacaaccgcacatgatactccaaaggatgttgccaaattgagtgcaaagatgtgaatttgacatgactcatgaagatacaaatatatataactagagaaggaggtcttgtctagaaatctctaattgcgctcaagccctacccttccccttcgcgtcttttctgctttcatcgtcaacctggttgtcaccaggactctgaaactgtttttgcacacgtctgtaatgctccatctccgtctctgagacactgggtatcagttctcgaagggccaaatcgaagtcttcttgagagacaagcacagcgatttcttcaggacgagccaattcggatagatagtactggggggagaggggatagggatgtggggagctctctggccgaggagccgcgttcatctcggctgtttcacgatgaaagccagagtgatcagtaaagagaacgaccgatgataagaaagagtttcccgcatctgattacttgctcgaacgatcacaaggatagagagtcacgcaccaatctttttatctacttcctctgcctttcttgacatcgcttttaacatcgcatccgaacaaagcgcataaaagtccgcacccgtatagttaaatggacaccgctcagctactcgatcaaggtccaggccagggtccattttgaactttctagtgagagccttgatgatgttcagctgggcttcatgtgtatcgctcacccccaaatagagcatacggtcgaatctgcatcatcacacaagtatgggcacaggttcagacacgagacagatcacaaagggaaaaggcaaccttaagaaatagggcgtaccttccaggtctcaataaagctggatccaacagatccggtcgattagttgctccaattacaaatacatcagatgaaccactcccttccgccgctccgtccaactctgccaagagttgactgacgatcctgtccatcactcctccagaatctccttgattaccacgtttgggtgctacactatccagttcatcgaagaagatgcagcatctgaagagatgaaaagagcgatgaaccgagacgagaactcttcttgatcagtactcgatcgcacaaaggcgcaataccacaaagtaaagaagataagaggatcttacggtttggcatccctagcacgttgaaacacccgacggacatttgcctctgactctccgatgtacatgttgagcaactctggtcctttgacagagaaaaagttcaaggagcaagaggtggcgacctgtagaaaagacgtggtacactaagtacgaacggaaattggtatgatgccagagactaaaggaacgtactgctttagctagtaacgtctttcctgttcctggaggtccataaagtaagatacctacgaacagaaaaaaagacgatcaatcttctcatcaacaaacataaagtcaagaaagaatgaagaagagatgtaacaacccaccggaacgtttcttcaacccttcggcaaataattcggggtgcttcaagggtaattctatcgtatccaaaatctctttcttcacactgatgagtccaccgacatcgtcccatccgacattgggaattttgggagcgcctatactttcagagtaggcagctcgagcttggtcaatcgcttgactaaagtcagacgatgttagggccaaaccagattgagcaaacgcgatcaatgggcaggatgttctcaaactagccgaatcagaaaaaatgagatatacaataatggcggcaggtaacttttctttagaatcaaaatcgaaattcgaagcgatcactaaaacgatgttaacatacctggattcactcgtccgtcccacagcagctgattttgctcgagcaaccaaggcgactagatcttgagcaacgagcgctgccgtttggactgcaaggttttttacatccacatcggccgctataggggtttcggcgatgatccttcgaagaatactcaatctttctttctcgtctggagcctttatgtagaaagaaatgattaagggttcagtagtcagcaagaaaaactgaccatcagatgaataaaacactcatacctggatggaaatctcctgcttgaaacaccccaacacacccgatggaactttatccccgtctgatgtcgttccaacaacgacaaccgggaagcctgttgtcttccagctagctgataaactctgtatgcaatcctgcagaacacccgcaatctgaggttctgtaggaagaataagtcaagcagaagagaccagactcagattatcaggagaagaacaaaacaagcaagcaaagaagaaagctatagccatcagaaagtgataaacgaacccttgccagtctcctgcgcttgacctttcctagcaagtgcctcgatgtgccgaaggagtaaaatacaaggcgaagatcctgccgctcgctcgaatcgcgctcgtaaaacaccttctgtctttgaatctgtgtctgcgacgagctcgaagcagttgatctattggcacgtgaattagaacatattcgaaaactgattaggagaacgaaaatatagaacaaacaatggaaaccaacctcaagcatgccgaaccctaaacgagcagccgcactcctcgttatcgttcgcttcccactccctcttgcccctttcaatagaatcgagagctggagtccgcactgacccatagatgaacctagcgaagatctcaagatctcatagagtgtcaagagcggagagggcggtgagatgcctgggctaggagccggaagaaggtttgctgtttgaacaacaattaagattaattcagcttttcaagcgtaactgatttgtgccggagtggaaggaaaggagaagaggaagaaaacgaacggatcccgagccagtctcccatggaacctccaacggcctgccgatgaacaagcccagcttgaacaagcactgtgacctctgggtcaactacataaccaaactcacccctgctggctcgtcgctcccaccttgtttctctcgttgtcgtaagggtcgatagctttttttgagcggtctctcctgagctagatactgaggaagccaatccgggcccctcaattttggacacctgaaaaaataccatagtcgtcgggatactcgacccctgggatgatcccaacagggagcgatctccatttttctcaccagcgtcatttctgctctctccactctcttcatcggcagacaagaactcatctacaccgacacccacgatatctcctactttgagcaccctccggttgcctgttcctggtccaccgaagaattctcggagctgaaatacgacctggggctggagtcgtttgctagttgaggccggactggcaaggcgagatagcacgagagaagcggctgtgggtataggaacaggcaaagctggagagaaagacgttgggtgaatttttagctgaggtggcgaagtagcgaggggtgcaagattgtgtaggattaatgggggcacatggattctaggtcgatgtcaagcacatgatcatgagataagaaaagaagttttagggctaacaatcaaacgtgcgcatttaaaacatgccaagattggaaaatctacgtacaaagttgagcgaggagaggaagacctagccgaaccggtctcttccaatgttcgaattcgaacgattctccagtctccaaacgtgtcctccggttgactgaaatttaattccgggatggcgcatacagcgaccttgttgtaagcccagaaaacagaaataatgtcaggtattaattcatcttctcagaaagagatatagacgtacccagtccccgtcaaatgcgcctatacgacctaggttaatggttcgagtccagatgaccgaatcctccaagcctgattcctcctttgatttgtccaggatcgcattcggcctctccatagaaacggtgtcgaaggcgtttggattggaacctgatgaattgccaggtagagagattagagaagaggataaagtggtgtctggggtcatgggagcgggagaagaggagaccatggaagacgacagaggtgatgaaaaagaggaagaattggatgacccgagaagagcttgttgaaggaaggcgggagatatttcaaaatcaggttcatcaaagtcatcatcgtcttcgctgttctcgtcctctacgtctttgctgtctgaccattcgggttcagagtgttgactgctagaaagggatggagacgtgtggccgtttggaacgacggttttgtctgaggagaccgatgacggagatgagtcggccgaggaagatgtaaaggagcgttcgtgggatagaggcggcatcagcgcttcgttgtccgtctcgttcggttgctgtgcccaaggcgcgaccaacacctgggtttcttcgtcttcttctccgtcttgcccttgttcttgctcttgttcgtcattgccatcatgttccaacccttctgcctgttcatcctctggcaaagactgaatgaactgtccgctgagtgtgggttctgtcataagtaccctgaaggctttgagatccgaatgagatccggtctggctggaaggaatggtaaggatatcggttgtacggacgacatgtgggatagcacgaagaagcttgtccggagatgaatgggcgaactgataggcatggagggaaagcggttggagtgtcagcgacgtaagcttcggaagctctgtatagtgggtattcgattgagagtgtgaagaagaaggcaggggaaagaacagcgacatgatggtgttgattgtctaccagttggttgcgagattggcggtgagttgtgagtaccaagagtgattgaagatcgtttgtccgagagccgggggaatgatacccgggtgaccggcgtgtaaccaggggctgtaactgggttgacgcacggacgtcttggttacagctgccagacccgatgccacgttccagcggatcggcgatcgaaaatctagacgtaccttatgacgtcaggtttattcagggcggtgacgctctctgtatgggtgcagcccatgcttaaaggaaacaggcacacactacggaatcgtccggaaacactacgaaagactagagaaatccttgagctttttcctgtttttttcccaatgtggtcatcaatcttgtcaactttgccttgaagaatgaaaaaaaaagaggcgggggatttttttgggtgcaatacaaatagcagccagctcatcccatcatcttgatccgcttctttcttcctttcaacaccacacgcattctttcaagccttctttcttcttcagctacactcactcgtcctacctacccacccaaacatctatcctagttagctaccatggccgagcgagtcgtcaaagagttccttgctacccacaacaagaccggttccaccgaggtctgctccgagattgggcctgaggtccttcaggagaccatcattccccacgttcacaccgaacaggcaaccggtgagctatccacctgtctatctatgactgctcagctcacagtcggaaactcattatatcttcttctctctcagccattgacagggagcgacacatcgtatgttccattcatctgattaattttctcagccccatctcttatctaacccatcatttcctttcatttcctctctcctttactgccatcccttcttacagcatcaccaccagcaccgagtccagcccatcgttgccaccgagcacttggctgaggagcacatcgtgcgttgcgttcccatgttctatcctttcttatcattcattccgctgcttgttctgacgtcttatgccttttttccatacacagactcaaattcagcctgccgttgtgcaggagcgacacgaggagatggccccggaaaagctcgagatgctcgagaagctgaagacccagcacaagaacaccagaaccatcgcgcccactgaggagaccgttgccgttttgggaacgaccgcctctgagcacgtccaccaccacgtgcacgagcacatcaccccggtcatccacaaggagacccaccagcacaagatcatccacaacgtgatccctattcacgaaaagattcacgagagccctatcgttcatgagtccaccgtgcttcctaccctcaccatggaagagttccgagcgaagatggcacaggctaagggacttcaccacggagagaaggagcactctcaccactactacgagggtcagccccgagtatccgaggacggatctcacccggttggaaccaagactgttgttcccgccaatggaacatcgcccgtggctgtcaagtcccctaagatctaagctgacttttgggctagtgtattttgcccttgttttcaatctccagctccattgtactggccggatacgtgtcatagctgatgcgtctaatctataatcttgatatcttcatcacttttctttcctccttctgcctatcgcatggtctcgtcaccgtttgtttgctagttattgctcttcgtatctttttatcatctcttgatggcttgctatgtatgaaatgtattttgtcgttctctacatatcgcatgcacaggtagtctcaaaggccgacgaatgtgacatggagaaaaacgaaggtagaaagtcctccgagctgcacgacagcagttggagtcaactagaaggctgactagcgtctatgaattccgtcacagttgattaaaagatctgtcgaggcgaatgcagcattttggtaagaagtacatcctaagaactcagcatcagagaacccatctggcagaacgaatgaaagcaaactgagtaaaccgccaggatgagccagaacagactgaagatggacgcgtgacgcgtctgacgcgttgattgaattcagaaccgacgcgacacgcgtgagacacgtctttttcctgtcatctgtctcattcaactcgagttcaccttcctttctcgactcatcactttatcccacacctttccttgttctcatcttttacgttcgtcaagatctgttcaccagataatattgtctgtggcacatacacattgtctgtctctccataccgtgccctcttccttgaggattgtctcttcttttaggtcgcgccttcttccttttgtcttcgttctttgttcgacgcgtctcgttcaagtctgcgattgtctctgtccgagtcgttctacctgtcaacccgagcggaggaaacaaacccctagttccagtccattcctgtcatcccatctctatcaagatcttcataaaatagacgtacatactcattagcagtctcggtaatcatctcacaatgcttactcgactggaaacgttcaacttcaagtatgtccctctccctttgtttcaaccccatcatcatcgttctcatttccgctgtagtagagaaacaaatgatctcttgagaaaaaaaattgaaacgatatatttgttcttatctgtctaggtcctaccgaggtcaccaaaccatcggtccattccttcctttctcatgtatcattggacccaatggatctggaaaatcaaacttgatggacgcgatctctttcgtgcttggtatcaagagttctcagcttcgaagtaaacaattgaaggatctgatatacagaggcagaaagcttgccagaggaggtagcacgatttccggtgctgatacgatagaagaagaagaggaggaagagagtgaagatgaggacgagggattgagcgaggaagaggggggaaagaaacagaagggcgatagaggcgagggaagtggcaagaaggcttgggttaaggctttctatcaggacgagacagaccgagaatgggtctttcagcgaacgtacgtttcttttcttgttctattccgttcctacctatctgtccgttctcaacctagtcaacgatctgacctatacatatgtacatctctcggatatcacagcgtctcgttatctggctcgagcgagtataaactagacggcacagttatcacgtactctcagtacaaccaggctttagcggaccacaatattctcgtcaaagcaaagaatttcctggtcttccaggtatgtcactcgcacctcaatacaacataccatcgaacaaggcacttcagtctgtctgtttccttgtgagagttctgctgaaacgtattcaaattgtcatcacagggtgatgtagaggctgttgctcgacaatctcctgcggatctctgccgattgatcgagcaaatctccgggtaagtccttcatctttttagatcttctcattctaaccaacacataaaaccttgtttactagcaacacatcttttctgactcttactttgatttctagatcactcgagttggcgcccgcctatgaaaaagccaaattggcactcgacaaagcgaccgcgctatcaaccgaaaactttcataataaaagagaaatcgcaaaagagttcaaggcttacaaggagcataaagtcgaggcaactaaactcaccaaacttcgacaacagaaggtttttgttcttcttttgttctcatcctgtatcccgtcaaggatagactaacacgggctggcttgttgaccgggttggatgtgatcaggaggaggtcatgattcagcacattctctggagactttatcacattcaacaagggattgacgatgcttctggaaacatcgttgccaagaatcaagaattggataggcttcgagcgaaccaggtatgtcttaccttctcttatcagcgtttttcatccccttcgtaaatgacataaactgacctcattttcttgcttttctgaccattccgtttctgaatttatctagagtacgaaagagaaagaaattctagatgctcgaagagaacagacgaggttgaagaatcagattggggatgaggagcgaaacatcaaacgtagagagaaaaacatcgatcaagaggtatgaatcctcttctttcgcgcagtaccgaccacttgtctagatcgacaaactaatctatttgttgatgtactcatcctatagaattctcgcctagtgacactcgaaacacagatcactcatgcggaaagaaaagctcaaaacgcagaatccttgggagtaaaagttgagaaagatgcacaacgtcagacagagagtttggggtctcttaggagggatcttgctcaggttgagagactggcccaggaagctgctggtttgttccgcctctctttaattcgtcttcttcttctcatacttcagttgaaccagtccaacatcacatattcgtttcgatgccatcaataacgaccctacagatgaacagcaaaggcttgccgagcgacaaggtcaggctctgagcgaagccgatttgaatgagtaccgtcagctgttcgtcaactctctcctttgctcttcacgttcctctcttcctctatcattcgaatcaagtgctcacaacatcattatttgaacgaacttttcgttcatgaaggaaagcacaagcaaatgctctccttcctcaagagcaccaacggttgagtgtccttcaaagacaacaaaagacacgaaaggaaggcttggctagtgatgaggagaagctgaacatcttgaagcgaaggagactcaagttagaggcggagattgatgatttgaaggaaaagaaggatacggtgcgttaccatttaccctctctgagtctcactcatgacaacgacagaatgtgataactcatgatttgtcaacgcattttctacaaccaaggctgaagagaaggaagcccagagcgagcaagatcgtaccaacgcacaggaagctctggagagactccaaagcgaacggactaggatcaggcatgtctcgtctcactctctcttttgtatcgacaatattcaaccctcaaaccgcgcgatgttgtgacatttctctaactttctcttcgtgtgaatttacttcactggtttcaacagtcaacttgagacggagacaaatgagaagctcacgaactgttatatgaagatcatgcgatcgagcgctgacaagaaggcttcagagaaagagatcagattgaaggagtctatagcgacgctgaaaaggattttcccaggtgttcacggacgagtcgtcgatctttgcaagccgaccgctacaaagtataacaccgcagtgggcgtcgtacttggtcggaacaacgactctgtggtagttgatcatgagaagactgctatcgaatgcatcaacgtatgtctcgctttcttgattctttgcgcataaatttttcacgtcatctctctgatatatctcttggtcttttagtatctccgaactcaacgtctcggccaagctaccttccttcctttggactctatccaagtcaagccaacaaatgacaagtatcgaaactttactagaggcgctcgtctcgccatcgatgtgatcgacttcaatcctcagtttgaaaaggcgatgcaacatgcttgcggcaattcgttgatctgtgataccctggagaccgctagatacgtttgttacgagaagaatcaggatgtaaaaggtttgtctttctcattgcgcgtattatccttgtttatatttttctctggctcgatgttgatatcggatcctggtcgtcaatcgttctatttgttttctgcgatagccgtctcgctcgatggtacggtgatccacaaatccggttcaataactggtggacacagccagcacgagaagagatcgttcgatgagaatgagctcactggtaagacatatgttccctcagaaaaatcatgttatcatctcctcagtctgaatttgaatccatcctatcttgttcttgcgaatctataacagctcttcatcaacagagagattctcttatggctcatctggctcaactggcaaaggaacgaccgaaagccaagtctgatgaacatcttgtagcggagatcactcggttggaatctgagctcgccatcgtcagggacgacctggtttgtttctgattttttggatttgctctgatttttgttgttatccttacgatctaacagctggagataagaaaagactgctgatctggaaactaacttctcacgctggttacgatcagagtgctatcaaccttcgattgaccggccttcaagatgagctgaggcacgccgagacggagagctcagagttatctacttcactcgacgaggttcatacttttctttttcttcacatgataacctaacgttttgaccaacgatctgacccctcctataattaaaccaaaacaaaaaaccacaacgacaaaaaagaaacgctcttctctatccgtgattgaagttgagatcttaggattacttcagacggtgaacgcatcagaggatgaagtattcgacgagttctgcgctcgaattgaggtcgctgatattcgagagtatgaggaggttcaactccgagtggcccaagctcagtctgaggctagggtcaaatacgaagctcagatcaatcgactacgacgccagtaaggttttcttctctgagggccctttcttccagaacgctagagctaatcaatattctcttggaattatttgatttcagatccgagttcgaagccgagcaactcgagcttacacagacccgactacgaagtttgactcgatccgccgcgaccgagcgcgccagtctcactcaattcgaagctgatagggacgaactcacaagaagcatcgatgagcacaagcaggagatccaagatctcctaacaggattgaaaaccttgcaagatcagttggacgacagaactcagaagtttgatgacatcaaacggaccgcgtccaaagcgacgaagactttggataaagctatcaaagagattggaacttgggtaagttttcaactgttgcttttctatatacatatggtctttaaatcaagctgacgcttttgttctcatttctttgtacagaacgacgtcattgagcgcttaggatctgaaagagcctcaatttaccgtcgggccaagttcgaagatatcgaccttcccttagagagtggttcacttaataatgttccgattgaagctgccgatgaagaagacgttcctgacgcgatgcacgtcgatggtgatgaggacgaaactcaaagaccccttcaagtcaaagattatggtattcaagtcgactttgatggtctcacagatgaagacaaagaggtgagctcttcgacatgcagaaagctcttccctctggatgaacaactgaccgtctttgagggttctctatcgtaaatcagaatggtgcggacgactatggggaagaacttgagaatgaagtcgccagactggacgtagaaattcttcgagtcgcccctaacgccaaagctgctgaaaagtgtgttttgtcttccgcccttgaaatttacatgtcggatcttgcatgctaatgaattctcaccgtttctctcgtaccaggatgggcggagtgcaggccaggcttaatgaaacggaaaaacaggtcgatcgatcccgaaaagagtctagcgctgctcgagagcagttcaacgccattcgaaagcagaggtgggttgtttgtgtatttgtctcgaggtgaattccaactgctaacgaacgtccattttccttcattctgattctgtttatcagaaccaacttgtttcagaaagcgtacactcatatctcggagcgaatcgattcagtatacaaggaccttaccaagggaaacgccgctccaatgggtggagttgcttatcttagtttggaagactctgaggtttgtctgcatttttctatgccctggttgtgtatttctttcctaacgccttttctgtcttgcaaacaattttctctttctgcaggaaccttacctggctggtatcaagtatcacgcgatgcctcctatgaaacgtttccgagatatggaccaactatctggtggagagcaaactgtagccgcgctcgcgcttctgtttgcgattcatagcttccaacctgccccgtttttcgtgttggatgaggtcgatgccgctttggacaacacgaatgtcactcgattggccaggtacttgcgagaacattcatcagagtctttccagtttatcgtcatcagtctcaaagagttcgttcttcgcgacatgcaatctctccgttctctattgtacttggtcctctttcaactcacatttcttttcttcctcttcgttctgatcgcgatacattcggtttccctgcagtgcgttgtacgagaaatcaaactctctagtcggaatttatagggatcaggaaatcaattcgtctcaatcattgacgttggatctccgttcggttcgttttcaatttcatccttttctttttcgctaccatctctgtttgctgccatagagagggcatttagtttgaaaatctagttctgacctatcgaattttctgtgcgcgtttatcagtacgaggagtaaactgtcactattctattccttatctcgtttgttccgtcttgtttctcttctcattttctttcatacatacacacacacacacatatatatatccatatctatctatctctccatttgtctggtcttactttagggtgagagaacgtgatcgcgttacggtgtccggtggatcatatccccgcctgttcttctctcatcaaccctccatttcgtcctccctcttctctttctttctttccttctctctgatgttttccttgtcgagtcctttgttttaatccgttgtaccataaacccgatccgatgatacatggtttcccctcagatcctcaaacagaaaatctcaagaatgggtgtttcttttctttgttcttcctccgtctattgtgtgtttaactccttgcgctctccccccccctccttctctcttcttcctccttatctctgttttcttcttgcggtttgcgtctccgtttttgtgctagttgacaaaaacaagacaagatgtgcgttctttgattatatccgtatttcgaaattcatattttctacccaactttgagcaagtcatatatgtatatgacattgtctcagctatgtaataagagttaatatagaaaaaagagaagatcaagatacttcggtcggaaatctagcataacaagatcgtgacatagacagacaaacggacagacagacaaacaagaaaacaaataaaaaacagaagaagcgtgtatgattggaaaagaagaaaagtaagcctggaactgaacaaggcaggaccgtttaggtggcggtcgaggtcgccacggccacagcatcagcagctcggctggcggcaatagcggccgcaccagggtaaaaccaagtgacgagggcgatgataaagtagacgacgatgaggattagaccttccatgtaattcgtcttatcgtcctggatagcgtagttgacgatcaacacggtgatgaacaaacaggagacctcgaaaagatcaaacttcatcgtcaacggttgaccgatcgcccaggcgagcaggaccaacgttgggatgacaaatagtgcaatctggatggacgagccgacggcaatggagagtgagaggtcaatcttatccttgatggacaccatcaccgcagaaacgtgttcggcagcgttaccgacaaggggcaacaagatcagggagacaaactctctgctgatgttccctgactgggtcattccgtcgatcgacccgactagccactcggcggtgacaccggtgatggcagtgacaaccaagagcatggccaaggcctgataggtcgtcagctttggaacttcaagcacctcttcttcctcttcattagcctcctcctccttgacggtggagatgtcattggaaccagcttctcggtcggcctcaccaccggcgtcggtatgaacggaaaccgaccctcgccgggctcgttcagcctggctacttgctatggacgaaccagaggacgagcttccgagagagggcacccaatgaggcctgggaaacacccggggaccaggaggaaggggacccttaagagcggagggcgcctgggactcgagcttccgtcgttggaaaggagtgaccgtcttgaagagatatgcatgggtatagagctggaaggtgaggtaaccggcatagacaatcaagagcagaaaggcggttcctcggctgatggagagaagctccttgagttctttgccctcgggatcggcaaaagtgtcctctccaagactgaagtggtaggcggtagggatgatgatagcagccatagagattcctaacagactgatattcaattgggcagctcggacgccgtagccttgttcatggaagcgaagaccaccggcaacgaaacaacagccaaggacgagtaaggtgttcgacagaatacttccgagcatcgagctgcggacgatgtcaagctccccctttacaagagccaggatggagatgagctggagaaaaagggtcaataaaagagacggagcaaaggtcaggtgttgatacagatgaaacgaaaggatagagaagtgatcaggcgtaccaattcgacagcatttccgaatgtggcgttcaagagaccacccaacgattggccaactcggagactgatctcctctgtggcaaatccaaggagggaggcgaggggtacgatggcgaggaaagaggtcacaaagacgagcgtatctgattgatgatgactgaacgcaaagtgacaggcccaagagacagggatgaagatcagctgtaggagagataacaaagacatatatcagtcatcgatcgactgcagacaagagacaaagaggatgaggagacgagctcaccataacattgagccaagaggcggtgatgatgttcttgcaggccaccttccaggtgaggccagcgtcactcgcccgtttcttttcaggcacgagcaatagctccctgataggcggtctgctggtctctgccggggtccgggcgcccgagggaagaggcagcccttgttcttccctaccaatcgagttaaatgaattgaacccgggatgatgggtgaggtcgtgtgggtactgattggaaaactgagcaaacccaccgggcttcatccctctcgcgcggacaaaggcagaagaatcgggagcggtgggagcttttctgatggccggatgaggctcatctgaggtggaaaactcttcgtacgtctcggggagcgactgattcgaccggacgagatgcaggccggtgagtccggcctgagacttttcgtcaaagccatagtcgtgtgaatggtcgtccgactgcttgttaggaggattggtgaacaaggagtgggggagcctcggtataggtggctcgagcgagtcttctccgagctctgtgctcggtgcactgggtccatgctgggcggatacattttgggtattagtagaagatgcggtcaaaggtgaagagtgatccatcggttttagggtctttgtttgggagtatgtaagaacgaaaagaagtgctgatacgactgaatgtgtgggagatggatctgaaatgggagttgagggagaattaacgaagtggcgatagcgaacaaagtcaagcacgagctcgatgggacacaggctaaagagggttggaactgagcgaggggcgatgcagggagcgccctgatgaatcggtcaggtccggcgcgcagtgttccttggcgagactgcggagtacactttacactgcacacatcgtgtagtatgttctagagtgtcgctatgtactttactatacgcgtgtgttgtattagcagatcggccttggtcgtgtgaggttatctttcaggttttgtccgggcgggtatgcatggttgtgtgtacgtgctgtagcattggcgaggttgttcagatctgagtgtgagtgaacacgagagttgacgggatgttgtatgttgtatgttatcatcatataggtgtgttcaggcatctctagatgtgtccatagctctgtgtcgggtgcccatatgggttttcgtgtgactgtgtgtgagtagaggtttgttgaaaatggtttgtgtatatctctatgttcatctgttgatagaggtgttcatctattggtactgtggccttgaggcctatgtgtctctggtagttctgtcggtctatcggccaagaagcgcgtgcattttatcgttggatgtggatgtatgtgtctatcactatgtattctgccaagacagttctgatgataacatttgggatataaagttacaggagacgtatatcgaacactcttgatcgactagcactacatcctgttcattcttgatgagctcgctcactcaaacactcgtcatatcactcactgtccgacatatatatcaacctgggcgttgatttcatgataaattcatatgtgtttggcccactgtattgatcgatcagattcttctcctatatacaaactctatctattcctcatagtatgcgttgtcttttgccagcatgggagttgcccttccgttatcaagattgcagcggtcgatcttcggagagacccccggaaggagtgatctcgttgaattagacatgccgggcatcgcgattagtcagcaatgactcctcccgccgatgacgctcatccttcaactcaccgatcgagcgaacaagcatacacccaaatcaactccttgtcctcactcctccatcctctctgtgtcctcagatccctgaaccctttatggcacagcatacactatcaccgcatagcacggcggccacggtgaacaacccggctatcgcagccgctgcagcgaccactacgctgtccactctgctctctggtgctccttcggggatcaccaaacatctgctcggcttccctttcggtcagtatcttcaatttttttccttccctttttgatctctgtagtttctcttgtcttacaaacgttcctcctcctctacttctgcctccttacagacacactcaagacggtgcttcagacaagctcttatcaagcttactctggtcggtttcccgcgatccaagcacttagacgaacggtctcccagcatgggatccccggcctttaccggggtggcagcttgccttgcctcgcctggaccgccacagatggaatgctctacagcgttctctgggaagctcgacggagactctttgcagatggtcactctgcatggacagaaccagcacgaaacggtgaaggtagaaggttaaacctccagggacaccttgtggcgggcagtatagctggtctatcagtgtgagtctcgactgtgtctgcctttctcacttacgatctatgaagatgttggctgtccgatttctttggctgaacgtcgatcgaatctttcttgtttttatcctccgaacagatctctgttcacccatcccgtcgatgtctgcaagggtaagattttctgtgcatacaatttagacttgcacttcttatctgacttatgtcgttgttatcgggccttccctctctttgttttccctagttaaactacagagccaactccgaatgacaccgaattcacccccgttcacattcaactctcatcagacatcgtccttggcgatatcaaaaaataaattgttcaccactaggctgcctgttgtccatccgccgtgccctccgtatcctcttcaatcccaaccggtccggtcgaccggaacagcccccggtttcggctcctcatctcttcgtcttccccttcgcccaatctttccgcccaaatcaccggtagaggttaagttcacatctccatgggactgttggtctcaagtcgtcaaggcgagaggcatcagaggcggactctacaaagggttcggatggacctgtctgatgagaacaggaatgggtggcatgttttgcacgtacgaagccttgctgagagcgactgagccgatcaaagttcccaacccagttaggactttcttctctggttctatagcagccctcatgttctggactgtgttcctccctggtatgtcatttttcataatagaatcttcctcccgttgcttcttcctgcttacaatcttaattctcccttctccatattcaaatacttgaaacagcggatgtaatgaagtccaagatgctcgcagactctcaccttcatccgaagtatcccacgtccgcacacgccatcaaaacggtttggctcgaaggcggaaagaaagtctctgcgttctggagaggcggaggagccgtcggattgagggccgccggagtgaatggtaagtgtgcccccagcgttctttctgacgagaatctattgtccttcacctattgacatcattaacttttcctttttcaaaaacgtcaacccaacaggtgtcgcgttgctcgtttgggagggagtcatgcgaatcaccggtaatgatacgttctcatagggactatatcttcatccgtagattatctgcatatgcttttgccagtgtacttttcttgtttctctcttccattcttgatccctcccttcttttagtgtcagcctctcaatagatctcaactttgttttccctatttcaacgtatactgtatcatcatcgtccaacatatctccgttatctttgaaccatctatctccgactttttccttatgtcaatttctgatattaattcccccctctcctctctctttctgtctcttcattttttcctctgtcttttctcatcggctatagatttatattcgttcatgcgtacgcattcacatccatccttttattcccttgatatttcagtctttgtctctacctctatctctaactcaccttaaactttgctgaatttgcctagcgctttctccattccctttctctcatcaagactgtatctatatcttggtctgtatttgtaatattcaatcaacaccaaaccaaacaattcaagctgtcctgtcctcttctttttagttattcatgcatctctatattgtctctcttcctcttgtccatctctaaatttataacctgaagtaagagaatagctatttgaaaagacgtaacggatgggaggtaaacaactcaaatctcgaattcgacagggatcccgtacactacaggagcagcacccgtcagatacttgagtttacacacatccctcgacgatccgaccgcttccgccaaggttcgtcctctcttcgctctcttctccttgttcttcgaggtttcgatcttgatctcgacagtatttgacttggtggttggcttcgatgattgcctcaaggaccgactcaaagttccgtttccgttcgtcaattcccccccgttgaccgcattatcggtatgtcctttcgaagacaggccggatgcagaagacggaggagaggaagaagattgaacgagggaaaggacgtgctcagagagacggtcgatgtctttgtctgtcacgtcccataaattgcctaccaccgttgggcttttttttgttttttgtttttttggaaagttgcattggaaaagaagccgttgttcgcaaagatcaataaaatgacaaacagcaagaaggaccgaaagaagggggaaaaagactcaggaggactcaccagccagccaacatatagttccagggcgtaccgttcctatcgaactctccgtaatccttcaactgaccagacgaacaaccccagagcatgacgctcgcgcaacgcttaagagacctaatcttatgtgatcggatatattgttcggctccgccatgtccaaagtagctaagggaacatcccaggtgcgtttggtttcaattttcagtatgaataacagagttaaaagggtaaaaggccaaagaagagagaatggtactcacacgacgatatccatcgtggagagcgcattgacgaactccaactctgtaggcggtcttccaacaatacctctccacccaagtttatccatcttttgaatccaagatgagaagtaggattctgtctttcccaagtccccactcggattgagaatataaaatcctcgtttaccattcagcgggaacgagaactggtcaactccttctctttcgggttttgtctgcgatagtgaggagcaaggcgaggaggaaggcaatggttgtcgagtaaatttaggagttttcggcatcgccttgggaagatctaatgttaaagccttcattcccaacataggtgtcccatcttcgtcatcaacatcttcgtcgtcatcctcttctgaacttgatggaccttcgaaccgacgtttccgtaacaaaagtcgatcttggatgaacgccatcgacggaattcgactaacagatcgaccacgaagtgacttgatagattcccatggaagaggttgaacttttcggtccaacacgaggaacgtgtggtgtggtagcccattcggatcagaagacgaaaggctcttcggttgttcggctatctcgagaagttctcgtagtttgagaaccatctagttgtcaaaatgaataaatatgtaaatatttcgttcgatttatccctatcttgggacaaccaaaacaaagaaagagatgctctggaacacacctcatcaacatctaactctgcaacagcgacatctacgccatgaacctgataaagatccaagatgaagtaaaccaagtcttctaattcttcatcccgacttgctgaaggaagagtggcgaagcagagtagcagctcatcatcgatatggattttcgaagccttcttcttgtcagaagcggtatacatgcttccattgaaaattcgctccagtcccgcacggaacgtgtccagagcttctgaggtatgccgtccaggtggattgaaaattgactacagagtgcgcgcacatagacacacaagaatttattctcagtaaattagcgatctccaacgagttaatgttgagaacggtgaacaaaccttgaaggcacctagccagcaaaattctagattccctagaagctcttccattcgtttgtccagatctctcctcattgcccaccaagcggccctgccctctctctcttcaatctccttggcctgtttgccggtttccttgctctggttgacaatatcctccagttcttcaattgcatctgtgaacgaaaagtgttcttcctcgtcttctcgttttccgtgtcggtcaagtggaagtgaaaagacaagaggggaaaggccagtgcggtgtcgagtaacaaataatttcgtcaaatcttcagtcaccgagatattgatgacagaccaatttgtaggcaagggaattgacaagtctagctcatatagaggttcgtcttggtatcgcctagcgacttgagaccaatagatatcatcttcgtcttggaatggttcattcttggttttcaaagcggccgcggaagaagtcgagctttcgacaaacacaggccagacgagatcatctcgaggtgctttagatttggattgtatggcttcaagcaattcatgtcgaagcgtcgtagatgaattatggtctgtagttacaaaattcagacatcaaattttgaaattcagcatgttgacagaaaacatccacaagcttaccaagtagccaagcggtcttgattgttaacaaagatggatcctgtcccaacgaagtcttgtatgctcgtagcaaactcaacgacaaacaagcatccctggtctgttgagcccgggcatgagcaccgttattgaaaaggatttgctcatatgctttctctgccaaggtgatcacccggtcgacagtctttcggattttcgtatgaactgtagacccgctgctggacgtccccatcggcatggatatcactgaaataaatgaaactcagcattcagaacagattgaatcgggatttctgatgagctaatcaaaggagaaattgaaactcacaagactctgtcaacgaacacaacgccaggtcgttcttgaagtcttccaagactttcaagaacgcggttcgggcttgatagctatatcgatcgtactgtacatccaaacagagaggaaaaattgtcaaacacttttagaaacataatagatctaagtgagtcgcaagcttacttgggtctgcaatcgcggaggtagttgttctaactgaacttcaagctggcggacagagacaccttccactgttgtgggtgaagttttcagagtgatgactgatccaggtaaaaaactatttgtcagtcatctataaaatggtttgaccgtctgtacaccagactcactcttttggctaagtaatagctcaagtagtggtgcatggagtggctcatctttcctcgaaaccgaggaacgtcgacttcaagaatatattgacatcaacaacgttcgtgaatacgccagaaaacaagacaccatgcttacctggtctgaattggattctcctcgttgaataaattctcacaggcttgtaagacctcaagtcctgcatcatacgctgcgaggacatcttcaggttgatcttcaagctctcgaaggcgggcctcgatataagcaatctctgcatgatctgctccacatgtctatatcaatcatgatcagatcttagtttcagcctgattgtaccaacagtttattgaggacagatacaagtagaactcactgtcatagatcccaattgtgcttcatcaagcaaaagccgagcttggtttatctgtccgatataaagctgcacagcagcttttctaatcagtgcacgattagctaaacctttggagtcgacggccaaggaataattctgcgcttgctgtagcagaaactcggtatccctggatgtcccgcgttgaatggtggtcgacgagaaagtaaagagacagtcaagcaagccctagaaatatatccaaacatgtgaagaagttagcacctcattgttctttgtgaatattgttaactttgctgaatgctctcacttctgaaatcctccaggataaacttccgatctgcaaacgagacaatggcgcggattgggacgtcttcactcgtgaatctgccgaaggctgagatgctggatcgactggaatagccggcgtcgtaacccgaaacggattctccgtttcagtgctattggctggctccttggtcgtggtgacagcgtcgagcgctttgggtgagactcgtgcgatattatccgcagctctcgtccaaagacggtgcgattgagcaatacttgatatcgcggttgcaaagtcattcttgaaaggaaagaagacaataatgacatagacaggagaaatttagtcagggtcattacttggccttactgaaaccttgctcgcacggatcaaaacataccttggatttttgaatcgcggcggcaaccatgagtgcgacagccgcacgctctagtttcagtgacttatctcgaactctggctgacccagccttgtcctcgattatcatcatcgagtcgttcattgctttttgatatgtcaacagacttcattcacgaaacaacccacacaagtagttcggcttatcagcagaagttagatgcatttagactgtttagggttacaggagcttaccattctccttcatctccttcgtttatcaagaattgagcatatctcaagagaaaatcaactttcaccgctggggacatgattatctccgactcaagtacgttcatggaattgatcgtcgacgtaaaagttgttctcgctcgggagctcttccccagcttggtgtatgctgctccaagatgggcagatgcagcgacaaacactgtgaaattcacgtatcaagagaaattttgatctcagggtactgtcgaataaagaattcatcaacaacacttggaacggaccatcaagcttagaagcatctcccttcgtgatttgccgaataattttcaaatgctggatcttggtaagcgtgtgaccaagcattcctaacaaacttgatgtcatttcttcaagatattttgagtaagatgttaaatatcgtcagtcggaagcacagcaaacagatttgagcccggatgaacatgaggtaggacgtacctaagagagagataagttgatcaacttgatcgaatagcctcacttggacaggtccttctgcacaatcttttgctgaaacaacttgagcgacggccttagatcttgaaacaacacctacgaacagatatgacagaaaacatcggtcaataggtgctcttcaaaatttcgattctgagtatcaaagaatctaacttacgtcttgtcaaagcagctgcataccacgataggagattaatcagagacttcatcgcatggattcgagataaatatcatcatacttaccagggacttttttaggtggtgaagccactttgattttcttcatagcatttgcactggcctgtctggttcgaggctgtctcacagactctaccaatgtctgagtttgagcctgcgcttgtggttgctttggttgcttaatcgcatctgcgatcctttcttcggatgagaacaacgacttgagctgcttagcggcggtagatgcatgagaaaggaccagctggtcgcctgctcgagtacagtaagcgtagatgctagtccaaagatgataagtcgctcgatattggggagcaaacagcgcaagtttcgagtcttctttgaagttctgagtggtttcgcaaataagggggccagtaaagcagctgatgagataaagcatgtcggcttctctgcagtattccaatcactcacatctagttctgccagagcgtctacgtctttggttacagaatcaatgtcgcggccactagagacaaagcatccaacgtgagctacagctgcaagaactcttaaagtacaaatgagtcaatttagatcagcaaatgttttatgtagttgcactgtatgccagatatttggcgttctctcgttgaaagagattgaaagcgagatagagacagacctaagcctcctgatgggatgaatatctgcttcgtagatatttaatagatcatccaacacccttcctacaaccttgcccacctcttccgattctaaagatcccgtcatgattttcagctgccattctcccaaagcaccaagagcatcttcttctatcgatcctctcaaagcactgatgagggaaacttgttcagctggaagttgaaggtcaaatattgcttgaagagtgagacgatgtatcagattggcggaagctgttaattgtggaagcgtgaaaaattcagagatcggactggttttggcgaatgtggacaactccacaaagaacgaggttggaagggttcggacagcagatacaaaagcgctatttgcattctgcgaagttcaaagtcagggtgtatgtacggtcagtcatcgtgttcgaaaaaaagggaaaggaatacgtgaaggaagtaattgcacacagactttaagatccccattcttgtttcgacagcttccaagcaactcccactttcggctcatgccattcctcaatccagcccagacttcttcctctccaagaccgtcgagttttcccaccaaattcaacgcgtcttcccccgattggcaccccatttccgcaagtctaatcgcctgtgagccttctccaattttatacagcccaccggcgcaattataggctgtgccggagatacatctagatagattagcacattccaatagaagtggtttcgaggaagggagcgagtcgagtgtcgtgcgaagatggatggcgcggttcagtagatggagtgttgaggcatacgtggcactttcagctggagaaaagttcacacgtgcaagaacaagaagggtgtcgacagaggatgcaacaaagtcgatcagaatcttctggacagtctccttcactgacttgccatcttcactcctattctctgtcgaaggagccaggcaagcagaaacaagtctctctgcaccttcgacaagcttgagtaccgactcttcggccaaattcttcttatgtttggatcgggttatgaatgttatacattgtctgcggaatctctcggctgttttgtaagctctctcgagaattttgatgtcgtggtttctgcaaaggaccttgaacaaagctgatatggaagatgtcgatgaaaaaggctcgtttgaacatgtcgatgtggttgatggcgttctgggtcgagaatctgtgtgatttcaatgaggaaaagtctatcagtaatggaactcgaattacacccaggggaaaggattggtcgatagaaacgtactgtcgtcatctttgactagtttatcaataaggactgtttccttcatcatttctgccaataccctagtgatcaaaacactatcatcttcactcttaatttcctctacctcgacctgccctcctgagctctcaatgagggacatcctctcgatccccaatgtctcctcggatccatcattacccacacgatgcttcttcaacaggtcagcaatgatggtcaggctattgagatcgcccactttggcagcaatcttaccccaaagatcaaccaacctctcccattctttgcctacaaacccatcttccaacacccacaccccctgcaggtggctaatgagcttacggagctctttcagagacactttcataccttcctgaccttcaacgtccctcaggaagatctgcacacttcgaagtgcctgatcccaaacttttccctgtttaagagaaggtagtaactgaggcataagctcaagcgagattgtgcgcaggcggaaaagcgtttccgaagacgtcaagccatgagggtttggaggcgagaagagcacgttgagaagttgaagtatgtttgagtttgggataggagaggccttgagatgaacgaaaagagcctggtttgtttgaaggaagcacagtatcgcctatatcaaatttaatgcgcaataaaatggtttcaagattgattagtccttgggcttttgaaagaagatgctatacaatggagtgtcatcactcacgtcgagtgctcccgggtgagaagcttgacctgaaatcacgcctgctaaacttgtacatatccaagcggaaagcacgctcttcacggcgtcatccagttttttcgtagactcatcggcttgaggaaatgtaattgaccgcaatgtagccgccgaatcctgtgatttcttaatcatcggtgtgcacggcaagtctgaagaagcaggtatctttttagccgcagctgtggtcgttctagaagaaggagttcttctggcgattgtctgcgtctgagagagtttcggagtggaagtctcaagcttcggcagaggggcgtggggatacaggtcgatgataacggagtggaatgtctcgactattgaaacggacaggcgtgtctgtcataacaaaaaaggtaatcacgaagttcagcgagcacgttcgtttgtacgtcataattacaggcaaagagaagagaattcataccaagcctagcgcattagacctcgtcagtaatgacacaccagccttggcgagcgcgattttggcagtaacacatggaccttgacagactcgctcgagcgagatagctgcgcacatcactagagcctcgacttcatcttttgaagctaggtttgaacggctaggatttacagcaagtgctaccaccggcgtggaaataaccttggttgaagaagcggcatttcttccggccatcaccgattgagctggcttcctggctggtgttttgaacacagatggcgtagctttggaagctgccagacgagaagaagaagaggaaacgggagtcgaggatggagaggaagcagtttctttccatccggactgtaccattcgatgaagagtagcaagggaggcattaaccatccgcatcccgaaccgaactgcctcgtcggtcgggagaggctcaggaaggccacctgccttggtagatgtagatcttgatctggagaaggtcgttcgggctgacacactgggaggtattcttgatctaatagacgcaggagtagtagtggtgatggctgatttagagattgatagtattgaaaacgacgaagatcctaacaagatcactaaattgggcagaatatctgtaggagcaagaggtttgaaagcatcttcaacagatggaaaagccgtaaccgaggccagaatatgatccagggaaaagctcgaagggatcgaagaaccaaccgatggatcggtgatgtttggttcaggtggcattatggtttactccggcttttcggctgagttatccaacttgagagtcaattaggatcaacatcaactggagaaggaaacggaaaagaaagacagtcgcgtcggatgtagagctgtgctggcacgtgattttgtgccactcgtgggcttcattactcttcggacgcgcctgatttcctttcgcgttttgtttttctgaaccaacgggaaagaacacacgcactttcctgaggccagaccttctctccaacgccatactatcctcaagcaaacagtatgatcgagaatccagttcgtatatctggattggtttgccacgatgtttcctgagccactgtgttgcttttgctattcgtaacgctcacttgcacaacacttactctccatttaatctcatttctatagaccactacggcttcgcgtctacctgtcctcaatcgaccgccatcatcgcctgttcgggctcctgctgtatcatccagctcgggcatatccagctctgcttcgaatcatcttgctccgaaacgaaaaaacacatctgactctgctatttctatagccggtcaacccccatcgaaacggccggcccactcaactagaacttcctctgccccttcttccagatcggcttcatcgataacaacgacgacaactaaccgatctgcctatgtcacccggaagcccctctccagtgtaagcactacttccaacaaaccgggagcaacgactcggtcagcagccgctgctgctaccagtacatctgccgtgggaagaagggcacccgccgcatcgagcaactcgggtacgcctcaagtggggaccagcaggtccatcagttcgaccggttcagcagggtctattagatcctcaagctccgtgagcagggggctgaccgcaaatagagttccaagtggaggtcgaagtggaacagtttcgccggattttattgttcgtcttaccaagatatcatcttactcattgtcgtcgggtggatgcaattcgctggtgttgaacgttcagtcttgtttttttttctctcgttatgtcatcaggaaacaaacggacgactggcaacagtagagaagcagatgttcaacatgaatgagctgctcgctttagagaaatcaaaaagtaagtgtcaacaatgtcaggcctgctgattcatcctatactcaagagtatctctgcatcgatttggatcagttatcaatctggaaaccgcgcaatcaacacttcaatctcaacttgcccagaagtctaccgaagcggctactgcccggtctctttctctcttgaacgaagagctcctacgcgacaaagctgcccgagagcgcgatctggcttgtcttgaaagagaacgagaagaaaatagtcgtcttcatgaagaactcagaaagagcagagaagaggtgagaaagatcacaggagaactaaaggatattgaggatgagaagaagagggagttgaatagaatggaaagtcgggtgagggatctagaagaagaccttgagacggaacgaaagggacgaaagagagagaatgttgagttggaacagacgaaggttcgtttaaaatacgtttttctagctcaggaatctgtctgggaagaagacaactttcttaacttatacacctatacttctcaatgcgtagaactcactgtcggatatcactacacgatccttaacggtcaactctcaattgactttcttccaaaccgagtcttccacgctcaagaacgaagtgactcaactccaatcggctttgactgaaagaatagaatttaccacacgtgagatcgaggctgccgcgcagagagtcaaatcggccgaaagaaagatgagggagggcgagacggagagaagaaaattgcacaacatcattcaagaattgaaaggaaacatcagagtattctgtagagttcggccgcctatcggttggttttgcttgcgtcactctgcctcctacccaatgattaaaaaaaactgactgtattactctggattcgtgcgttcttcttctagtggccgatggtcaagtagcatcaatagcttatccagaccgagacggaaagcaaattgtggtcacttcgtctcaggatgcagcaatcggaggaacacgagagcaaatcatccccttcgcattcgataaagtgagctcaaatgaatgcttacatcgttggtttagagatagcgcacagctgatttgtaaaaatatcatcgctcgcataggttttccaacctcactctacacaaagcgatgtgtttgaagaaatttctggattgacacaatcagtacttgatggctataactgctgtatttttgcttatggttagctttttttttgaaacaccttacgcttctttatcatattgtaacttgacagcgctccttctgcaaactgctcataggtcaaactggagccggaaaaagtttcactatggagggtggttcggtaagctcttccttctcttgtgctgtatcaatttggacccttggcgcctcttactgatatctgcataaaattgatttgatcttaaaatgacagaccccggaatcaatgggtatgatacccagggcaatcctccagatattcgaagtgacagagtatctaaaggaacaaggttggaagtatgagcttgaaggccaatttcttgaaattgtacgtctttctttcgtcatcaaatataagagtttcgagaggaaacaagttgctgataccaaggaacttgcaataatacgaacaaaaagtacaacgagacattgaatgatctattggggaatagcaattttgataataacaagctcgagatcaaacatgagaaagtcggaaagacgaccagaacgactgttacagatgctacaacaggtaggttcctccattttacgactgatcttcttttcattcgaatgtaactgattgtgtaatcattctgcttacttgctcttcttgatattttctaacagttcggttgacatcacctaatcaagttcagggtctattggaacgagcgagaagcagaagggcggtagctgcaacgttgatgaacgagcggtcttctcgatctcattccgtgttctcgctccgagtaacgggatccaacgccgtcaccggtgaatcgtgcgaggttcgttagttgaaatgaatcatcctcttcgtgtcttttttctcaagtctctcgcacgctgcaagatgcattaaggctcaatatctctctacctcttttacccttccagggagtattgaacctagttgatctcgctggctcagaacgacttgcgagtagtggagctggcgcagacaaggatcgactgaaggaaacaatcaacatcaacaaaagtctgagtgcgttggctgatgtgatcggtgcgctcgggtcgacttcttctggacaagcttcgcatgtaccgtataggaactcgtaagcgtcaaatcttcttctttcttatctgaacgcaacagattgctgacctttagacaaaaacatatgatcgtcatttcatttgtctatgtgactgataaaactgaagtaaactcacataccttctccaaacttcgctctcaggccaggttagtcaatatcttacaaagacgtgctttgatgaagtattgctttgaaacttaatggtctcacttatgtgattcatcgaaacgatccgtttgaagagcaagactttgatggtcctcaacttatcgcctctggcggtgcatctcaatgagtctttatgttcgcttcgatttgcgaccaaggttcgtctccaacatttttgtatctcagtggatcatcgtctcaacaagatccgttaaaatatatgtactgaaagttatgtgcgcgttcttcgtatttttatcatctttgttctgtttgactttgcaggtcaactcgactcaaatcggatctgctaagaagcaacaaggtgcacgatagctgattccaacagttcagccagacagcgaatgaaaacctacggctttgctgatatgcagccatacgtacatatcaaggctgtgaggcaaaacggtatttcgttcgatgtatttcactatcatctgatctttgaaacaatattcttcattattgttccactttcttcttccactattttccgttcgttttgcttcgtggccgaggatgtctcatttgtgaacttccttagttccactctctttaaaggttttcttatgcctccttcactctcttcttaatcttcctttggtttttcagacttttctttatacatcagttcgcttcgatttgccttttcgctcctcatatctacaacacgctcacttgatcgtgaattcttttcattctttcgctttccgtaggaattcctacgagaatcatttgtgtctcattatgatcataagactgctggtaaaacatataatgaacatgagcctgtacagacatactctttcccaatccttctaggtctaaagtccagccttcctctcttcacccttgtcgtccaaaagaacgttcctctgttccaacccgtgtacccggatccattctgctgatctagaaattccttcttccgtcaactcatgtccacaatcgtactccacgttttctaaccgaccagtcgtgccgacgttgagtttttcaagaaacgcgctagtgtgggggacatggggtacaacttttataagcgtaggttggcaaccaaaaggaagggttcacagtggttagcctacatagacctttactgccagaaagccagacatgaagactcacgtctatcttttcttccagaaagcaccaaaattttctttccgataaaagggttttcctttgcgctttccgcttggaacgagcagttcacaggatcacgctgtttgatcaaagctcggaaggtgtccgggatgatcggcggttcgaacttgagattctgagaggccaatcgggcggtcataagagaggcgaaatctgggcaaccgatgatactgcaagacaggattgaataaaagtcaattatgaatatcgggctcatttcagacttgaagatgacttacggaataccgatctccactcggggctctgttatttatgatagtcgataaacaaatacagaaacgcatttagtcctcggcactgttcagcttttttttcaaaccagatagagtgattatcaaataccatgtcgaaggacagtccaagcagcatgtccacctagactgactccggcaaccatgaattcttcgattgttttgtcaccttccgggaatagaagcgccggtaggaagtcaatcaagaaagacacgtcctgagcagtcccacctgttcacgcaagcagggcatgtgggtgttagttttcacgctcaagaacgagatcttgagacaacagtaagatgtccaaaacgtactgtagacggcatacatatccaaactgtttatcaagaaccgacagacacaacataatccatgagctggagaagaagtcctgataaagtgtgacaccggaagaatgctcacgcgtgcataggatttccctgatcatcccctttcgatttgaagcttctgttgttgagttcgtcaaccattcgatgcccgtggttacgttgatcctgatggattcctcccacaaatagcacaaatacatacagacatgcccggatgatcagctagatgcagaagcaagcacggcgggcagtatgaatctgtgaggatgaccattgacctacaaagttgatgattatgagctcccgatcattggatttcctctttgatttctccagtacaacctcacaaaaatgatgcatgctagacttctcactcaatcttccatgaagagcgaactaaacaagaactaatttgtgaacattgtctaattcttaaggggaaagtggatacatatgagtgctcaccaacacggctattctgtccgatcgcaactgatccaaaccataaacatcgagagaaagaccggccgcatttattgtcttaattgccattgtatcgtgagtggatcgatagattggtatgctatctatagatggaatgagatggagatggacgaagagacgaaatctatccgtacctgattttcattagacagtttgtccgaattttgtgatgaaaacatttcgattcttgtattgcttctgcttccttctccactctttggcccccatccgattgcgtccctgccggtttgctttcctcacaacagttgcttgtttgtgtttactatctacgttggtcattcataatatatcttactcgctcatcggaacagcctagatacccttacggtactcgttagtccgtgtctttgaattcgtcatattgtgtgtgtgtgtgtgtgtttatgttggctgacctcatggttattgtttcgaggcagacagttcgttgcttggcgcatacttctcctacacccaaggcctttcttgggttaccgtatctcttctgtcctgttctaaggcattttctctagatgagtagtcctcgaacgtcagcctctggtcaatcattctcggccgtactccctccactggttcctcttgatgtacccatccaacactcttgcaacgtctggcgttctgatcttcgagctctatttgaaaaggcaaaggacagatttggcgacgtcatttgggatgttggaacatcaactcaggatgaaaaacctcgtggaattgaaagtttggaagagagtgacgagaacgatttgacaacgaggttgttagctagatcgcttaagaccgacacgcaagaggtaatagagacggtgtggggtcataaaggtttgtcgttcttgttctcccttcatatagttactgagtctgttctccttctagcgcaaagccactatcggtgaagagaactctgacgcatagcttggactctgatattatctacttcatactaaaacggggatcatttcacaatagccatcatatacgcccgtgctcctcccgcctttcagtatcgctattttccgcgaactgttgatcgctcgtccacccctggctttcggtcatcatcagcggcttacctcgctttaccaaactcagaaccaaatacaatcaggaccacctcacctcttagggttccgtctcaagcctccgttcattcaactgcctcgacataccggcatactcccactcgaatcagagtaggcgtaacgcctcagatgttcaaagctgagcttgagtggttgtacactggcgaagggatgggcgatgtggcagaatggctcaaccaaaatacatcacttcatgttcagtcaagtgtagatgaccatttagaggcacatcaaggtctctttgggttaggtttggggttggcgctcgagaatggagttgctggtgtagatgatattcagaagattgaaggtcgggaaggcgagaagagagagagtctcagaaacgttcgtcagattctttgcaatctttcttcttgcaaacataaacttatcccgaaagactctatttgtgttgcactcggacatatcttcttctaggatctagtatacatgtggcgctcgaaactgtattcggatgtcaagattgtacttccgtgcgagtcacttcacacttcgtcaggatcttcaaccataaaacgaaactcatttatagacagcaatctatcagacgattcatcatcgtccacatgtgccgttttctccacacacaaatttatcctggcctccaggtcaccttattttgcttcgttgctactcaacacgtcaggcttccggtcaggagactgggaggaaacaaacgagatcgagcttctatcacctcctttcactcctgctagcgttcatttttgtttgggatacatgtatgtcacacaacagtaggtcttcgacaggttacaatcgagccgactgactgacgtcagctatcatctttctctctgccatctgttcaaacattacgatcactctaggtacgctggaacattagctttctcaaaccgaacgtacgacctcacaacagcattcgaaattcaccgttctgccacgtatctcctgatggactctctgcgcgctgaggtagaatccagaatcattcatgagatgtgcgatggccttgacctttccctatcgccgggtccatcaaaactctgcgctcgacgcgttcctcgtgtctggcgatttgctggtgcttcggatgtgggtgctctagatttagaatcaagaacgagagcatgggt

SEQ ID NO: 2850 - DNA, 2059 bp, Xanthophyllomyces dendrorhous
cttcttaccacctcaccctcaacaaaatcagtgaacggtatctcagaaattactcataagcctaggccatcaaactcggtatcaaattccatgtcgccgtcaagcaacatgtcgactcaatcgactctgtctaatggctcttccaaaccgagagtgtcaaacattcgacaatcaccttccacaacttcgttttcaaggttgtcatcaccgacatcaacgaacactctctccaagatggctgtcacaccaaagacctcttcaatttcggctcagaagacccctgttcctggttcgagagaccggttgagctcaaccacgtcaagcatgagcattcgatcgtctgccggatcttctcgaacttccagcttattgacttcctctaaatctgctaccactgctaccactactgctggtaatcgaacgaggacaacgacgtctccatctatgagatcattgacatcatctttgtccacaacgccgactggagctaaagccactaggcagagaatgcatacatcccccgatataccaattaaagctgctccagtttcaacaaattcctatacacgctcatcaggcactacttcttcagtgggcctgatgtctgtcactcctccgctttcttcattgaaaaggactgtttctgctgtgaagttatccactgcatctagagaaacttccaagcaggatgttctcaacaaaaaactgacagtgtcgaccaaaccgattccgcggtcggaatctgcgctgtcgagcaaaagctcgttacttaactcaaaagctgcctcggtggcctctctaaagacgatcaaaccatcggtttcctctcattcgatcaagcggtcagatccggctccccagattcaaccgggacaggaagttcgatcacctttgaagccaaagcagactcaaacttccactccaacgacatcttcgatctcactcgggcctcccgtacacacccagtccccatcagctccttcggtctcttctcttctctctcctgctatcgtcaaacgcactcgatctcatccagcctctgcgttcgatcctcctaagcgtcttccactgcctcggaaacaactgaccctggatgaattcagcattcactctttgaccactggcgaggcgatcgagccttcgcctgggataagtctacatgtaggaatcccatgcattgtttctatccgagcgacaggaatgggttcagcaactagaggaaagaaggttcgctgtaaggcttgggcaagatatataggaagcttggttggacgagagggcgcctgggttggggtagagctagcggaagatattgatgggaaccagcagcaagaggaagagattggctgttggaacggagtaaggtattataaggcagatgaccttgggctaggcgatgaatgggagagctcggaaggagggacaaccaagaagcgaagaagcttaatgacagatagcgcgaaggatgaaatcctgagacggagagggatgttcctagctccggaagacgtggtatgttcttatgtttcacctgatctccctatgaaaaagcaaacgtggttcatgatgatatgccaatatctaagctgaccgggttttgcttctgtgctgtaggtttgggtcaagggagcatgaagtgatgctgttcctccttgatgattctcctctgccttccatttattacgcattttcttcgctttgcttgtgacgacactgatgaactataatatatacccttccatatcccaacctctctttattctatcttgtcacatccataaagacctcacggcgtgtgatgaaaggaagagttgtccagctatcgctcttgacaccatgcccgtaaatagattcgtttccttgtatattgaaatagagaagtcacaaatgttgaaacagggattttcagagtattctgttttctctccaacatccatctaaccatcatcttgccctttgtttcttttttacttttcttctctctcgcctctctttgtcatatatggcagctctacaacactctcagtcgaagtctgagccatctgacgagacaatggaa

SEQ ID NO: 2851 - DNA, 36632 bp, Xanthophyllomyces dendrorhous
cgagacaatggaaagcccaatatacacaatctcaactcccgccccttttgatcgagtcgccccttcccctttccctgtagacgagctgcaatccttccaacaaacttcttcacaacacgtctctctcggctcaatctcagcggagcctcaatcaattacaactgctcatccattaagggaacagctatctggttctcctcctggatatgcgtttctctcatcccaagacgatctatcgctgtcagataaatcgattccaccgggttacgacgatcagtctccatcgacattttgtacggccaggccaaaacacacaccatcaggctctccttctagacagctttcttataattccgaccaagaaatcagctcggaaaagaaggaactgaaaccagatccaaaaacttgggcgattgatcgtttttcggctgtggattcttgtgtggatgatcagaaaactgacgccgaatcttcaaagttgatagaaatggacttggctaagatgataggcaggggtaggatgcatgatcaatcttccgagtttttagcgggcaaggggaaggagagatccatagccaacgaagagttggatggagaggtcaagaacagagagttgttggatatctgggagaagattgagagggctcatggaactaggctagacgatcaatcctttgctctactggatagtcagctcacggaagcaaggcctgaaccatcgattcggcgaattcatggctcaccaagtttggagaaagatccatccgaaatgatcactgccgaccagtttattcaagaaagtaagttcgtttccttagatcagaagctcgcctcatctggccgatgttcctgacgttctgattttcccattcatcatgtgctctctcattctatcatctagagaattcatctcgctctaccagtccagctacgaagagctcgttcctgcccatgggatccagcgcagagcgaccgcttctattgaaaacaaactcggtcagttcgaaaatagccggtttgttcggtagaaaggagagcttgccgagttgagcgatcagcctgaaaggtcgattgtttgaattcgttgagagttgtatcagatttgttccttttccttctgtttgtctttctttcctcgatcattagtagcgcaaaccctgttctcgagtctttagttctcttcatctgttcgtcgttcttcaaatccggtctctgactgcaatcatgattttgcggctcagaagccatatcctatttatagcatttttttcgtctgtaacagtaaggcgacttgcctagataccatcaacaacaacaccataccatcatctcgtagtttatcaagctaatcaagctagcgctcagaatcttgtctcttatcattatattatcattcatatctttcttctgtacttttcgccattcgttttctcgctccaactggcctgcatgtcttattgcctctggtctattcaaactctactttccatggtctctcctctccattcttttcttgtttcactcaacaattgtatcctttcggtttgctgacatctcttatcttttcctctctggcatgccaaatagaaccataacgaagacagtctttcagaacctcgctatagccttgttgccgaacatcaggcaagcatcaatatcatacaactcactctccttgtcgaatatctcgagtcattcccatctacgtcgtcacccacctacgaactcaagatcccatcgagcaacccttctctaggttatatcagagatctttcctcgcaacgccggttatggacctttcaacttcctgctccttctcgtcaatctgatgatagcttagtcttcactcgctctcactcatcatcaaaccctcaaacatacaccctccgacttccatctgcgacttcaacgcgctccgaatcccatcaacatgtgcaacctttatctattcactcgcttcgaacttctcgttccaaatcactcaactgctctgaatgcagcgccaagatcatcgatttctcagatactgccagggaagattttcacgagctaccctcagaacactgggaagaactgatcgaaagctggctgtgttgttcatctatggagttggatctcggcagcggcaaagctggagagcagaaggagggcaaagatgcagagaaaatattctggcccaaagcaaaggagattctgggaggagagggctacttattggtcgaacaagagatggtcagagaaggggtatgggccgtgagacacggaggctcggtatgtcattctgcccgcattttatttcctgttctttctttctctttcttctttctttaaactttcatcaattggaccataaagaaagccgcccccatgtgtactcattcacatcccctaccggagttttctctcgcgcgcttgacctacattcttgtctctccgtcttttgcctgttatcattctcacatgtttttgttctcgatttttcatctctcacacgtctatcaattcgaattgaggtttcatcgcgaaaaacaatgtctgtgaaaaatcccatagtagggtttatcacatatgtttttttttccttcaaatgagacctttggctcgaatgctgaggcatgaagaagatggggattagctcaaaaacaattactgagggtcgatacgggtagaggcagacagactaggatgaggaatagtgtctccgaaagagactgggaggaaggtttcgtccctctgctatcttcgggtaggggagggcgaaaatttccttttgggtggttgatacatcgtctgtcctacaatcatccaaactcgagagtatgaattgaagagatgtgctcgtcatgtctttttgcttgttctctcaagctgggtttccttcttcaaacctttgggctttttaagctttgtgggcttcttcgcaagggctacacgagggaaaacaacacttttttttattttcttctctttctttcttctttcctttttcccccaaataactgttaactctagcaaacgtcatattcacttttgccttaaccaacccgtttggatccttgctattccatctgatcgaaattagactgagatatggcaaccgatcgtctgctctatctgctctttccctctcggtcgacgattcattcactctccccaaagcagcactttcaaatttactaaatacagtcttgctctcactgagtccgaacaaggtcttggcagtatccacgccggtcgtggtaacggccagaaacacggctggttgcagcaattcgtggcggcggagatgagagcattggcggacgcccatcgatgctatcatttcgttcttctggatgaagaacaacaacaggaaggagcgttcacccagaatgaaggcatccctcgaatattagtatgtttcagattctgctctgtcttctacgatatcttccagctacaatattgatatttgattgatgtcttttttatcctttcctttgcctcctcaaagatctggatgctgaatgcgaaccttgacttgacagttcggtcgtttggacctatccaaggaacacatcccgaggaccaacctgagagtgttcctcacaaagcgatcaaagttctctatctaccgcttactccaacttcgttcgttatctctctgctcggctttctcacttcctgtcacgatatgtcacttcttaacaagcactgcttggaacttttgcagagcaataccctcgacattcccgttgtcaaaagccgaatacttgccgtacccaaagattatttgtgataggctcgaagcagcgttggatcgctcatggaacttttatccaagggaggctagggagatgatgggtcttcggatgagctggctcgagagaacttgaacaggacgtgatctcaagatgcatgtgttcaatcgagagagaatgacgaaagagatcgaggacctttttatatgtttacatcaaatcagatgaagaaaataagcgaaagagacagatcgaacatgagagaaaacaaaaggatagatcaaaaggggtatgggataggggataaaccagctagcagacagatcttgctcagcttgccctcctttttagttttgctttaacgacaggaagagtcaaagcgaggttgtataaaatctacatcccttcgaggaagaggggagttataagagaaaaaaggtgaagtctagataaacactagatgaacgagattggattgatcggctctgctcttgcttcagaaaagtcaaagcttgcttctaagtccgggtcaagctccgctatgagagcactggatgggcaattggtcaaacgaaaagaggagccagataagaagaggaaggtgaacggatagatgatcagtcctttgtcgaacacaaaacggtttcagctcgacgagtgtcgttcagcccaaatgtatctgctccagctcagatgataaagaccggagaccaggagagtacagcagtttcattaagacaacaaagattttaacacgcacatattgtctcctctaatcatgtacagacctagcggaacgagctcgactggttcatcagtcgagaatagtcgttccacagagttggacaagatgatgttcgtatgcgggtcgtgtcctttgaagttgccctgatagagagggttccgcaaaaatcaacaaaagaaaacacgccacagaccagagaaacaccgtgttagctttgaggagacaaacaagacgatacggaagaggcgaatggaaagggtagaggagaaagaggacacggactgatattaatcttccatcatagaggagaacaaggacgtcgactgaagaaagttgagagagaagaaatagtgtgagctaaccaccgaggatccctctaatccatcaactgcactttataaaaagctagctagcttgctcaaataaagggactgacgattgatgtatctttctagactgcccatgatgacgggcgttggatgacggctgctgatggtgatggttaaagactaatcgaaatttccttcaacgacaacttttcctttgttttcaccttctcgctatcgtacgtttgccgtttctatattgatgttagctgcgatggatggaggaccacaatggagatgcctgcttgggctgatcctgatctgtcacgatcacttattgatcgcctcaagtttcaggcctcttgtttcattgtattctctcttctcccggctagctctgtgtagctaggtagccagtcagccttcgatggcatttacatctcccctggatatactcatacctggaccactttcgccaacgctatccaccctgtttctcggcatatctccgctctttatttgtggactcttggctcatctctcactccgagaaagtacttggatcataagattggcaattgcgcctgtgcagagttggatgttatggagattgatgggaggtgtcgcgttctctagtacgagtgttgattctcctttgatggtcctctcgaacgttgaatctgcaggcctgatccatcatatggtctgctaatgaaaatcatcagatccattgctgttctggatgaacaacgtctttggatttgtctgtgtgcttgcaagtcctgatacttcagatgttcacccttcccgtcactctgactgaccgcgcatcccggtcaatacagctatcgttatctctgcctcgatgtcttctgcctcagccataccggttcaaagctccttataccggcccttcctttctctcagggtatcagttgatcaccaacgttcttggtgattacttttatcctattcctccatactttgttccttctagtccattccctccatcttcccatacctctctgtcagccaggataccccagattgttcaatatgtgctctgttatgtaccgccggtcgctgccttagcaatcgccatcatctgtataccaagcacagtcgaggacgacttttccgtcttacgttctggatggttagggcttggattcacgttctcggcgggcatgatggtgtggtgtctcctaacagctgactggtgcctcaacaactggttgcaacaggcagccgggaacggaattactcagcccagaggaaatatattgaacagtccatggagatcgacaagtgtgcatgagttttggagtggtcgctggcacccacttttgacacctacaatcatgttttacaaagcgttgttgcttccgcctcgagatcatccgtcgggattgaagagacagttgacaaaacttgggactccgtttttgggattccttactactgctttagttcatgagaatctcatctatcctgtacggttttgtttttttttcttcgcaaacccgtccctttggaaaccgtcttgcatgtgactctgcatgcctgactctctgtgcttattcaattctggacttagatggccaacacaaatcgccccagtctaggctatctatctctcttcttcctgctccaaccacttgcccttctcctcgaacgcgccttccttcatctatctggaggaaggaaagtcagcggaccagcaggttgggtatggacattcatctggttagggttcacaggaagatatctggcagaggggtatgtgaggatggggttgctacgtcaactcaagtctgtcacggaatatcttggagccagtttgggtttatgattgatatcttatagtcactactcagaggctcgaatatagattgtttatagagatagaacgaaatgatctttgtctttactcaagctcccttggctgaatctccccaggaagcgacgacgtgctccgagggtaaatcatccggatacaactaatcgagcgaaagggaaaaaagaggttagcgagtgagttcaccaaaaaagacaatatatctgagaagagtatgtacctttccagggttccttttagatcgtgttcatccgatgaatacaacgtcaaatacggcgtcaatcacttgtcttgcagtataggcaacgtagaaagggaacagtgcagaaaagaatgagaagagggagataacgcacatgattccaagcgggtcgatcgcattcttgacggtcttcatcagattgaccgtacctaagccaagctcggatatcaggtattccttctttcctactccgactctatattttgcgcattgttcggcgcatgcaagacgaagttgataaatgaagaagtcagagactgtactagatagaaggctgttcgacgacgatagtgaaatgaagtgaaagatctaacccgtgctcgccagtacatgttccttcgagagcgatagcacgctcaaccattcgatgaacagctccatccgcaatctcatactctttctggttctcgaacaactgattgagataaaacatcgtaagaatgaaagatttagtatgtggcatgctgatcatgaatctgagatgatcctcacaattccggtgtggaagtttccatcaccaacatgtctgttgatgtgaacaaaaagtgaatcagcactggactacaaaactctcctaaaatcctgatgcacgcatgatgagagatcaagaagaacaacaaattgcttacccaagtacagcagctgtcaatccgcattctttcaagtcctcctgagtagtcttgataagctccgggagcttgctgacagggatacctatatcattccaactcgcagaactagtcagtttttctgaatcatgtttatatcgttcttcgcgcgatcaagctagaaagagtatgaacgtacagacgtcggtggaccaggatttagcgcctgggttaagcgccatgatcgaccaatgggcaacctatcaccaagcaatataaataaacacagataaccccgaccaaattcctctacatatcagcttgcatgaagatggaaggaagggtaaacaaagacaaaggatgaaggaatttacctttcgaccccgccaaatttcatcgctctcttctttcgaagcagccgctcgaaggtcttgtcctccatatttaggaacaatctcgctaaccatggagtacgcttcatccatcatctaaaaccacatgcgctcattgattaataccgttgcgcacatgtactctcaagacatgatgaggaggacaagggagtaagaatgaaggaaaacaacagaccttttcactaccctgaaacttgaagaagatggaatccctcatgggaaacttctcgtttgtgagggaggcttgattgatggctttcatcatgatggtatcacataattctacacattggatcggtacaccagcgttcaagatcttttgttgtcgtttttttagggtactatgttagtattacgcataagaatcaaacacccgagaagcagaaaagagaaggaagaaacagacctcatatacagcctccgaggcctgcttgacgtcagggaaagagcaaatcgcaactcgagtgggaagaagaggtgctagcctcaaagtagctgtcaaattatacgattcaatacaaatcaggtaagtttacagagaaaccgtgaatatgaaacaaccacgatagcagagatatatgagcaacacataccttccctttgatagataggatgtggttaagaaacatcacagtgtcaatataatagaggttagtcgataggaggtgggggactggacctacgtgacaatacccagcgtaccctctgcgccaataaaaatctttgtgacatcgaagccagcagacgattttctatccatcggtttgttcacaacatttgaaacaagtgctaaaagagatgagttcaaaaaaaggcattttcactgaagagaacatagactgaagcttgaacaaagataccttgctcgactccgggttttgatgacttctccactaggaagcacaacggtagcgttgaggaaccactcggctttagcagtcccatatctaacggcattagttcccgagcaacctgtggcactgttagtttaaaataaagcataagacagactgttatcactcatgatctttggtcgatcgataccggcgactatacagaacggacatcattcctccgatagtggctcctggtccaggatcaagctgtgcagtgtaacaaaacaaccgaaaaaggttcacatcaatattacggttccagatcaattgtttttatgtataccagaaacaacaagattcatacggggaagaaaagcttgatgccttgttcggccaggtgctcgttgatgacctgccattctacaccactctggactttgatatccgagttaggcacggacaactcaagaatcttgtccattctactcaaatcaacagagattcctccgtaaggctgatgggcaattcaataagacatgatcagtacaaagttgatcaacgctctcgattgacactcgcaattaggaggacacggacgtacagctgtgatatgtccttcgagactggttccgcctgaccatggaacaactggaactttatatttggacgcgattttcatcactcggacgacgtcttcattactctcaactgtaggttgagtgatatatgaatcgatgaatcagctaaattcggattctcatgcgcgcagtttgcctgtcgagggcaatcaatatgagaaacaagagggtcgcgcaccatatacgatcaccgctgggactcggggagcatgataagtattaggtgagaatccatggcccagcagatcatggggctctgttgacacctgatccgtaccgcttccctccttctcaaacacctgtttgatctcttccactgctgcttcaaagtctttggcgcttccaaatcttggatctatgaagggaggttcgggtatcgggttgaacacatctaaaagtagttgaggaggtccgttggtgattaggtatgtacctactgatgcggcgagtgctgttatcgcaatggtgaatagtctgtttcctctgatctgtgaagatccttggttcgtgctctgaaaacgtttagaaacagacgcggtcgtccgagggctgatcggtgttcgcccgagcgaacaacgtggacctcccaggagagctcttgcactttgttgtatcctaacagcagacatgatgagtgattatgtgagtacctgtgtgctttcagcgcaacgagaacactgatgtagttgaagaagagatggaaaaaagaatggttccccatactttttatccatacctggcacgccatcaagacgaccaggcggtccgccggcggcggatcgggccgacgctgccgaaccgctaaataccatcaaatcacgtgatatgacctgatcgtgtggcgttttgaatcacttgatgcacgttgcacaaaagaatgcacagcagacctgtaaccttaatgaaacgtgcgtcattcgtcgtaaccacagcctttctgggtagtattctcccattctcagttgtcactataacctcttcatcctcactttcactttcgttctttatcgttctttcacctctctgcttgttttacaaattcaaaggttatatcgagaatgtctgcgagtagaccatctagttcgggaccttcacttggagcgaaaactaccgtaccaggtcgtcggcctcaggctcaacaactccctggtctaccctcttcacttcggtctgcttctgcctcatcctcttcagccgcatcgacacctgcatcaacctcgttccctcaaatatctgctctccctgctcacctactccctcggactcgtcaagatctctctcgtaatccagtgtctcctcaaccagcgttctcatcttcgcttggtgcttccaaccaaatgagtcaacctactgggtctggttcaaacggtctctctagacctatgggcaagggaacaccctctggaaagggactcgagaaactctcacttccggctcgaacatccaagactggaaaaaaattggtgttccttcctgaggaagttcagaatcagcctttgccggtcattcctggtggggccaggccattggcacatccaccaaaagcggacggtcaggtggaggaaggcgagagggatcagggcagggttgacgacaggagtgaagcagagcgaatgaacaaggaagaacgagagcggaatgggtttggtagacttactgcatatgccactgcagagtcgtataggttaaggtcagagcctttcctctttttcgtggtcttctcctgaacgttgaatttacatcttagacatatacgaggttgaagtattgattccttctctaattcttctcttcgaacgatagaaatcttgctgtatttttaaagagagaacacggagccgaagtgaggatatttgatgaagcaatatatgccgtgtatgtttgcatcttttgcttgcttagcagtgtccatcttccgcgcacctaggctgagttgtttggtgcttttcttgttcacccttagatacaccttacccctccttcctggatacggaccaaatgtccgtctccgaagttccgtagccgtcaagtcacctggttcgtacagtttttcaatgaattctcattcctttggctatcatcagttgactctgaatattcttcaatccttctatttatcactctcccaggtggaggctcgattttgaacgctatggacaaagctgaagaaagcggttaccagggctcttactttcctattgagccgaccgacccggaagcgaacccgaatccgaatccaaattctgcttccacgactgacctcacctcgcttgaccaacctgaggacactgttcttcctgatccttcctcgccctcagggatccttgcccttccatcaccctcggactcatttcctcccgtttcgacttcaccgcctctgaaccgtcattctgcctcgagaggaggattcgattcgtcaatccttactcgttccaaacaagaacccaagttggctgaagcaatctttttcgattatggtgttagcgtgttcattgggttttctgaagcaagggagaaggatatcttgagtgactgtgaaagtggtggaagctggatcggagcatttggtgctgaaggggagagcgcagaggagaggggttgggagatggaggaatgtcattttgtggtgggttcttcccccgtaaatctctccagttgagacaaagaccaatcgattaacagcttgcgatcaaactccgttacatttgttcttacagtacgatccgacggctgcttaccctcggattttcaacggtacgttcttcacttaagatatttaccgttctttttcccttcactcacgcatatgcaactctgtcactccgaagatcttttcacgttcaaatctccatcacatctgcttaaactctcactctcccatgcgctggcccaatcaactaaattgtcctattacgagtccgccgtgcaaaacacgacagcagaaacggcgtacatcccgaaagagcttgctctcacaggtggtttgacgatcgataggagggacgcggtcaagttgacaggcaaactgttcaagttgaaggtcgaggtgaacctggtcagcaacgtgctaggtatgccctttttatcttgatacgaatgttcaaattcaagctaatgacctgttggaccgctttccatgcatccttctctttcttgcaccttgtctatcagatactcccgagtaagttaatttcttctcatgatgctgacacatacatcaattgaacgaaacaaaactttctttctcatattcagactgttttggagtgaagcctcgcttcagccgctgtacgaggcagttagggagtaccttgagattgatggtcgagttcaggttctgaatgaacgcctaggcgtcgctggtgatctcgtcagtctccggtcttatgtttatcacatcttcagtctgtgtgacagttgaattccattgagaaacactagttttttctgatacgcctttcttcttttctctcacggcgcgagcagttggacatgatccatgagcatgtggataatgctgggatgcactatgttacttgggttatcatttggttcgttctagtattctgtattcgtccaggtatgtgggacgaaagctgattctaacttttcattcggccgaatctcttccctctgcaggttgattgtcgtcgcttgtctggttgagtttggagaggtaagtttcttcttatcttctcttccacaccactaggagcaaatcctacataaattaaatctgtttgtcttgaacatgatcgaaactgtcttctttactaggtcctcgcgagattagtcgtgaaggcaaccgagcctgagttgcttatgtccggtcggacaggcataaagctgatcggacagaagatgatatcatctacgttcaagtgaagatggttggaagggaaggattggcgtgtctcgttctatgtttgaatacgactagaggtatcttatacattacatattcccctttttctctttctcatgatgagaagttacattcatttcatcatgaaacacataccctatcctcaatttaagttctcacaagcagcatgcctctgtctcagacgatcatcaattccagcttatccaaataatatatcagatcttaaaacccacttaacacctgacttaacgacagacccttcgtgcaacaaacaatcctttccatgccgatgaagcatggccgaacccgagactgggttgacgctaagagtcttcttcccatttgaattcctgtttccagggagatgaaagatagtttcacccccaatgagaggcgttgtaggagcggaaagatagatgagcaacgtccattcagtatggagcattggattcaattgggatcgttgggattcgtcgtagtgagaggcctagtgcgttcgagacagcgaccgaggttgagcgtgaggtgttatgtaccggtagaagaaagcacacgcaaagtagaagaagatttaggatcagaatgaatactataattgacagacagaggtagactaggagtatacgtacaaagtattgaccttccgtgtatgagtaaacccttatgttttccaacaaacctctagctttcatggaactacccgaattcttcaagtttgaaggtcgagctggccaatcatgcacgatatctattagacccgtagattcatacaaatgagctgcaaattcgggagatattgtcgaaaacctatctgaattcgcaggttttcggaatgggattcatttcgtcaggtctgctccaaagggaagtagatagtcaaattgaagaaaagatcaaccgtttgtcctttgagcttcaccacgtttggcaggaggagaatgtgtcatttggagtgtctcaaagaaacggatgaaatctttgacttcttgttggttgaatacatccttaaaagatggttcgagcatatggacttcaagcatcagctcatttgaaagcttgtcagatcgataataacgaagagagaacaaacatgaacgagaacaacttgatcttctagtagcgtttctacctttagatttttccgaaatttctttgagatcttaggaaacactattatgggcgaggaaggttctgttttcttgtctggtgtctgtttagatgtcgttgctgatcctgatgtatgtgaagaagttttgcgtgccatggctgacggtcgagtgaagtaagtggttgagcatccagttgacgatgacgttcattcattaaccgctgctgatccacctaacatcaatcaacaaccaaccaaccttccatcattcacacaggtcatcttctcttaagacatcgaacgagataaatgaaattgttcaatgaaacctaaccttcttctttcttcgctgtcgttttcgtacgttatatcatgtctacgttgtttcttcatgtgcgtcatgcgattctcatcccactttttcgcccggcagtccccaaacgtctgggccacttagtcgggccgggtatcttagaatacatgaccttcagggtattcagccagaagatttagctaaggtatggactgtgtctcttccgtacgcacaatatacggaactagactaacacgtcaagtggcgatgacacgatcggatatacatctgctaggataccgggctgactctcacagaggctcaagacgtgatccgtaccgctctaggggatcctacacccaatggtttgtcttttgtactcaggatcctatatgaaccgatctttttcctgattccaccttcatgattgattctgatcaccgtcaccgtccctgattggaaccgctctctgacctgccacagatatgctccaccaggtctcctctcaaacggcttctcagctcttggacctctcatccagacttccatcctattcgttccaatccaaatctatcgattccttgtttccagatggtatcaaaccagggatgatcatcgaggtgtctgggccacctggcataggaaagacatgcgcgcttgtggggatcgtgatggatatgcgaataaagaacctgaaggaggttgaaaaacacggggaaaaggcaagaaggagagaggttttagtagttggttcgtatcccttgtctatgtttggccttctatcccggtaatttagaatagctcaacctcattttgaactgactttttgtgagatagacacagaagcctcgatctcgcccgatcggttggcccaggcagctgagaatcaggccacgagagagtcaggccaaagtaagcgacgagtactgttctctgagaacgacccaaaactgattgcgatgcaatcgtttgggttgacgtagagttatcatcggaggatatacttgaagggatccgtcttttgcgactgcatactttgtcacagtttgtatctttcttcaagacgctggacacatatctagatgagcatcctgaagttagttcctgttgtttcaccttgacttccccgtcctactttcaactgagaacaattcacgctttctatccatgatcacagattaaatcaatcgtaatcgatacactgtcttaccatctgaggtcaccctcaataccccctgatgcaggctcgagatcgaggatcgtagcgctcatcaaacaagagctacagcgatgctcaaccagatatgagtgcacagtatgttttctctcgattttttgaaaccctcttttttgtctccatctctgatctcatcggatcgtcatgctgttagtttgtggtaagcgttcagatggcgacaaagttctcggacgtgggagagggaaatctcgatgaaccactatcaagagacgaacgagcatttctgatgcctcaactaggtaaagcaacatagacctctctttctgaggtttcacggcctttaaactcccggtatatagttcaactgatcctctaatttcctgcttgtccttcggattgttggatttattctcggggaaaaggtgtttcatggatcccgatgaaaacgaaaagattgatgtttttctatggaggaggtatggtaggtcatcgacaagtcaaacggtaagttctgtgtctttctttgtttctcttttctccttttaactttgagcgtcacggaatttacttgtttcttctcttgaactgatttgccggtcctctcggggctctctacactgttgaatagattcgcgaccatcattcccgtcctccctcccaattcttctcattcggcttatccaagctctcagaaccaaaacggcaatgcaaacggcaccaacagtgggatgtggggcaacgcacagccctctcagaaagaaataggtctgggatcaggaatcgatagggttgagtatcggatctctgtacgtagttttatttttttactctcctgctttctgatccactaagtagccgcgctttaaattcacgatggtttcttcttgcgcatgttttggttcgggatggggtcggtcattggtgtcagtctgaaggaatgttggccgatatatgatcgtcagatgaccatcgtatatgaaggaagagaaaaaagtacaacagaatatcggatgaaatactcgtctctacaaagcaaacagataaaaaaggggaagtagaagaaaagatgcgagagtgaatagcaaaaagggagatcaagtcaattgattccagatagcccatttttggacatgagtgccctctccagacttggcttgcagatcgtcttctgtgaagggtgtcgacgggggaattgaagaactaatgcggattcgatagagaaagtcaatcgggtcagtccaagaaagtttttgggttctgtttgatggatgaaaagagacaagaagaaagaagttcggatgttgaggggaaaggagcttacttccatagattttgactacctggtttgatctttgggttcacgatgaacgggtgtgcctctattgattgttgtccgaaatccaattcggacgattcgcatatcagtacccttcgaaccgaccagaaaaccacgaccgtctatgacaggtgaaagaacgaagaccaagagagaggtacacaccggtgttcaggacataatcgtctaacgaaagccaatcaggttcagattgcaagagatagtgatacttcagcgtttctgccagcgcaaagctgttacaaagaacgattatcggccgtcgggtttcgatcatcagtatcaaatagacgcaaatggttgatcaaatgaggaaaggcaaggtagacgaacgattccatgttgtccagtcgactatgggatcattttgaattcccgacaatatcgaactcattgatgtcagcctgctacaatcattgtttaccagactcatcgattgaaaggggtggatggaaacgaaccttatgacaggatttctaacgtctctgacgcttgaaaatccagcatccgctaaagagttgttcatcctttttgtttgcaaattgcgtttattgatatgtacctgtcagcccttgaccagcgatagaatagaaagaagagagtaaagataacaggattaccaagagctgaacattctccatcctttatcctaatgaatcccataagaatggaaccagcgattagttggatttgttttttgatatgtgaagatccgtgaagagtaccagattaagggagaaatcagaaaggacttacttgccaaaccttatctccggctgagaggaaatgtcgattcaagaaaacaacattgacattcaaattatgcatccaagaaggttctccttttgcggacggcacagagaaaatcgaggcttactcagtctgtacatataaaataccgatctaccaagttcaaagttcccacatcagtcaactacacctcgatcaaactttgaaaattcaaggcagcaagtagagaagaactaaaacctcactcgatggtctctggcctattgatgtactttgactcgaccttcttaaatccgaccggtcttcccgctggcttcttccacagtatctcacccttggaatcgacgatgtctatccatcgcccaggagatttcggactgtagaactcaactttctcagcttgaagtccagaagatgtcattgctcccttttgcaccgaacattgcgcaccaggttagaatatgaaggtcagttcaaggaagataattgaggaaaggaagataaggaggagggaaacgaaagtaactgacagtataataacaagtctgggtgaaacgtttagccatttccaaatcttttggcctattcaaaagctttgatcctaggcccatcatcgctctaccggaaggaaagcacggcaaggtaagaagctctgcctctcaatgagtatgaatgagataccaagcccgaaagaagcacaaacccggcgaaacaagtcaggtgttccaacgtcgtcctgaacgtccctctttcgatttctcctattgtctgtgttgccagatgagaaaaggttttttttttcgttaaaaagccatggtttcccctcagctgatgagagaatagagttggagcactaaaatcagacgtactagtaacgatttaccagggatggtcgttatctctctgaccagaactttggaagctttgtccatcgcttgttcatactgaactccatttgtcatgaacaaaggagagagtcaataaaatcgtccgagaccacggtggaatgatgccaattgaaggggaaaaaatcaccatcctagcgtattgaggtagagatccgcccaagagttgatgcatcttgatcagatactcatagtacgaatccgctatatgaaataaaaccccatcaagacatctttcagtacccgcgctcagagacgaaagagatcgagaacgaaccttgaccgccgaatgagaacattccatccaagtcatctgctgactcgggatcaaatatcgtcggtaataacggtggccagagtgatcgtctggtgaggacggtatcaatgtaatctgttactttttgaacctattgggttttgccaacagaaagatcaaggaaattaagctcaaatagagcgtgacacaaggaaagacgaggagagcgacggacgtgatggaagtaggtgatatttccggtcaactgccaaagcctcgtgagttcgagcgtcattgaccccgctgtaaaaaattgataggatcgcacacttgcacgcaaagtcaggtcgattccaatgaaatctcttccgacataaaaagaagaaggcctgaccttcagctaaacatgcctctgatggcgagccgaacgctcttggtcttccaggttggatagcagcgtaaggaatccctgtgggtgtatcgaacgcggggatcctgcacagatggcaatcgcattgcgatgagtgagtctttttaaagtctccatccaagtgtacagaggagacagaaaataagaggagttaaacaaacaagatctgcgcaagctcttccgcgcgctccaacatcaattgatcgctcgtctacaaaagtaaacgttgttgcttagttcgattcactagtgaaactctgatgcaagagaaccagaagctgctaagacccaccaaatcataagccgagatcaaacctccgaggtacctgatcgtcgtttcaaacacggccaaccaagggtagggtgattttcccggttcataatccttgtttcgtccaaatcggatcccttttctccagtgtttaccagagatgattccaaagtcgagttgacgaacatgctctctggcgagagaatactcctcgggaaggcccaatagaagcagagtgtcgagggagctggaaaggggtttgattggaaattaaatgatgcgcatgcatacataaaagatgctcgaaagaagacagacagagaggaacctactcgatgatggtcgctccccaaccagcgaacggatcagatgtcgactttgtcaacggtttgacctgtgagtgtgagagagacgcgtcgaaagaaaaacttgtcagatctgttcgtgtttcacgacaaacgcttgcgctcgtgctcgcgttcataactcacctcgtcatgtccccacgcgttttgcttatacccctcccaagcccagatgaacgcgtttcttaccaactcctttctctccagtctcttttttttctcagctggtgtctctaaagggaatgatgactgatctagttggactttgttcaatccggccagtggtctaggaggaatctttggagggacccaatctctgccgaacctgtcaagctttgcttgtttggcttcgtcgagctcgggccgggtgaagattggccttgtggctgggtagagatctttttccatactgtttggaaacactggacttccaccaggagcacccgaagctggcctggttgacaacaaagcgtgccattcggtatcatccgtcaacagggacgacggggatggatcgtctgggggaagaagggtcgaccagtctggagaagtctctccaggtttgacgactgccgtacccggtctcataccgacgcctccaaataactttcctggctttcttgtctcggatggaggtggcagatcttcaggatctgaaaattgaatgtctgattgtacggaatttgactggtcgaggtaagtaagcccaaggaggaggaaggtagacagagtagccacagtaaggaagaacgtggcgagggatgagcgaaggaatatcctaagaacatgacgatagatcgtcttggtcggcgatccggtgctcatcctttgtctgtctttgcaatattccgagagaaggaaggtgatggataggatgggataggtgtgaaggaggagcaaggaatgtatggacccagcatcttgacgccgaccggcctggttacatcatcatccgtcgtttgttcgtaacaaggcggttgaccagccagccagccagccagcatgcattcgcaatgtatacatgcgctctctcgatcaaacacatctggagggataaacaatatgtatcggttccgtatatgtatgcgcggagtgataatataggaacgcactcagacgtatgggtagtcatgtcattttgagagataagagagtcgagatcaaaagataggatgatctgccattcagattacatcaagcgggtgtggactacagcatatggcagtccacaccatctgcagaagcaaactatctgggatgaattcttagtccggcgaggaagtcagagatacatgtcgcacatataggtgtagagaagatattcacaatgtcactaacaccatatacacgatggaaatacatatggccaaacatgtgaacgccttgctctacattcgcgttgacgaacgagcagccgtcactcctctagctccactctgtcttcctcctgttctctcctcaacgtacaacatctctcttttcgccctgctgtccatgtccatgcacaatgtcgatagcgacagaacaggcgataagaacgactacagacgcactagagaggaacgtagggaagcgggccaacacgtgacttttacccttgttgagacataaaaccctcgatcctgcatcgaaccctcaagccgaccaatgagcgtgcggccgatggaaagccgagcgatctttttctcgttttccatccagactcactttgggctttgaccttgaacatcgacaacactcatctctcgctcgtcaatcctttctgcctcatctcagtcatatactatgcagtccatgtttacctcgatcgcccgaccttccacctcgagggcccttcttgctgcttcttctagaagagctttccacaccggtcagtccttgggttctcgtgcttgtttctcgttcctcttcgctctccttttcttctctttgcttttttacatctgtcttttagttgtgtagtgatgaacgactgctaacgtggttttttaccttgtctatatgttccgcctgctgtcgatctcgatgttactctataatccaattgcttccatgcacatgtacacacacaacatcaggcaagccctctgctgctgccgtcgtcgctgacaagaccgctcagattcacgagtatgttcccggaggtcgtgagtatttgtttcctaggatttctcgcttcttgttgaatccctagaaaacggctatcgcgaaatcgatcaagatcgagtagatgattctgtccataaaggttgctcgtaggagaaggagcgagattggttttgctagctggccattggtccattcatctttccttccactttgcgtccggctcatcctgatctgagcaggcgatcaacagagcttcaatttcgatcggtcgactcaaactgatttacttatactccctctgtgtctttcctcagccgtccttcgaggaggtgtgaacgatgcccacaagtttcctgaaccccacaagtcccacggttcttaccactggcagttcgagcgacttctttctgtcgctttgatccctatcacgtaagtttctcccttctttcatcttctcctcccttctcgttccgttctgctcttcacatctcctctaaccattcaaagctatctggactcttctccttgtttgcttctcttctactcgcctgttcgatagtatctccaccttcgccgttgctccctctgcccacccgattcttgacggtgtccttggcgcgtccctcatcattcactcccacatcggatttgattcctgcttggttgactaccttcacgagcgaaagttcccgagagtcggaccggccgctagttgggctttgagagctgccaccgttggtgcactcttcggcgtctacgagttcaacacgaacgacgttggattgaccgagctcatccgaaagacttggaacgcttaaacatctggcctttcatttctcctcctcgtttccctctacttttccttatcgttggcttctcatcatccatcttggcgctcttcggccatacttctttccatatccgtttttcttttttctttttcctccctatcccgattcttgttgacggctttcttgatagttacgttaatatgtgtttttaccacctcatgagtattctttccctcctatcattcacactcccttcttgtccttgatcttgaaacagacagacaacaaagtcataagaacagagtaaggctttgagaggagtttaaaaaagaagtcggccgggacggaatgagacaagacgagcaaggcccgatatgagctgcctttttacgctttctcttgtttctggtctctaggttgtatcgtggtgtctgttctactgtgtctctcgcgttcaaaagaagcgcaccaagaaagacgtatctgaggtttatttataatgaagatacgatggcgggataaaagggagaaaggtatgatggcaggcgggtggaagtttatgattaaaagaaggaaaaaagaacaagcaagaaaacacaaggttgaaaagtgtataagaaggatagcaaagcggagatggaatggaagaggagggttgaaaattatgatggtggaaagatcaaagagcaaaggaaagaaaagaagagggaaaagaagaaaaaaaagtcctatctgaccatcaagacggcctttttgttaaagttttccctccttgctttcctttttggtttttttacttgttctacttctgtccctgtccctgcccacctcgctttccacctctcaaaccctgaccgctgatgaacccacctctgccacccctctgagcgtttccaccctgtccgccttgtcccttctcgccctgcccaccctgcttacctccgctctgctgtcctccaccgagggatccaccccgagagttgttgttgtggttgctgttgctgtttcccggtcgctcgttcttctccttcctgacctcgacagtgacctttccctgtccgttgatgctcacaccaccctcaccaccctgggagacaggcaaggaagcgagaatagctcgtctggcggaaacgacagactcgaaatccaagaaagcgcaagccttggccttgacgatctcgagctccctgatctttccaaactgggactcgagtgccgtcttgagcacgtcggcatccaggtcggctcccccacccgcagcccagttggcgagcttgacgaagcactgaggcgttcggatgttgttcaccgcctcggcatggctggacaacggcttgccgccctgggcgggagtagagacagcctgcttgggagccggagaagtggcagcggcagcaggagcaggggcagaggtggctggcgcagcagacggaggaggagccttaccccaagcgcccttcgcaccggacgcggcattctgagcggccaaagcggcccatgacttgggggcagcaggcttgacaggagcagcgggggcagcagcaggagcagtagagacagaaggcgaggcaggagcaggagcaggagcaggcgcagcggccttctcctcagcaggagcagcaggtgtgggagcagtcttcttcttctcgacctcctcaacagcagcaggagcaggtgcaggtgcagactcctccgtcacggccttctccggctcggcttccttggtctcctcggaagcgaccgacttgttagcctcaacggtctgcttggcctcatcgacagccggggcggcaggctcttctttcttctcttctacaactggctcttccttcttatcctcctcaacgggcgcactgacctcgggctcgggagtggcctccttggcctcgacctgtggaacagcctcttcggaagaaacagcttcaggctcatcctgctgctgctgctcatcagcaaccggctcaggagcatcttcctccagagcgtagtcctcatcgtaagactcctccttgaggaatcggaagatgtcgttcaagacaaagtaaccgttgggctgctcggccaagaagaacgtctgagcaaacttcttccacggtccggcgtcgttcgacatctctccgatgacttgaataagaattcctccgccgtaagagggctatatgcgttgatgaaaccattcagttaatgagtatcgcgcaagggtgctgaactcttctcttcgtttttggatggcataaaactcacttgagaatcgacagaatgaatgaaaaccttgcagttgttgaagccaatcgacatgatcttttcgttgatctcctataaaggtgtaatggagaagatgtattatgagcggagtgctgcgatgcaagaaagaaccgtctcttccggtcccgatttcttttcttgcaatgaagagtatcaagaaatcgcttacctgctgaccaacgcagggggtcccgtcctcaccctcggtgccgtggatgaaggtcgagtttttggtatagaagcaatggagacgttgaggatgtttgtttacaaagttactgttttgaatataataaaaaaaaccaagttgaagaaagatcagatgctgagtgtgagaggagaagaggtcgtctgaacgccccgagacagtgacatgaagagatggacgtgtgtgtgtgtgtgtgtgtgtgtgtgtgtgtgtgtgtgtggcaaacgagtgaagagactggcaaataggagttctgccacaatgtcgtcatttgagaactgagatgttggcaagtcctttgccgatgctctcatcagcataactcggttgatgctcgtcaacaaagacaattctcatccaaggctgctccgagctcggtctgaatatgacgatttttgcacgcgacatgaacaaagagggctccaaagacttactagtattggggaacaaactgccaaccgacttctgcactggtgatagctgacggcttggtagaggtagaagcggtggtaccggtaggaggagtcgaggacgagccgttaggcgccgttgtggaagatgaagcagacatggtgatgctacagtgcagctttgggtaaggaaaagaagagatcgaatgttaggagatgctcgatcggtttggtagagaacaggaagcagaagatgaacaggatagacagagaggtcacggcatttggacaaggagtactgagcaagcacaagatgccgaacgacggctttccaaggtagcaaagacacagaggtgaagaagcagaagagtaaagacagaaaaaaaggcaaggaaggaaaaagaaaagaagaagaaagggaaaaaaaagaggaaaaggaaaaggaaaaggaaaaggacagggcaagaacactaagcagacacgaaactcacttttttgaaatgacagtcaagggatcagagataagaaagctgtaagatagatgaacaaaaaccgatcctttagatgggctggagcaagagaacggaagatgtgagagaaggtgagagaagcgaaagatgttgttgttgatgggcactggcgagagagccgacgggggaaggaaaaaaataaccctaacttttttatcgttcaccttctcttcgtatcgaccgacgagcatctcttcgaggcatcgagtgttggtagagttataggatagatacacacagatgaaggcggtagtaactaaggtaatcaatgcgtcagtcactggttcgtcttgtcaattttcgtggtggagggaaagtgttgtcgtcggttggtcaagagaagagatcttttacctgtatcttactcgttactcgtcatccgggaaggacagtcgataacaaggtcatctctcagatcaacaacggtcttcttgctctcattggaatctccaaaggtatgtctgtagagccaacgtctaaattcaggccagtcaacttatgtgttttcgatggtctccttctagatgacaccccggccgatctcaagttactcgtcgcaaagcttttatctcttcggatctttgagtcacccgacggtcagatgtggaaagcttcagtgaaagatgtcggaggagaaattctatgtggtatctctctttctgcttccttgtcgttctgtgcgcgcgtacacatgctcaagtgatatgttgctcttctgatgaaaccggtacgatctaaatcgcacagtgtcccagttcacgcttcaagctcgcactcaaagaggaacaaaacctgatttccatatggcaatggtatgtgcgccgtttcccttcatattcctcaacctcaacattcgacattcccctgaactacgtcctcttcttggaacagaacccggcggacgcacaaaagatgtatgatgattgtctggcggctttaggcaagaactatgatcccagcaagatcaaaggtagctccttttcatacctcttcatcactcactctttcttgatccttgccttttgctcttcttcttctcgttcatctctgtaagagctgactgacctgaatactggcttacgtgtcttttcatagacggcgcattcggggcaatgatgcaagtggcttctataaacgatggtccgatcaccatcatccttgataccaaagctacccaggtctcttcctctgcttcatccagtcagaccagaacgccaaacgaagcaggaacgccgaacggacagatacaagacagcccaggtttatagggagctacgttcgacttgatacaaaaagggtggtcttagtggagcatggatcaggagaagcctgttcagaatgtaaactgatgctcaattgtaataaaccagtatgcaaaaagtggaagttttcctaagatgactatatgggaacagactagaatagatattgtattgagcattgtatattatcaacaatgagctgatggttatgagtatagagattgaagcatatcaaacatttaaaattcaaagacaggaactaagggtgacatctatagataacagcgtgataaacatattcttgttatgaacaaataaacatatagaaaacgaatcgaacaaagggcgaagatgccaaggaatgaagtgaatgaataaaaccgatagaattcaaaagagattcaaagatattgatggaagataaagttggattgtaaggatggtattggtaggtacttttggaaatgggcaagagcaaaggcaaagcgagatttgtatcactcgcaagattgcatggcatctgtcaccaagacacagatgaaagaatccgattagccattcagttcgagatcgtcaagaagcgacttagaaagatgaactaccttcgacaagtgcccaaagctctgtaaatcgaacaggtttgacaagatagcctatccagcagtgtatgaaagatgaattccatcagttgggttcataaaagaagtagagagaagaacagacagaccattcatcccaacttcgacactgttttttctcgattctgatgaagaagaccctgtgagcgcacatattgtcactggccggatacctgccatcaagttcgctgccatcctttctttttcgatctttcgaatccctgagaattttcaatccgtaaaccacgataagaacgatgatgggattgcgataaaaaaaaagaaagggaaaaagcgaagagaagtggaaaagagaacaaaaaccaacctctagcagagtccaagccgtccatcacaggcatttgtaggtccattgcgacgaatgcgaagaaaccaggtggatgggattcgaacatgttgacaccgtgctgtccatcgtatgcttctttgtatagtatttttttcttatgaaagtatgcccggaaaatactgcggtttattctgaattcaaaaatgtgcaaccaaagaactagatcagaaaatcacatgagtggattaccataaagtgaatttttggggcgcacggattatcttcgacgatgaggacatgtgacttgaaagcagattgatatgaaagctggtcaactttctctttcgagcgccgcacgcgggatgtagggacgggaagtgcttgtgccaattcagccatcgggatattaggagtttcttctgaggaaatcggtacagagagtagtgtttgcagtgtcgatcgtaatttcctttgcaacaggaaagaatgtcagcgaacagttcgcacatctgtagaccaagccggcgtggcagctgatccattgtaaatccagcacacgtacccaggaccaagcgcatcgacaagaactaaatgatgagacattggctgcgaatcattctgtctcaggttttcgaacaatcttacaaccctatagcctgtggcatacgattttgcgcaagcctcgtcgaccaaattgccgagtataatgatatccttcttcagagcgacgggcgaagtgtcgatattgaacttccatctcgacaagtagatagaaagaagttggacgctcgagtttgatagtcccatgatgtggacagtatgaccttggcctaaatattcagatggaggtgggtttgcgataggcagtcgcttgatgcgaggaacgacgtcaagtggtaaagtcactctgaaagtcgagcctttattctcgacagactgtacatcaatctgaccatccatggaacgaatgattctgcgaaaaaaggtagtgcatacatcagtattgatgccgacaaggcagcaagaccgtccaaagaacgacagcactcactcgtttgtgattgacaagcctagaacgagtgaagatgacgcatgaaggtccaaataacctcagtttaaaaaaaaagatttcctgagcaaacgtggacagcacccacctagccctgctcctggatgagaagctatctcttgtgaaaactaagatatagaagtagacgggatcttttattaattgttacatcgtaagccaaagctcaatatgatagactcacaggtgaaaacaaaccatcctttagacagagagaagcaaagaacagtgataagagaatgttgtatgagtctcagaatcctcctatcttagatcatgatttgaaaactactgactttgagaaaagcgcgactcataccggttcctgtatctatcacagaaatcgatatagatcgacggctcgagtcaagaacctctgaccggacaaggactctgattgttcctcttttcgtgtattttagcgcattcgtcatctgtacatcgaagtatgcaagaagcagaggacatcagtctatcgatgagaagagaatcaaagcgcgtcgagaaagagaagaggcccctacaagattatagatcactcttctcaatccagtctcatcaacggcaatctgcatatcctccatattctcctcaaaatctaataggacctccactccacccttctcatctcttctctgagctttctcgatcgatgtgttggcatcatacaagcttcctacagaattggcagccctaaactgttgaagcacggcaaatcgatagcttaaacatacgctagatacagattcctcgacgaaatccgatatgtttaagctattcgagttggaagatagaaaattagtcaaatctagtagaaagaagtgactgagaataagagcaaaagaagaacacacaagaaaaagaaagaaaactgcttacattgtcatttcgggtggtgtagagttccgacgtttctcgccccatatattggccgccgatttctgcgacaaattggaatagcgcgaaattacgtggtcatctttaccacaaagtccaacggactggaagctcgaatgacgatagttatataaactcacggtataatccagcacgtggttgaccgtatctagaagattgctaccgcatatcttgacggtgttcacatatgctagctgctctttgctgagaggggtatcagataagaggtctgcattcgctaagataccatgaaggctggttgttgtaagcagggacaatcagtgaccacgatcagaatttataaggagagagagaacaagtgccgagagcagtgtgacttacggggttctcaactaattgttgagaggtaaagggcaccgaatgattagcactcactcagaaaccaaaaagcataaagagaggaacctacttcatggctcatatttgaaatgaacgcaaactttgcatgatccgccccctgtatgctctttaaaatcgaactcgacatcagcaccccctctatagtcctgacaaactgacattcaatatccagaaattctctaaggtcccctccacaagaccaaacacatatcaacgctagcgctgatcgatttatgctcagcactggtatgatcagtacgttctgaacatccggtgaaaaagaatatcctatccatgttgggatctcatcagcattgaatagtttgcctgatgggtgattgtctaagaatcttcccagtcgctcagagtcgtattttctgagggtagtggcggcgacagaggacagagaaacagagggtttcaaggttgaggagaatgtagacgtgggcccgattggacttttcggaggggacagatcggcagaaagcgtggatttggattcagatatgatcggtagaggtcgcaaagcttcaaggggatcgaggatttggtagttgatcgaagatgtatcgagaactcgtactgcagagaaacgagatatgtcaaggatggaacaacctccgttgaggtcgagtgtattgtgtatacgttccgcagcaagagcgtaaacctgttttaatgtatcatggtttgttaagaggttcagtacggggaagtatagatgttgagcttgagactttcgttaagagtctgtatcgaataaacgagatgaccttttgtagattggtttcctcggctaaatccccaatagcagaaacctctcggttaaagtggtcgatgactatgtttacaaagagatcagaactgttgccaattggctgtccgtagaagaatgaagtaaatggacttgccggctgataaatgggaagctcgcgctagatgcgactgtgtcatcgatctctcgatttcctatggtatcaaaacattacagaagaacgttaggctttcgggatctggcggccaagcaaaggtgagaaaaagaaattgctcacgttcatcacgagctttccaaagtcaactaagagctctttgtccgctgctgtgaattgctcgtgaggcttatcgtcgattaggcataatgttcccaacgcaaagccgtcctggttgcgaagctgagtaccagcatagaagcgcatctgaacgaagtcgtgacatgtttcaaaaggtcgataagtagtgagaattgagagctagaaacagaacttcattctcttaccggggcttctgtggatgtataaggctacaatggtaatacatggacgagttggatcgttctttgatcaaataacgttgccgagagggatttggtatagatgaagttgagataaataaaacactgacgtgaagattagtgaaccgaaagtctttgaatgcgtctaggatgatatgtggtgctccgagaaggatgctatgaccgcacatcgagctctctctgacgtaaactggtgctcgatatcccactaatatgatgccggacgtaaagtgggggtcaggaaatgtcttactcaattcgctctcaagtcttgattctattcaagacatagtcacctgaggccaacacaggtagtttgtctttgtcaaccaacaaagcgaccacagctggaacgtcgaaaaccttttgtgccatccggacgatcttgttcaaagtgggatttctatccattcctcccgggttgtccggatctgaggtcaagatcccatatcggtagagggctttgattcgttcaacctcgtctgggggtagaggaggagggagccagcctagttttcggaagtgtgcttcttcagaagagtagtccgaacttggcgattcggtgtctgaatagactaatgttgatgatatcgactctggagatcctgagattggtagttcgggaacttcacctccagcttcaaaaacatcattgtaaaaaaccacaaggtgaagtcaaatagtgaacaagctgatttcacggtctctttctaaagatccttgttatacaaaaagagttttgcaaagatgaataggccacttacgtgcatgtagccctctggcgtatccatggagccattccctaagaccaagcttattttgatggggtgtttccgggaacgattgaactgagcaggagagcgagctggtgtaagcgtcggacatgatgtagattgtgaattgcacgttatctgtttctgtatgtacaatctcagacctcagctgagtaggcagacgaccgggcaacctactcagtggagcatgtacaagatgaagagagaaaaatctgttctctgtatataaaaattattgcagatgtctggatatatcgattcatccggatgcaaatgatgcgtgggtaagcaattcaggctcaaattgtccaagaccgaaatactcctatcgctaccgcctttgtcatctaagtgttcccatgggcatgtatcaagaaactctacttgttcgtctcttacgtcgcaaactgcactacacccctatattgtccaaaaggtagagatgcggctggaagcattatcagtgcgacgcgcgctttatagcctagctttctgattctagcaatacagcatgttcggcgacaaatgaagtatagttcagattgtgttgaagattcaggttgtgtgtgtgtgacttgaatgataacagagtagacaatgatacttagtgccatcagtcacttctttcgtaatcacgacaagttatcaacatgtctgacgttgtctttagcagtcaagatctctcagtattcgatctaaaagcgcgtgcaagttctcgatgtctttggaggcttggtgccggtgttgcgaatgatcatggcaagaaggaacacatctcgtcattatttgtctcggacaatatgataaactcctctgagatgttgggtttctaagccttcaatgatgtatcctccgatgtagatcatcaattctctaccagtcttcaaagaattcactcgggcgtagatggctaggcaaccgcccggatggatcacgttctgtattgatgatcacgtgttaactcattgccacacttgtatcatcctcccactcttcagctctgtcctatctcacttcattcgacccccaacagccatcatttaggactgatcatcatgttttctggaccaactaggggaggaactagaggaggagctggtatgttcaagtctctccttcgctattgccaaactgatctggatatctgactatctttcttacatcacagccgaattcaaatggagtgatgtcaaagaagacaaggatcgaggtgggccctcctgatgcacattggacgtggattcatctatacgcgcgtcttccaactaaaatatatcatcattcttcatcgggctggttgaatcgatatttacagaacattaccttggtcactcggtcatggctgctgctggttcgtctctcttcctttgtatctagttcgcgcacttcagaccgaccgattacgatcatggcctccttgatctgtcctactgattgtgaataggtcgatggcagaaggtaatatatacattcattctctcagagttccacaacagtctatactaaagttcatatccatgtccctctcagaatcaagacattcactggtactcgcgggatcaggaaaccgcggatgaagccgctcgaaaaaaggcggaagagattagaaaagtcaaagaagctgaagaggatgcattagcactggctttgtcagttggtttcttgccgtatgtcctcagttttccaatcactgactgcttattttgtctggtcaacccacagaggattcgctccggcagttagaaagacagacgaagagaaagaggtggagcgaattttgaaggagcagcagaagcaagagaaagctctgcgtaaagcgtctgtgtctcttccacttattttcatcctcaccgaggaagttctgatcggtctttattcatctaatggcgtacagtgagcgccacgccgaaaaactcatcaaagccgaaatcaaagcaaatatcaaggccgaacgaaaagctctcaaagcgacctcccatgtgtccgaagatggtcgatcgcccagagcggtcgataaggaaaagcaaagagacagaggagaggacgaaggtcgggatcgccatgctcctcgtcgaagagacgatgaccgttcatcaaggcatagggacgaagaaagggtcggaggacgggagtatgcttcgagaacaaatcgtgaaccaaaaaatgagagagatacgtatggagatcgcgagggtgagagagaaagagatgggcgccgtggacacgactcgggaacggagagaacagaacgttacaggacaagaagtcgaagtccgaaaagaagaagtgaagaacacagaagggatagaagtcccgttaatcgagatgagcgtataatcgacaggtaagtccgcttatctcccgaatcactcattgtgagcatcacccaaacgggaagttgtgaaaactctgaaccgatttattccaacattttgctgctgttttcctatgggtttactcaacgtcaggccatacaatccgcgggatagagatgatgagagggaaagagagagacattggtcatatcaccgaggatcaagtagacactagggttgacttcaggcacttttgagccctttcgaacttataccttctcgatgatgataatttctctcactcgttttattacacacacctgctcacagcatgatactcatcaatgagatacactaactctgtccgacactgatagagctacagcttgtgatgttgatcgaatggttctcttctcaggcacgagaagttcctgtctaaccgttgttgttgttgttgttgttgttgttattgtctgtttgtttccctgcgttgggtcactagccttctgcttggctcgtgcctatgtctgttcctgagttctaagtctccgattgaccgccactcttctcttggttcttccttccacagactgatctcctctccattgcgcttcctccttcgattcctaacattctccaatccatacgatatcacatctctctttctctttactgaatccgcaatcatccagatctttctctgcgccttttcatcacactgttctttttttctctttcagctcttcggctttaaatatgcccttcacattcaattcacttcgacttccaaaacaagcccggccgtgcgacgggcctcttgatcatcccaatgcttcaaccacctctttggcagataaaagattatcatcggggtttcccctagcacggactaagagcttcctatcgaggctgggaatttcatccagtgagacccgcggagaccttcagtcaaaaagagaaacagtagtaagttctagagttttgattaaacaggccccgaaaccgtcttaatagcgtgttcgtgatttgcggtatagaat

SEQ ID NO: 2852 - DNA, 5898 bp, Xanthophyllomyces dendrorhous
cgtgatttgcggtatagaatctttccacttcggaaagactcatgcatcgatctagatcagcgacaccttcctttcgacgttcccgatcgtccatcgtttcatctcctcctcctttaaacacactttcgtcaatcataatggagtctgaccttgagactcgagcgatcaacagtatgcaactcgcccggtctttatggagacacgagaggattcagacttggcggatgtcctgtacgtacttcttgggttcgtgtgtccgggacgagtacgaggtggttatcttgactctaatctatgtgataatttgatgctaaacaaataaaaatcgaaacagccgcgagcctttctgccccttattcagataaagacgggctcacacctttcaaaggtctagacccctcccctgccgaagcaccatctttgcctcctactaaagacgaagagcaagagcaggggaagtccgtcacattagcagcattgtatgaagcagcagacgctttactcaaatgtctggcggttgatatagaaataccctctggtaacacgccctccctccggttaaccgaaaacaccaaagtcgaggtccgtctggagatatgtgtgagcgaaccaattgtttgcgcagaggattcttctcggccagcaccacctgccgtctttctcacgacctgcgaacatcctgaatcaaatatctccgctggagtaaacgtccgacccctggctactactcgaaaaggatcccttcaacgtcgaacaggcggaggatcatccaaaaatcgatacttgactcaacttgtcgctcgctcatcgagtcgaattcgaaccaaaagaacgtccattcaagatcgaggaggaagctatgactgtttattaactccgccagaatcaactttgatcgtctacaatccctcaattaccaactcttgcactagcatcaacttcaaagccgatgacttctggataaaaacggtgaacaacgaggatcacacaaaccgaataatgaattccagttcagtatcaatcattcatgacgccttcagggagacacttcctgggtttcatgagcctcttaccacttccgtttcggtcttccctcaacattttaactctctgagaaacacgatgaaatcgtcccaaacgactgcagattttttgactgtagacgcttgctattttgatggccgtgatgtgccggcgagggtcaatttagacgaaggaggaaatttgatgaagatcaaatcctattcttcagatcagataaacgagaagcgcgaacggagatcgaggagacgcaggtccttgggattcaacggcgactcatggccaaatgttagagatggcttgggattgatggatgatgtggtgtaagctttcaccctcaagggggattgagcgtggagttccttgttgattgaggttggctttccttcttgtctaaatgtactcatcacgttctcctccgacttgtacgttccagccatggttcttgtataccagcattcttttcttgcctctgtacacttgatccaaccatttacatgatgaaacacatgtcttttgtcaaaagacaacacacacacagagctcaatagttgattatacatgataatcctacaagctagccctgtgaagggtatttaaattaacaaatgacacaatcttctttcagacttaacgagtacatggcgttatcctggtttgtttatttgtttgtttttttccgccgtaggaacagttagcatgtgttcttgcattgaagaggtgatgaaacaaagacgagatcaacgtactactgtcttctcgatttgtttccaatctgctcgacgttggataaactcgtatacactagttaaatatgtagaaagtcggtcgaacttggaatcagcattctcatacaagatgcacaacccatacagatgaaatctaagtttcactaactcctctggtctaaatgaccctccatatcgtgtcacgtctcgaacaatctgcgctagatctttggcgtcttccacgatgaaaacatgaccaaccatcttgagatttgagaaatcttcagtcaccctacaaagaccgtccgttgagagacaatcagttaaccggtatcacttgtgacatagaaaaagcacaacaaagacagagagagagaaaggaaatgacggaccactgttgtttgagggaggcaacgaaggcatgatatgcgttgaggtcggcgatgatctggaagcctccattgagagagatgatctgccttttgagatgtttttgtaggatgctgcaaaacggaaggagacaatgataaactttgagtggatctgacgagatggttcctctccagagatagacttacttttgcaaacgaattccaacctcctggaagaagacctccaatacatccttcgacgtgctccccttcaatagatcacaatgcatttgaagactcgcgatggcctccttacagcctttcgtcggtcccaaatccatttcggctccttcttcagggtagtattccctaggaccagtccggctgataatgatatgctcggcctggttcatcaagacttcaattccagcgtttagtccagaagcaacagcttcgtcgaggacgttttcgaatcgcttcttttcacgaacaactccgttcaaaaagtcggttcgatcaatatgaggggcctgtcgtttcctaaaataatcagcaaattccaaactaaagtgataaagaaaactagagaagaacgaaccatttctttgtcgaaatatacctggaccatgctttgcacggtatctccgatatgaactaactcaaagaactgcaacaacggcgctacacttttgttatcttcatggtcacccggtttgtatgtcttcatctgttctgtcgcaatcttaaacccaggtgcgatatgcctgtcactcaatgcttgaagaagtagaatgaagacctcctcgatcgtttccttgacacgagagcccattctgccaggatattcctggaaagtctccactcgtttcagggcttctcgatctgtttgaataagctcaagcgcaacatcgagcgaaatgagaagttgaagggactcgaacgtttgagatggaggtaggggcgtagtcgaacgcgatgttggacgagaagatgtagatgactcggtggggaagttgttgacagaaagtgatgagttgtttgtcgagatgctcgacggaacagacagtcctgataacacagcaaagatggtaggtaagtctgttttcaagaacatgagaagcaaaaagaggagagacacccacgattagtcgattttgcgttcttttctgattggtgttcatcctcgtcctcgcctagttcgaaaacaaccccgtgatcaaccttttctgatcctttcagaggtgttaccgcacccgaccccgtccatttatttggatttaacattgaaagcccgctcatggctgctgaggagccagcaacaacgtatgatgccgtctttggaatgatggtcaccggaaggaggagaacgtctcggaaaccggcaaggacgtttcgtttgacttgagcaggattttcagacgtgaggaacgttgtcggtgccggggagtctttggaggtcaggaccattgaagaatcaatttttagctggaggaacatcaggcgagaaatcagcttcgggacgattataaattggacataagggaacaaagacgagcttaccttgccatcccagtctttgcatatcacctccatggactccctgatgtagtccatctcttcgtccagatattcgtccatgttaaactcaaacatcgagaatctatttgaacggaaagcacatgatctttagcatgaaagttcgcggcagcgttcgacaatggaaggagaggaaaaggatactgacatcatgctcaaaacttccttgcggttgatcagcccgccacttgagggatcttctccctctggcgtccctgtcttgagaatgacatctaccatcttttccaccatcgcgaacactcctgccgaagctctgagaaacaggcctctccctgttgacgcgccgacatctcttgcgcgttgaaggagcggttgaatgtactgctctccgacgacctcgccaaggatccggtcgataaaagtgtgaagcaccttggatggaggaggaaacaccctggtggcttgagacccagattggacaattatacttgttaggtgcgcgatgaaaggttccatcggagtgaagtctaatcgtggtacagatgactcgggaggaccaatgatgtttttggatgggttccactttccaccccctccttcatagaagattgccatgcgctccatccagactcttcctagctcccattcctctactctgatggttcttcctcggcctgaatctttgcctcgtccgttaacttcccaccaaacctcccaacctgctttcgcccattgcttcatctcagcctcgtcctctctctcgtctgcgccttcgaatccggcgaggcagaccgcatcaaacctatcggcagcggccagtatgagatatctgatagattcccaccgactcataggctgtatctgagcggaaagaaactgcagtagagtgaggagcactttggactgaacgtctgagcttggtccagaggagctgtcgactaaggaactgaacaaaagagagaggatctgagagggggcaggagaggacggtgaagataagagaggtgacaatgtcgagagctgttttgtgtgatgagtcttgtagatctcccgccaaggagttttgcgttctgaagcctgggacgaagaagggagtgatgaagaggtagaaggttgggatgaaggattaggtttggctggtgagaatgcgaagaatccggtggtccgtcccccggtctggcttgccctgctaggaagcggagcagagatgttgtcaaagtccatcaagtctgtctcctttgatattccgaaaggatcagccggaataggaacgtccacaaagtctccaaactcatcttcggtctcgacggcggcttttgccgagccggctgaaaacgagatggactgttgggttggacgcgacttggagagagatgtcagcaaagggacctccttcgagctcttcctggttggtgtggatgaaactagagagagcgtccaggtgtgtgggtgtatgtgtatgtgtatgtgtatatatgagcaaatatgcgagtattgactctgtgatattacctgagcgacacttaccttgggaagaatgagaggcagatttcgtagactctgttgtgtcatctttcaacccaagatccagacatctcgctttccatgcctggtcttcgctgaccagcctgccaaaggcttttgagagtcgagcgagctttgggagctcgtagactggcaagaaggagatgacgagtaaatgaagggtttctggcagaggacctatccatgcgcccagttgaggcggtggcagcttggccgctaagggatgagattgatgggatatcgcatgagggaaaagggacgaagagacgatggatgaggctctgtctcccggctttgatggcttaagaggagcccaacgatccattttgtggcaacagaataggtgatgatgatgatgatgatgaggagtgataaacagatgatgggagtgaactcgaaccgccgacgcttcctttcccactccggacggtcaacgccaatcctgttatcctctctcctgttgtcgcggtagcatgatctgattctatttgcgtgtatgctgacaacaagctgatcaccatcggattacaaactgactcgactgtgggacttatcatcgtgctctcctactcactgggctcctcgctgggttttggccgctctactgacgttccttcttgccttgctgccaaggttccttctctttagtgcactca

SEQ ID NO: 2853 - DNA, 4912 bp, Xanthophyllomyces dendrorhous
ctttagtgcactcaaccttcgccactgctgttgttgttgttgttgttgttatttccgttctctctcctacacgtcctggaccctgaaagagagaaaacatcttaagagacttcctgtttgtgttgtccgtgttttctttcagccaacatccatatctcatcatgctctcccaagtcctccccactatcgtcagctcaatcattcgttcttttcaatctttgtccagtccagactctcgtctgctgccctcaaatcctgccctctccctttctgtcgacagtcactcccaattgctcccacaattcgccagcttccatcttgttccgttcttcaacttggtcttgacggtcgtcgtgtttctgtacctgatcgatgagcagtatgtcttcgacttcctcaagccacgctctcttcctcttttcttgaaaggccagacagtctggtcttttgagctgaaacacaagcagggagattgattgcgaatgatgattcgtcactttctttcaggacacatgcagacattagtcgttgtgtggacacgctgacgggaaacaaatacaactgttccgttgacatcgagcgggatccgtcatatgtcacaaacgagaaaggactccctgtgtatatgacaccttcgaacgcctcaagtacggccaggatgtctgacaaggagcaggctgtcttgactgggttggttgcaggatgcctcctcagtatgatgtttcagtgagtcgttctctcagatctcacgtgtgatcgcgcaagctctggtctacaaaaaccagctctaacatcttgatcttatgaaccctcgggaaaacagctccgactcagtactagacgtctttgcatccactatccacatccactctgaacacttccgtatggtctttctccggtcagccgtgctctactttgcatttacagtgatgagcgcttttctctttgtatgtgtctatcatcgtttttatcctctctatactatatggccaaagttctcgagtagttttctaacttctatctccctgttctccttttgaatcaagaccgccttggtgatgacatctctgagctcgatccgctcaacgtacctccctcctctccttttcctcttgtgccccatccttctttcatccaccatcaccaacagattcctcctcgcctgtaccacatttgatctcacctcttcccctcatctggcgctcttgataggagaaccaatcgtgttgatctcggtgcttagctggatggcctttgggcccgggggaacgagtgttcgtttggcttgattttcttctcatcttatatacaagttagggttacctttgcgtaaaacttaataaacacacacatctctgtctcttaattatcaacgaaacttcattgcgatatgtctgaaagggtatcaacgaacgatgaatgtcaatgaggaacagtatagtacggtacagcagattggatatataatattcaagaaaagaaaaagaaaggaaaattaagaaggaaaaagcgcttgttgaattaagggtagatcgtctagaaatcatcctcgtcctcatcctcctcagactgaaccacacgtttctttcgtgctagaagatgaagaattgtaaatgaatatcaccacacatcagtcagtcgatcaagaacaagtgagtctgagcatgcataacacccacaagctttgacaggagcagtctgtttcttcttcctatggacctcttcttcttcctcctcttcttcttcttcatcctcagactcgacaacctgcttctttcgcgctatagcgtgtgagatttagaatgatagtgagaaggcgccttcggatggaactcaagttttaatgggccaaagttcgaaaattcaaataagacttacgtgttcgtccaggaacaggcttcttgctgcccttcgaccgagggacaggctcctcttcctcctcttcctcctcttcttcaatattttcttcagcttccggcccctcgtcctctccttcgtcttgcgtgacatcagacatctcttcgtcttcatcttctgtcgccttctttcggctacggtctgtggtagataagaagagaataagcaaagtatgtcaaccggcaaatctgagtcggcagcttcgctaaactctgggtaaatagacgtactactctttctagatggaagagccaatccagctttgtccttcttggcaagggcggtttttcgtttagctgacgcgatggtcttcttggcgacctcagagtctagctcttgaccttcctctcctgccttcttgtggtttccaaggatctggatgagaataaatcgggcgagataacaggttgctcagcatggaaattaggtggagaatgaaacgtaatagtcttaccgcttcgaattcgttcagctcagcatcaggcttatttgtttgcttgtttgctctagcctataatgatgtagcacggagaagatgaatgagaaacacttatgaacagagaacgttcaggtacaaggattaaatcagtctgactgaccttggaaaggatctctgtgaatcgcttgaagaccttctcttcatagagcttgtcctgatagaatggcaaactacatagagggaaacggtctttagatgaagagaagtacatcaagataaatgcgaaaatagctcacccgtcaataagcttcttgacagaccgctccgacttgtatggcaatagagataagcagaacgcgatgtcacgccactgtcgctcgtcgctggccaaacggaatcgctggcaaagcttctcgatgatactctccgcttgcttgtcctattgtcatcaagcatcagtgtcgtcagattcttatttccaagcccgtcaaagggtgtggagagatcacgatagatgaaccggacagaccttctcaatgaacgtaaagatatatttcatcgtcttttcaaaggtttcttcgtccactgcgtgcttgcctaacgacagatgagagatgacgtcctgcaagttgttgtacagcgcgttctccttgcttgagagttctttgaagaacagcttggcaagatcccgaacccgttgatcgtcgtcttcgatgcattttgccatttcgccaagttgacctttgactttgatcattccgttgaggatcaagtgggtaagcaccatgagtgtgtgtctcttgacagtcagattctcatccgataacccaaggtagagtcggtcactgagggacaaagaaagaaatataacgttccatccatcagaaagagattctgtgataacgaatatataaatagacgtatgaacgcacctgttttcgtcaatcatgttactaaagcagacagcgatatctccaagcgcaatgacgatgttacttctgatgataggatcggacgtggtctcgaacactcggaacaacagagggagttgggtctcgcagaactgagagctgacacacatgagcttcgacagagccaacaccgctggggtttgaagcgatgaatcctaattgaggttacgcgcccagaaacaagatcaaaattggtatatatattgggtaatctgagagaaaaggggcgcaaacgagggtacgtactctgtatcgccctgggttcgcgcagacgtcagaaatcaaagggccatagaccgcaagcaacgagtcctctccgtaaagaatttcgtgctcccggatgaacgtcatgttctctccgatatcatcctctgcgtttccagagacttgatcaagatcgttgtcattcttggggtccttgttggccggggcgccagctgtcttggctagacgatactcaagaacatgacggttagtcagaacttcttgggaaacgcaaacaagacagaactcgtatatgatagatcgaccaaccttcagtagctttttgctccttccgtctcttgagttctcgttcgaccagctcgagatatacgatatgtttgagcgctacgtgccctaccaaaaaaattagttggcctagttcgaatgaattcaccaaatatttgggattatccgaagaggacatgacagtatctcctgaaggcgaggtaggtaaagccgcatctacctctatttcagcctcgagatcgacatcggcgctgttatcctctgatcctgatgtctcggattcagtaagattaagcttgccaatctctcgagtgatatcgggcgcgtcagaatcaagaatgtctgaaggaacgggtgcgtcaaatacacggtaggtgaatgatttgattatctctgcagctaacacgtcgggttgctcgccgagtaggtagagagcgttgatagcttgctcggcaacaccaaacctgtcgttgatttcgaattcacgagtaccagacgtggtagtgttcgtcagaacaaatccggatgcatactaaatcccaaaaaagacatggttcgagactgaccattgtaccgagtcagtaggcgtcttgacgagttcctccaactgctgaaagattgggttctccatagggagtcgattcgacttgtccgttagtgatcctgaaaacgttatcagattcgaacagtcagttgtcaacagcaagaacacgcgcatcttggttgcgagttcagatttttgttgtagagctgatatatgaatatctaactgctcaccttttatcttcttggcgcttccgctgatcctttgcagagcgacacatgtatatcgagccaacgtaaggtccgcctatgatcgacaaggacaggtcaagacggtcagtcttcctgatttcgacataggagaagagaacgggacaaacttttccaagtgggcccagaccgatccgaagcaggacgtcaactctgtctacgataatttctttctttgcgatcgccaacattccaaggatgatgattgctcctctcctctgaggtcgagggatatcctgatctgcgtctgttcgtttcattc

SEQ ID NO: 2854 - DNA, 1926 bp, Xanthophyllomyces dendrorhous
tgtattcaccttctgtgttgtttctgatctcagcacaaattaccggacagagattgttcatgacgatgggtctgttttcttggcggttatggtgggttgtaaaaatctgagttagggttaatctcccaaatcggctgccactcgtcgtcattccgtcctcgatcttacattgactcacttgcctaacctttatttctctacttgacttctatcacttgcttatacgttcatattcacctgatatcatctgtctagaatggctgttggttcttttcccgatcaagcatacgatccttctaaggcgactcccactggtaaccagttctatccacctcaaaatgacccaaacgtcaccgtcctcccgcccaagagagcagaattgacaaccgccaatctctgggaagctatcaaggtaaggctctgtcagctgtttacctctgtttctctcgatgaaatatgtctgatatggagtagtgttattcgtgatatacgtacctggtcgattgtttctaaccaactcgtctgtttcgttctctttttaccgatcttcacgtcccttgatcgtacctttttcttaccgctttactctagatgaccaagctagaagatctctctccttccaagctcggtcagattccgtgtatgcgaacgtcgatgcttcagggtatcggaggtggtgtgggattcgcaatcattcgattactgaccggaaagccaggttcgttcatacctcgtttttccaaggtggaggggcgaagagataactttttccctggctgtgacgacaaaatcgatctttgtcctcgacaactgtatcaaaagccttattcatccacctgcttatatgcatttgggatcaagatgaagagcaatcatcttaatcttctctctgagccgtcatcattttttcaagcccctctcatcgatacctctgatttttctttagcttatctatgaaacatgctgacattagctctgctgtggtgctcaatatcgacgtggtccatgtgattcataggtatctcaacggtgttttctgcgttcggttggttcagtgtcgcttttaccggtatcggaggagcagctaagtttgtccctatttctctctctgacctcgactgttcttgatctttctgaacacgtatccttttctaattctttctatccacccagcttgtactgcaataagaaacgaacggaagagatcgagatgatgcgactcattcacgaacgattccctgaacggagtctcgcgaacgctcgtaaacgacgagaacaagccgagcgcgaaaacgtccaggtggcagatcttccaccgccacccaaggtagaggtcagccagccgagttacatcagcgtgagcgactcggatggaaacttcctaggaaagatgacaccggcgatggcggagctcgcaaagtcgagaggtgcgaatgaaacgttcaccgaggtcaaagctggaagcgcaggttcgtcagcggtggctccagtggcgactggtttgccatcaaatgaagatggtcagccagagaagaaatcatggaagactctgtggatgtgatagagatgagatgattctggaccataaaggattttgagcaggcagattgaacgaagtagtatctataggaagacgtctcatatttagaagcttaggtaagcgcgattgagagataatgaattttcgactggcaactttccaaacacattcacgtagacatccatagacatcccttcctcgaccatcatcatctagatatgccatcccctgccccttcctctgccacatcctcaaagggaaagtctaagatgacagtagcagtcaaggccgtaactgtaaagccgaaaccaaaagtgtcttccaactgggctgctctaaaatcaactatagctccttcgacctcggctagctcctcatcatcaggt

SEQ ID NO: 2855 - DNA, 2977 bp, Xanthophyllomyces dendrorhous
  misc_feature (864)..(873): n is a, c, g, or t
ggaaaatatgtgggtgagctaggtggccgagtcgagagaaaagaagaaagcttcaaaaggtatggatatgctttccgcctctccttcctctcgcttgattcgttccggctcgaatgtacgaagcgcgtcaaaggtggttttcgatctaacggacgtatgagctttgattctgtatgtgcatacttgagaatctatcagaggtcgagaaaacaattctccgccaccgtcaacaagtactgcgatctcggagtcgtcgacacctgagacgacttattcgcctcttatccaggaacttaggtcaatggtgctcgggacttcgcccgctatcgaaacaaagacagagtgcgcattcctcgtgtttatcttccgtcagtatctttgatcaaacctctaactctcgtttttatcatcctctcctcttctagaccaggcaaatatctctgcatcgattgcgagatggtgggtgtcggtgccctgggcgaacaaagttctctgggtagagtgtcaatcgtgaactatcacggagcggtcgtttacgatacctttgtcaggccaaaggaacgtgtagttgactacagaacgtgggtctctggtgttagtgcagcggacttgattaatggtacggttgtgtctctcattatcatgttgaaacctctcttatcggtagagcgcatgttcagcaaatgtgtgcatatacgatctctactgcaactcatcacttccttcgaatttaatatacagcaccgacattcgaagaagtcattgtcaaagtagcccaggtgatcaaggggaaagttcttattgggcatgctattcagaacgatttctctgttcgtcccttcttctctctctctctctctttcnnnnnnnnnntctctgtgcagctttcttaggacgcagcgcgatctaacagtgtatttcttcactcccctttggtggtattttacacccacacgcacacatcaacaaaggcaatgttactctctcacccagccccgtttacaagagatactcagaaatgtccagaactccgaaagatcgcgggctcgagactacccggattgaagaagttgacaaagctggttttgggtttggagattcaggaggcttctcatagttccgtaagtcatcagattcactccatcatccttccatccttccatgcttctttttcgctttctttcttatcgttaacttctggatatcaatctgtgtgtgtgtgtgtgtgtgtttcttgttctgttctgtccaccaggtgaccgatgctcgggccaccatggctctctaccgaacgatcaaagacacttgggaacccaccttctccgtcgccatggtccgacatgagcaaaagactaaaccgaaatctaagactgctccggccgaatctttccccggtggaggtagacggggtgttagttcggggttggaatcgatcgttagtagtaagacgaagggagtgactaagaaagggaaaggccctggggtgggcagagtcgaggacgacgacagggatgatgatggcgataactggtgggatgaatgaaacctttttttctttctttccacactcggacaatctctttctcgcacgaagccaggattatatcggacaaatacctttgagaacgcaaacttgcagctattgaccgagtctgatgtgacaagctgtgttagcgagaagacatccaccactcctgttcatccttgtggtcgtgatgggacgtgggtcatgcatagatacaaacgcgcgcgctctctctctctctctttctcttctcatttactcacccagccgagtcttgtgccccatgtgcgccacatccgattcacgactatctgcttgatctccgtagacacaaatgggtcttccaaatcgagcagatcctgcataaattcctgcacatttccattttcagatgaaccaacccgaacgttagtttttcccaacatcagcttcgttcaatcctgtaaacattgtttgacaaaggaaaacaaaaagaaaaaagagtggaagggaagggagaggaagacattaaaaagaagaagaaacgaacctgcttttgtgcagtctcgctgcgcttgaactctcgcttagccatttccctcagactgccaatcgagatgagaatcaaaccttgggtgtcgtaaccaccgatggtaccagcatgtccgcttccagtctcaggcacgtctggctctaggtgtatcaacagtcgttcgatccgtctgatgattgccagcgcatcgcccataaatatttcggtcagacgggcgtgggaccaccttctttcgacggtctttggaacgaacgaagaaaggatgaggaactcaccgaataccttcccaactggcccttcgcctttcgcgtctgtttgctccaaagcttagcccgccggcactggtcaggaatgatttgagccagcctccaagaagatagacaatcaggaacgatggggcgactcccacaaaggcgaaagtaagttcctgtgatcggagcaatcggtctattccagatagagccaaatcaacatcgacctgagcgaaaacagatgggcagagagaaacatgagtacaaagattcgaacagaaggcaagtcaagttaggaggggatatgagaagcagaaggaggcacctttgtcttctggacttgaatgagaagcgatcggacgagggagccagcaattgcgttcttgagcggagactatcacaacagagacgccagaataagcacagcatatcttgcggcacatatccaatccatctgaggatgagaaaactaaccttcatgtcctcttcatagagtttcaacacgtccgaaagatcaccttctctgactcgtcgagataggctgactaactcaacctcagtgtacgccttcttctctctggccaagtcaatgaccatcctctccaatgacttgagacccccggagttttgtcaaagagtaacatctgtcaacttgaagtcttccagaac

SEQ ID NO: 2856 - DNA, 1655 bp, Xanthophyllomyces dendrorhous
agaaaaaaaaaaggagagacccacgtccatgtcgctcttcatgccttctttgctcatcagtcctccactaggatggccagtttcatctccgcttccgtgtctgacggtctcaatgatgcccattgctggttcgacaacccatcccttccagaagccgatcgatgtctccttcagatccctcaacagcgccttgacgactggaattcggggcgcgatgagtggaatgagtagtggaagaagcaacagcggtggccatagtctggtgagggcggtcggtcgagtcaacgatgaaggaacggtagtgtatcgacgaacaggcttgtcgaagagagcggtaagggttggaaggacactggatactataggaggtccggatcgtaaggtccctatcgagtatgcgctctgtagcctttccttatctcgctggtagtcttccaatcgctcctcaaagtctgggtcaccaggatggctttgaggcggctctccgggcgaaccaggaatcacatcaaccatgacgtcgagtattcgtttcactatcctgatcatatccctcatgtcccacggtttcctgtcaataagatcctgttcgtcccaacttggcccctcgattatcagttggcctagcctgcaagccaaccaatctcttccagcttcgagctctgtgatccgacgacggacttcaagccgggttaaccgtatcagcgtacggaacccgaacagactcggtgtcgaccggggaacggccgtcgtggggaacaaggaggacagaagataggtcggagtgaatgaggcgaggcgacgaggaggctgagcgtacagagagtgcgtcagagatgccaatcgatgtgggaaggctagttcaaaagaaagaatgacgatatcaaaatgagaccgactacatgagatcatacgactgatcgatccgagtaagagagaaggaagaaagaacactcggtcgatacgaactcatcagcagataccctccgatcccaccccatgcgtactttccatttctatccagtttcttccaccaagcgatctcttcctcccattgttccgcccaagcggcatgctgttcgatctcgaggccatacagactgaatacaatcctggccaacacagtccattcgaggatttcttcctccttttcttctgctgttcgccctcttctacccaacgtgttgacaggcgatctggattcgttcgaaagaagaacctgaagaacggaatagatgtctgaccgttcaggctcagagggaaggttaaggagacaatgttgtagagtgctcgcccgatcgctcggtctggacggggacgatagacgggctgtagacgtgtctacggcagaatgggggtattctagcaggtccaaccgttgtgctagaccagatattctttgggccatgaaagtacccatggtgtggtgagaggtctgcgaccagatgagactgttctgtgttgatggtagagaaagacgatcaagatggatagaggtcttgggcgacgtgatggttgatgatggagaggcttgatgaaaatccagtgtcactcattcctatcttctttcctcctccgaactatctcgtcttctttttttcttgtgagctcttgatctttcttttttctcacacacacacacacacacacacacacac

SEQ ID NO: 2857 - DNA, 3298 bp, Xanthophyllomyces dendrorhous
ctactccatcgacgagtcctggtccttggagacggcatcctttgcttctcgaatgtataacacattgttgcatctgatttgttgaggtgatggttgaagagagagccaagggtcagcctttagcaatcaacgcgtcccagaagaagcacactgatgaatagaagacgaatgagaagacgaaccgaacgaagacctctcccaacgctccggtggagactcccttctcaatctcctcggcattggcgagctgcagtatgcgtacgatgagagtcgcaagagagacacgccaaaagtcccaaggtcagtccatcattgcttgtgttcgatctgacctctccgatatcacggctcttctatctttcatggccaacgttgggcactcaaaaaagcagagaagcctctgtatggtacgaatcaagtacatacctggacgttcatatagctatcggttgagacgagataacccttgtactccacgccccacttgagcttgacatacacgacctttccggtcatctcctggaggaacggcttggggttaacgggagcctgtttgaagagaccaaccttgtcagccagccagccaaccgacagcacacacctacacacagaccaacagctccctgggagtcatacgcacgacagacatagcggatatagaaagatggcaagtaggacaagatggctgatggacgtcaaggctaaggggaaaaaaggaaagacggggggggaagaaagcctggctgaggtgaaccttaggtaagatgggttattcaaatatattcatatataccttatctaagactcttccgcctcgtcttgttttctcctcttattctatccgacacacaaccaacaccatacatccaacactcacccactcacccccgccaccttttattccccttgccaatgtcagacgacgaagggcatacctcaggcagtagatctggtggaggaggaggagggccacccggtggacttattgacgatgatctcacccttcccaaggcgacggtgcagaagctgatcaacggtgcgtctggaatgctctctttcctgctcttgttctttctgatgtccttggcttactttcgacgcgtttgtttcttgttcttccttctgttgttgggacctttgcgaatgataccttgttctgatccggcccaaccgtcagaaatcatgccggaccacatgtcttgcccaaaggactctcgggatttcgtgaccgcctgttgcgtcggtgcgttcaaatatcgttgcttctctatctgtcttgtcgtttccttgctgatgtttagcacgtctaccaaccctaaacccatcagagttcattcatttgatctcctccgaggcaaatgacgcgtgcgagaaagaccaaaagaagacaatctctccagaacacgtcgtctccgcactcaagtcgcttggctttgatgactatattgaggaggtagaaggcgtccttgatgaacacaaagagcaccagaaagtatgtctgttcctcctcacacttcttaactccttttttttattttaaaaaataggtctttcgccatctgactgtggacctatctgtttcacccaacggaaccaaaggtccgacagacaaaacagtcagcctcgtcaaaaaagaacattggtgtttcccaggaagaacttctcgcccaacaggagcttctctttgccgccagtcgagctcgttatgaagcaggtggtagcacttaggagggcggttcatcttgatcttgcctctgtctccatcgtttctctccatccatcacgcgtaaaagcagaaagagaagaagggcgtgatggcaacagggcaggcttgttcaggccaatcctctgacgtcaacctttctcctcgatcctatcctcatcctttccggtgctcttggccatgatccattctcctccactctgtctagtttacattgctcctctcatcttgttcccatctttcacgcttcgtggtcgtcttcgtcaactcccccctaccgttccctctacagaccctctaaaaacggcccccttcctatccatcaaagcaggattgttgtacaaatatccacttacctcactatcaccaccacctccttccttacatgcagttttcgaaatcacatatacgtacatccgcacttttttctttctctctatttgcaatctctggttattcatacctgtgctccgagtcgtgtgattccctccccgtactctcacatctcgtcacaaagccaacttgacattctcgcatgcacttcgaagacattgccaagtcaatcgttacattgacctccacaaagaaaactaaaaaggacacattcatcctagatccctctacttccgatcactactccacgctttctcgagtccaaagtaacctgcagagcctattctcggtctaccgcctggcgatctcacttctccatctaacggtcttgaggccgaatgaggcgagctataaccagtgggcagtccttcgcctgaaggagacgttgaagcagagtaaagtcccggtgtgggcccatgcccggaaccgaagagagcggatgtattcgatggtggtgtagagggcgtagaggggggtgcacccgaagagacctctttcaacagatattcgacaaacagttgggagaacgactgtgggtgaacgggccagttcaaacaagcgccgggcatcagttcacttttcttcatctgtcatgaacggacatcagtgcaagtcgacaaacctcgtttgctggttcagccttctccaaactcttcccactctgtctcagctgagcacctccgtttcctctcttggctcctgcccctccgaccgttgaccgttgtagccctgcggtttccctctcggcctcgtcccatgagagaatagaggacagaagtgaaagcatctcgaactttttcgggtccgcacggggagatgataggaaggcgagcagaatattggttacaaggcggctagaagagttagagtagaagaatccgaaaagggtgggtaattagagatcttgacaagatggaaaggatagcgtaaaaaaagacaaaccgatccacgttggtgtccgaagtgttctttcgtaaccgacgaagtgcctctgtcaggtgttcgttcatgattacatctagaaaagaggtcatagaaaaattgaatgttgagcaggcgatctcaacgcgcaaggggagggcaaaagtaaaaagaagaagaaaaaactgactctcgtgtctaagcttgcctatgagcaagtttttctcttttacctccttctcaaacgtctgcgctctcatt

SEQ ID NO: 2858 - DNA, 2915 bp, Xanthophyllomyces dendrorhous
tgttgttgttgttgttgttgttgttgatgaagatgataatgaatccgaagctggtattgatgatggcgacgttgccgtcgctttcgttgtttctgtttctgttgatgaaggtaatacagtcgttgtctgaaccaaaggagatgatgaatccgaaagaacgactggtttcacatctgacgaaggaccttcgttcaacggaaccgattcgggcccgagagcagcgacaggctctgtgggttcttttactggaacagagggagagacagcagtcgaaggtgaaggtgaaggcgaaggatctcttgatgcttgtttagacgaagctgccgagctcgtcgtcaatgtcggtgtttgagcctgagcctgagcctgagcctgagcctgggaggaggatttcttgtgtgatttcttgcccatgcttcaagagattcttcaaaggatcagacagacgagtaaaaaaaagaaagagaagaggaaagaagaagctgaagaaacgaagagagagagagagtgattgttgatgatgatcgaggccagggtagtagtgagatggctaaaaccgagggtgatcgtcaaccgggcctgctccctccgcagcggacgcgactttcgagcttcgtcttgacggccgacatcttctttgatggtcttgtacaacttgagaaacgtcccatgtatcgccggttaggaatgtatgtttcgagagtatgggaggaagataagatcgaacaataaaagtaggacaagcagcttccaaagaatattgaacaagaacaaagagcgcatgacggggtgaagagatcgatttgatcggggagggggtataaatatgtatacgtattgaggatctttgtattcggtcagcctgacgagagaagaatgaaataagaagaagataaaggacacagagatatagcacgacaagaaaacatatatgtgtaactaagccagaggtcatgaatgatacgtgagcggtgtcatgacctcatggaagatcatctctatcatcagcacatcggaccggaacgagagacgacatggtgaatacttggaattagcatattggcagaagaagaagctctaagatacaagaggatacgaacgtttgagagtttctctgcttagagtttcttgtgaattgtcaaagtcaaagaagctactaggaagaggtgcagccgacggttcgtcctgaggatcatgatatggctggattcaggcgtagacgtaaggaggaagggatgaacatcagacctctaaacagtacatagaacatgagacaaaggacgtgaggacgtacctctagataaggatgcgtcaacgcttcttccactgtaatcctctttttcggactgaacgtcagacaacgcctcagtagatcgaccgccatcgggttagtcggcttgccgttgcctccgacgatctcgtgaaaatctcgtcgccttcggaatggtaacgcccgcagataatcttttgatcgagtcgaggtgatctcatagaaatcatccatctgtagagataagcgctgagtcagaggacaaagatggcaaaagaagaagaaaaaaaggatagaggaacacgagagaaaaggcgaactgttggagttccgagaatatctaatatcaacgaaagctggtggtggtaatcctgaattggtagtagaaagaaatgcgcgctcagtcggcgaccaatcaggttcttggagaaacactaagacagacggaacatactctcccaggaaataaaggtcttccggtaagcatctctgccaatatgcatccgacggaccaaatgtcgattgctcgggtatactctttgaaagctgttcgtttgtttgtttatttgtttatttgttttcagagagcggttgaccagattagccgtcgagtgagaagtaaaatatatatatatatataaataaagtagcaggagagaacgtactgagcatgacctcgggcgctcgataccacctagaaagaacggatgttgagatcagaagactggtcagaatttgacaactttgtggcacactcaaagaggaaagatcatcgaacgcaaacagaaaaggggagagggaatgaacatacctagtggctacatactcggtcatgaaaccggctcctccgttcggtcccgcatccggaggaggaagcgcggctgacctggccaaaccaaaatcgcaaatctgaaagaatggaaggagagcgcgaaaatatgttggttatttgttttgctggatcaaaagccagagaaatagagctcgtacctttagatcacagttggcgttcagaagcaaattagaaggcttgaggtctcgatgcaggacgtttgccgtgtgaagcgctttcagccctcgaagtgtctgcaaccagaatgttttcaacaagaaaaagaggacagatgtacacatcagtgttccgtgagggagttggccaagccaggccagtgagggaaacaacacgaaatggatgcagagaaaacgcttgaagagaacgaacttgatagataaagtattggcagtgatcatcgctgagctcctgggtccggatgaccctatgcatatctgtttccattaactcctgatctcatccgcgcgcgttttcagagatgatgttgaaaggaagaaaaaagttgcttaacgagatgagacgacagagtttcgcttgatcactggcaaaggaaagatagatggatgaacaacttgaacgaacctggatcaggtagacttcggtgaacagctcaaacgtcagcggacggacgatatcgaggatggcgatgatgttttcgtgtctggttccggttagcgtcggagaacaaaacaagcatacgcctgtcagcgtttggaccgagaacaaggacaaaggcgtagagaaagaagaagagaagggcaggggagggaagagaagggcaggggagggaag

SEQ ID NO: 2859 - DNA, 15361 bp, Xanthophyllomyces dendrorhous
gggaaaggaaaggaaaagagctcgagtaatacgatattgaaggagacaactaacctgaaatgccggagaagcttgatttctctcaacgtcctcaaacagaacatggaatgatcgaacggagtgatccgcttgatggcaacctttgtacctgaggggagatgtgtggccgacacgctttgattggaattcacaacgacaagagaagatttgtgagctttggggatgattgagaccgtgtttaggatgagagctcttcttcttttcttctgcacacggaacgccatctagagtcccttcaaactctgcattctgggttggtcgagctgcgaagagaagaagaagaagaagagaaacagaggaagagtgtgtgtgagagagagagagagagagtgagacgcacaccatgccgtaggcaccttctccgaccggttcgatcacctggtacgatggtccgacgtgaaaggcctccatgaggttggtgtatgtcttgcagaagggttgcctaaggagagttcttctgagatgggctgatctggggcgagactagactagactagaccgaggaaaggacgaggactatgaacgagaagagaccccaaggtgatgtagctgatgcgaggccttgatggatagcctcccacaaccgggactgggacagaaaggagtgaaggatttttgttcttttttctttctctctctctctctctatccactgaaagaacagagacactgatcagagatgatctatgcaacagaggcaatacgtatggaacggtgagcgttgtctagatagcagtcgacggatgaagcaagacagttgaagaaaggatgagtgtgcgtgtgtgttgtgtctggatgaacgatcacgaatgtctcacagtccggaaagagaagaaagagaaaaatgaagacaacatagaaaggagatgttcttgggatctcttgtagtcctttctttgttctcatgactctgcttggaaacagttctcactttgttcccttgtgcgccatccggtctacgctccgttcccatccggtctatcagctcggttcccatcagagacaaaagagcaagcaggacaaaaggattctgttaaggatcatgaatgtgagacatggccggagatttccgttagggttaatctagattgctgcctagacatatgcctttgttcttcggtggcatcggtgtgttgagaagagagcgcgctctcgcccgggacaaagaagaagaagagagttgttcggtgatatgtgttttgttgtggggaacgtctctgaagaaatgtttgtgttttgaagaagtaggagagcacaaccacagacatgggcggacaaggtggtttcgagagcagcacagacatatataggatgattgcattttctgccaacaagaactagtcctgattccacacatactatccactgggttgctcgctgaacgttgctcggtcaagagagggtgtttctctatctgaggagccaacagatgttgaacgattgaggatctttaagaaccggtcttaccgtttggaacacaaccagcggtggcggcggcggcggcggccgatcgtcccggccgtgatcttctcccttcttcctttttgcttgatctactttatctgctctctcaatcatcctcgttcgtttcaaattaaacactcatactctcataaagatgaacacacctcaatcagttgtatgttcagatagcttctgtggtgcttgtgctttgaagatgagaagctgatgtcctttttgttactcgttgattttcttgttctctcactcaggccttgggatggggagtccttcttgtcggtaggatgcacctctttgtttgattcgaacactcttatggctttcagatcttccgtcctgacatcattcctggtcaactcttatctcgttccaatttttaattttttttctttgggtttctcttttgtgtgaacgacatcaacagccgcctcggcatcgtactactacgcgaaatcagatattgatgcccgacgactcgaccaacaacgaaaagggttgagacagacccaggtcttgacttgttcgtccctcttgattcaatcctctctgtgtccttgttttttcctttttctttttctttctgttctgacatgaatcgattggatcggaactttctgaaggggaagaacgtctgaagctagacgagcaagcagccgcggcaggtttgcctccacctcctaaaccggtgacgggcggaccgactcctgcgaacccagtatcggattcagcaaaagttatccccccaccagtagggaaataaaagacgatatgaatctgtgctctcgtataattcacgtatccaaatatcccaatgatagttgactttgtcgtcaagagcttcccttgacggtcagtttggaatttggatgtggatggggtggggatatgttgaggtttgggtaaggtgtctggtccaacgcgcatgtacaaacgctctttttccttgttcgacaaaacaggagctcgttcgctctggctgcaatatacacagcacacatcgcacctcttgaagagaaaatatataggagaaacgcgtacgtttgagaaagaaaataaggggagattgagtagtggtatagaggcaaaagaaagaaaagggagagagggaagataactttcgaggctgctcggaaaataaacaaacacactccccttccacctcctcattcaacattggctccgtccgttctgtctagacaggaagggaagggagagaagaaagaaaggtgcagtcgatcccgcgatcttaaagatcgacaaaggtcttgacgttctcgagccaagagacgtactcctatgttgacccgctcagccgataaagagctcgagtcagacccatgttcgttaagaaaagcgagagaaatgaaaaggaccaaccttctgctccttgtggcgctggtactcgcccaactcggatgcaaactcctcgtcgattcctcgggaggtcaagaaggaagcgaattgctgtaaacggtttggtttttgatattaagaaaagaaaaaagaaaaaagaaaagaaaaaagaaatgacaaaacgttcagatccatatgtacttttctttttctttacccaaatcacattgcaaacaggaaggaaaccataaaagacttacgtcctgaacttcagggtcaaggttctcaaagcctaacggacagaacagagaaaggcaaagacagatttttagcgtaaacactttcaaggcgcccaacaacagggagaagagagagaactaactgggtccgtcgtagacacctcgcttcttgaactcggcctcggcagtctcctcggtctgaagtttggagtccttgtaaagcgagacccgctcgatggtgaagtcaccgtcctgaatagtggtctggaacacaagggcctgggcgttctccttgggcttgaacgtgggagaaaggatgggatccagatagtgaaaaggttttagatgcaaaagactagaaaggatatgatccaaagcaaagaaagggtgcaaagagaatgaaagatacataccttggtgatcgaaactgtcacaatagttccaggcatgtcatcaaactcgtcggcctcgacgtcctcctcctcttccacgggcttctcctcgggaaggtcagaagcggcgatagtgaccttgatgctgttacgaccgaatgagtcaaagagggatagattcgaggtgagaacaggatgagaatcgaacattatagcaaaaacatactgacacctcgttctcgatcgtctttgtgaaagtgacctcctcatttccaggcttgtcggtaatctaggtgtcatatgttcaagattagctacacgacgtcgtccggcacgccgtagcgcgcaaacaagagtagggacaaggaaagaaagatgagacgtacttcccaacctcgagtcttcaagttctcggtcgtagtggccagatcatcctgggcaatgttctcgttctcgaacgtgatttcctggctaagagcggaaaccaaggcgatgtcgtctaacgaagggaacagggtctcgacaaagagtcaaagacacaaagagacgtttgtgatgagccaagataacgggaaacgatgaaaggaaacgacctaccctgtcggctagctctctggaaagcagagagagagaacgatcgggtggccacagggatgacggcccggagggaggacacggcggaggacctggcgatgagggagggagcggcagctcgggagacaagagttctgagagttcgggaagccattctggtagcagtgatgatgaagatgaagtgtgtagttgtgagaagaaaggatgtaaggaaacacggaacgaggacaacagttgatggcaaaagggttcaaacaatgtggagagcgtcttgaccaaaaagaaggagaaagaaagagatagaagccgatgggcgggaattattttgaggcacgtgtgagcacagctgtgcaagacatatgcttagtcataccgtcaggtacaccgacgcttgtcagtcttgtccctgagttcttgtgcctgacacgcagtcacacaaacggttacacccacggctacacccacggttacagatcccaccctttttccccgtctttcttcccttctcttttcgaccaaccagatcgagcgtatcccgttaggtcgtttttttccatccttccttctattcatcatcatctacattctttcctccctatccatccacacagagagcatctatttcgctcttgactacatccgtctacacgtactcttctatacactcacccagacataaaatgcgtgttacactcaatcctacagcgttcgctaggctcgtcccttccgccgtcgccaccggtcgttcagctcatcctgcctttcgttcggttggcacaccttctcctgtggcttcttcttccagattgttcctctcgtccaaccgatcaatttccttttcctcatccttctctgctcccggtttcgcatacaacaactatccttcgccgtcgtctcctcttgcctcgtttcctcctgatttccacaccaacccagagttactcgctctaggagttcctccatccacccaacagccaggatcaaacaagggcaaaggcaagcaggtcgatacccagcacactgctgaaggtggtgaagtcatcaagaagccaaagagagtgttgcgagcaaagaaggctgccatcaccatggtgcgttcatacttttctccgtttaacctagtcatcagattcggtgctcttggctgatcatccgtcttcctattggctacaccggtatcaatctcgatcttgaccttttcgtctctctccgctccatcactcccggcccgtcatccgcttgtcgttccccttcacttgaaccaatcgtctgtttgcttgtctgcgtcgttctctactctactcttttttcgtttctgcttctgtaacgacccctccatagaccccagcggctgtggcccaccttcgcacgctttcccctttcgcatcctccgcaccggcctccgctgaacagacattactccggataggcattagaactaagggctgtgccgggatggcataccatctcgagtatgtcaacgctccaggaaagtttgatgaagtggtcgagcaggatggagtcaaagtgttgatcgacagcaaggcattaatgtccattctcggaagcgagatggattgggtcgaagacagactaaggcaagttcctcttctacattctcacctttcttcctgtcgacccggtttgcttatctctgacatatcttgtatacacttttacagtgccaagtttgtgtttcacaacccaaatatcgtcgacgcttgtggttgtggagagtccttcaacgtggctgcctcgtcgtagattccatagaactgatcttgtcgttcacgtcaggatgagccatcctgcatcactcatcccacttgtacattatacacttggacctattcggttcactcttccacactttctcccatctacacagggtttctcttttcgatctcgttcgctcttcactacttttctcccttctccgccggcccttcttggtttttgttacaatagatctttattctttttcgatcttttcttcctcgctcctaatgcctgtccattttattccctcttgttcagaaacatatccactgtcgatcatgatactgtctcgttttctttgctttaacctaggggtacgttagaaacacatggtgataaaacatagagcagataacagatatgtgaggatggatacagtggtacatgataattataccaagcctctcaatcacgtagacaacaagaggtaaaaagatcaagtgacagagtcgtgttcgtacccagaaaactattgactggtagagtctcgattgggattcgaagatgagccagtgctctgatagccatcgccccttgctttaccctttagtgacttggatgttccaaacgaaccgaacgtcggtcgaccgattcctgcaaaccaggccagactgttccgtgcaaaaggtaatcaagagttacttcgatattactgcctgacacgttccagaagagaggagaaagaatgtaagaaatgaaaagatcaaacccaccgaacgaaagcgggcagagctgtacccaacacgtttccccagagcataatcgtccatttttcaaatggagccgtcctcacttcagccggcatgagcgccaagatgacggaaatatggagcgcgtccccaatggagaaagcagcaaagtaccgtgtaaggattgtctcgtgagattgaggatccttctgaagggtggcttgaagagcaggtatgacgaggaatgataacagtccaaggattgccatgcctaagttgaacaaacaatagttgtgcacacgtccctccaatcaatttcatgcctggcccacatctgaagaacacagaggaaaagactatacacacagcttcccatcccaccggccaccaagatccctctgggtccacctccacccccactgacgagtgaaccggccaagacacccgcgtcttccggtcgcaagaaccactcgaagaatcggttcggaaagaagattgcgtacgctcccgcgcctagcattcccaacggctcgccgatcgcgagtgcataatagtatggtttaggaagtggactagctctcgggaagatcattctgtacgtggctaactatgtgaacgtcaattgagaggatggagaagagatgatcgagagacgacaacgagagaaacgatcgagggatcccctcaaaggcaagtcggggagagcaatgacgacggagggtttcattcagcacgtgggggcacagctttcgtcacaagttgtaaccacttgcttttttgaatcaagattattgtaccagaaaaatatacagccagaatatacacctcttcttcatcatagtgaggacgcaagtttgaacatatccacgtatacgcctacgcctacacctactcatctcaagctctacagatgtccaactcggcagctctcaagctgctcacgctgatcaacgtatcggccgctcggtcgactgcccgaccacgctcaatccctgcttccaaagttgaggacactactgccgagtctggtcctcctaaggcaaagaaacggaagactgtcatcttcggagaagagctcatcggtggtcccagtggcagcggaagtccagtggttgctaccggaaatagcaaaggaaagtcatcaaaaaaggccaaggtcgagatcgacagtgcgccagccgaagcggcggttagaaaatcaggtggaaaggatattgagctcgacaagggagactctgacgacgaggatggggatggcgaggggaagggagaatctaccagttagcacttttattctttctgtctgaagtcaaaagaaccgattgaacgatgaactcatttaaaaaatctcgcttctcctaacctagctgcatcttccatgaagaccgacgcgttccacacccactttgggccgtcctcttcggcctcttatttcacaccctctacaattgcgtctgctgctgaaggcaagtggactcagtccaagctctccgacactagcctcggtaaacttgttcaatcggttccggaaggaatcgacgcttcttctcttgacggaacgaaagccaagattatcgagtctctcattgaacagttcgataatcttccctcgagttcagacggtcaaatggacgatttccagacttcgatcttgtccctcattggcggctacaaagatctcttcctctccagcttggagttgaaccagcgagagagaacaagggatgtcgtccttctgcatgcgcttaaccatgtgctcaagtgcgtgtcaatctttggttttgattctattcatacacaaacagagagctgatcatcgtctcaatctacttctttttgccgtaacagaactcgacgacggatcttgaagatgaatgagaaactcgcccacgaagctgctgccgctgctgatgccaaggctgcttccgccacctctgccccacaccctacccctacttcatctgcctctacttctgaccccagagatcaagggttcaccagacccaaggttctcatccttctccccttccgatccagcgcactccaatgggtgacctctcttctagcactcttccctcctgccactcaatcacaaaccgagaacaaatctaggttcttttcagagttttcgcttccgcctggtgtatcagaccgattggtagagaaggcgagcgagtggccgaaggatcacgtcgatacattcaagggaaacgtagacgataacttcagggtcggaatcaagattaccaggaagagcgtcaagttgtttggaggattctacggaagtgacatcatcgtggctagtcctctgggtttgaggatgagcatagaaaaggaaaagtacgtctccttttcccatatcctccttatttcaacatcttgttctctgtggaacacaaactgatcgcatcaagccttcgtctgtcaaacataggagttctgatttcttatcatcgatagaagtcgtagtcgctgaccaactggatgccatgtcgatgcaaaactgggagcacgttcaggttagtatttgattctatcttatgggaacgtgatttcggcgcaggcgaatcatgacacaacatgtcactgacattttgtacttggcgagcagtttatcttctccaaaatgaacgccttgcccacggattctcacggatgtgacttctcacgagtcaagccatggtacctggagggacagtgagtattcccgtgcatcctgtgaatcttgacggctagatctcatctctccaatctcttttctgttatttgcaatctacaaaagggcgcaataccttcgtcaaaccatccttctttcgtcctatgagactccagagatgcggtcactctataacaaaagtctgacaaacctggctggaaagattcgaacagaacagcggttcgagggagagcagatgaagattcggagaggtgtcaagcaggttcgtcaagttttcctccaccagagtctaaagcattgttgttctttctgacataagtttatgttaccctcctcacttctagacgttcacccgatttgagtctgttgatcccaactcggaagcagacatccgattcgatacgttcaccaagcaagtcatgccctctgtgctcaaatcggcggtcatgtctcagaacactatcatagtcgtgccgagttactttgatttcgtccgagtgcaaagttggatgaggaagcagcctgacctaagcttcgccgccatttccgagtgaggctttcttcaatttgcctcctatcggtatcattgataaatcaatgtagctaactgatcactctctgtcttgtcgattcattcatctaggtactcttccaacccggagatctctcgggcgcgaacatccttcttcaagggctcaaagaacctccttctcatcaccgagcgtttccacttttaccgaagataccgactccgaggagccaagacctttatcttctaccaactccccgatcactcaatcttctatcctgagctcgtcagtttcgcattcctaaaaaacagagagggtgatgaattggacgacgtcgaggttgatgagggagaagtctcgacaaaagttttgttctccaagtgggactggatgagattagaacgaacggtcggaacggaggatgcgagaaagatggttcagcccggtggagatagtgtgtttacgttcatctaaacatgacattttctctcgccagaatcagaatgatgcagatgagtcttgataagtatatttgttcaatgcttgtcgattcaacagacgagatgaaatctacaatcaagaaccttcacgacggtacgatggggtatgaagcatatataaaagagtgtatgaacaagaacaaagatttcgtcatattataagtacggtagaagaaagattgaagagaagaagaatgcatagacgatttccagattaaaacatcgctgacaaggttgtatcaagagtttcttcatctcatgattcttcagtggttggatcaacaagctctgcccagggccgaggtcgaatccacatttctgttggccgccgagtgacagcctcggcgaatttctctccgttcggatcggccaaagaggcgggcaggatatccagaaaataccgccgagagagcgtcatgatgaacgatctgagctcgagttgctgatagcatcatcacagccgagtaaccaacagaacaaagaatagatcagaaaacagaagtgttaaaggactgaatgctgaattggatatgtaccgctagtctcgagccataacacgctcgaagacctgtaccgaaaggtatacttggcccagcgttgatgtcaaacgacccgtcggctttcaaccagcgttccggtctgtttggtttaccatatgcaaatacaaaaggtatgaatcaagacaatatgggcgatgtttatttagtttgaactcagatatgacagatggcaacgaacctgaactcatcaacatcgaccttgtcttcccatcggaacctccttggtactgtacctttctcagcctccaatcttggcaaggtgctcgactttgtagcacaaccggccatgcccatcatgagaaggaaggttgtcccctttggcatgacacatccgttgacgacagtctctaccgtagctaatagaagaaacacaattgagatgagcctctgattgcgtagagagagaggggggatgatagggcatagatcaaaggaacgattgtgcaatcaaagagggtatcacccacaagtccgaagagtggtcatgaccgtctgagatacgcgcagaatctcttgtatgactgcatcaaaatctgaggagatacgaagagtttagcatgagctcaataccgatctataacattagcaagttatagtctcaatctgatctgatttaaagataaggagaagaaccaacaagggagcgaagtagagtgtatatcctcgtaagtgagagtatgctctctaacgtcgggcaagacatgcttgatctcggcgtgtaaccttctctggacgtctggattgcgtgtaaggaatctcagcgcccatcccatggttgaagatgttgtgtcgtctccctggtatgtatggagagagaaaagaggtgatcaaaacttttggtatcacgatagtattcgagatctatgcttctgacgtacggcaagaagcaaagtgctcatctcgtccctgatctcctcaattcgaagattagcactcttcccattttctcgctcaatatcccactctttttcgaggaccatttctaacagacaactctctttagtttcacctagccgaacttttctccgtccctcgatgatcttcttgttcagcgagtcttccatcagtcgctctgcttgacgaaacttggccgatctgagacgatagaagaagtgagagaccgatggaaatgtagattcgacggggatagcctagatgatatataacatatctgtataaggatggaggcaaacttattgacatctgacaagtatataatgcgtacttcgaaatacattcgactagctcggccgagtgcgttggtctcgatagggaatcggttccgtcccattttccctttccgttcaaccacggcgatattagcctccagttgatgatatccgaatccgaaagcgatatcggagataatatcctatgatatgtttcacgaaagagcggataagcagcttaggccatgaatcggaagaaagagagcagtaggatcttcttgagaacaaactcacgccagtcagaaaactcaagtcttgcatcacttcaaaacatccctcttcagaaatccgttgaactgcatctcctaaagcttcacgtttagattcccatctatgtatcaaggagatagacagagattccgatggtctagctagctagctcgctacttgtttctattggccatataaagtactcacagattgaacaagttctcagtagtttgcacaatgttgggcgtcagtaacttgagattattttggttcataataggcccgaagaatcttcgatgattctaaggaatagatcataaacaagacagtaagtttaacacagggaagcaacggttggtgcgaaggtaacagaagtagacaaacacaccttccaaactgcgtctgtctcggccaaatgaacaaatccagtcagaatatcgaagtacctcaacatatagagtgactgcctcgctctcactcgttggtagcgcgagagatcccccttgagtatagatgatgacatggttgttcaaaacataacacaatcagcattatctgaacctttatgtaccagcaatgattgatctttgcttacaaggagtgataggcccaaaggccttcaagaggtcatcagatcgtcggaaaattgagtctttcttcataactaggtagttttgtcgaacatggcaaaaaacacctgtcaaaatatgtaatatcgaatgccaggtatcctctaacttactatcttcaattatcatcgggtcgcatatcaccacggccgtattccaggcaagccaatggaattgatagaaacctagagagacgatcaaaaacctccatatcagggttcgtaggacagtcccaacaattggcaagaaaaatcggtaggcgcttacctccgggaaaattggctgcaatgagctcgtagtaatcatgaaactttctggttcgaacgtaattcttgatgattggccggagatctccaaaaaaccactccgtggtttccatatggggaactccaggaatatgccttggcttggacttgtaaatgatgaagcatgcaaacgaaatagcgaggatgtaaatcgcgatccacagcatggtggatgaaggcagattgaacaaataggcggatagagattggtgagatggtagatgggtcacggatggataggtgatggacaagacaacaatctggctgtccaagattcctcttgtgttcttttatagtgcaggctcaagtatattgcacgtgtttaaagaaaagttcaacgaatatggtgtgatggtatctcgtcttgaagaagaggtagtattttcggccaaggatacggcccaagtgaagtgagaaagcttctctgtatcaacccgaagtgaatgtgaagagataagataagagacgggctttcgacacgtgacgtgatgattgcaattacgtaattaggggcgtaaccattttgtgcgtcgatcaccccaatcccagcacgcttgataaccctacccctaacctgagctccttcgtactacctacgtcgttccatccgcttatatctatcgccatcatcagatacatcacaacagcaagtgatagaagaagaggctaagacactgaatacatatctcgacatgtcttttaacgatcttgaacgaggagttcctctcaccacgactaacgcatcctctagctcgaatcaagagttcgacaagcttcaatccagtctatcccttcagatcttcaagatcaacgcgaacgtcaaaggaatcgataaacttctcctaaagctcaatggagcgaacaatctgacgagtaggaatgttcgggacagtctgtatgtccacttttctttttctgttttcacatgccggccttcgtcgtcgtcttggtagttcgtgagcaactcgccgaacgtacttctgtatattcaccaacccttcgattcggtcacccagatccggcctcttagattcaactcgggaaattgtcaagcactcttcatcggaccttaagaagttcaccgcattcccaccgtctcctaatgctcctgtgagtgactttctttgtcatgattcagatttgttccgttctaaaattggccgaatgtatgcaacatgccatgttggctagaataatcactgactggtgtcctatgaatgtattcacttatcgttctcgcactcccaaatctattgaccgcagaatcgaaaagctttgcagacaaagctttccagagagtaccaaacttccatctcggctttccagaagattcagcgaatagcagcagacaagcagcgtctcttggtcgaagaccaacggaaggaggtcaacgagttgcgttctttcattttctccgtctatactaccttgacatcagatgacttactttctatgtgctcatggcgttctctcccatgaacagagaaactactcatctattagacttggaagaacaaggcagcagtcaagaacttcaacagcagcaacaagagcgaatacaagtgtcgtacgtgctcatctccttttgtctatctatcctcatcctcccgactgattactgacacgtgtcgttaatttatttggaaccttgtcgaaccgatatgtggatggtagtcaaattcctgcccatgaacttgaatttcaggaggcccagatcgcggagagagaggtcgagattcgagagattgagtccgggatccacgagctaaatgagattttccgagaccttggcacgatcgtcgtcgagcagggtggaatgattggttcgttctatgttagctgaagaacgtgttcggacagatgggtggattcctttaggggttaaaaagaattaaaatgctgaactgtccaaacactttgacggatacatccaatagacaacatcgagtccaatatcacctcggtcgaacgtcacacttcggctgccaaccaggaactctcgaccgcgcacgaataccagaagaaagcgggcagacggatgctttggcttatgctcatcttgttaatcgtctcggctatcgttctgacagcggtaagtgtgctttgccagcttcgcagcttaaacgtcagaga

SEQ ID NO: 2860 - DNA, 10700 bp, Xanthophyllomyces dendrorhous
cgtcagagatataatactaaattcgcgctggacttgtctttgaatctcgttctcagatcctttcttgaggcttgtaaagtcatttttgtgcttcagattaaaagcgaccatcctcagaaccccttcatttcttttactcgatattctgatctagctttgtacttttcactctatagcaatctcttgtttgatatgttcggtcaatgttcctcacctacgtatctttggataccatcatcgcttcacaagagatcctaatcatctctcttcccttgctctctttgcagttgttcaagtcgaaacgacctcttgctatctatactgccatcatggactccgctcgtgttgtactccttgtcttctacattttgataaatgacacattgcgttacatcttcatatggaacatctttggtgcttaagcgacctgtccgccttgttgaaagccctggagaacgctgttcttgagctgtcattaaacagcaatgtgactgtcgagtcagagttgatcgaacatagaaaaagagaagagcagacaggatgatatgggaaagaacctaccactggactgatctcttttccatcgtccaagaagtaaccgatcataagcaactttccaattgccttctcttggactttgcccaaaatctcgccctcaaactcgaccacaagttctcccgaggagagtctaatcaacaagagttcctctcctttagcggctgatcgtttggggaacatcgccttgaaaggcgttaaagcgctctcgatcgcctgcgtttttaaggtggcacatctgtggatcagtatgatacatatctagctcatgtacgatcaaaactcacctcggcttcggattccgacatttgactagctttggagaggagcttgactctagcctgaatggcacgaacgaatccatctcggagatgatcaaatccggtgtttctcgtaggaactgatgacaacaacgggcggatacatgtaagactggaagctttggaaacgacacatccaatggcatcaacgtaccgattcgtaggacacaaggctgatcggactccaaaaactctttcatcgacgcttcactctatgcgaaaccaagcccggtcgacgagaacagatacaacacaaaggatgatacaggccaaggacgtcatggctgatcagaacttgatactgaaatcgaaaaatgaaggatggttatgtggaaaagacctactcccatcccaggcttctcccaccaggtccccttgggcgcatagaaaccagcagcatagaccttgactctcaagaaagacaccgtacgaactccaagtccaaccagagccagaggggcgctcgacggactagccgactggagagattttggtagaatagaaagagggaaaggaagggatgtagagctatcaactagttcaaacagaatcagcaacaagtggaaatcagatgagcataaaaccaagacgtggacaaactcttcacattagaaggtggaggtgcctccagctccaacaccgagagaagtcgagtaggcgcaaattcgaaatcttgatcaatcgtacagatgaacggcaggatgtcagacacagaagaaatagatgaacaggtctttttcgacgaccagaagagacgaacccttgagcgaactaccgacgatccagcctgttgtagccagagctgccagtccgatgactgctccactcggtctgacccatcttgcggccacgggtgcgactcgaggaccggcaacgtagctcagcttggaggttgatcgaagaacctgtctgatcatatttgatgtagatcagtatgaaggtaagtgggtaagatctcctagatttgtgccgatctatccgatcagtccacagatagatgtggtgaggttctctggcggtgagacatttcgttttctctttcgtctctttccttccatcaacgatcatcctgcttgccctcaaccaaccctcctttcttctcttctcatcccgttccgtcttcaatcttttacctgagcaacctttccatgtccgttatggcagctcatccgtcgttgcctccgacaccttcaaatgcaggcaaacacctcttctctacgcgacctcgccagcaacctccccgagcccgttctgcctccgcctctcctcgacccaaacaatctccagcaatcggaccatctttcccttgctcaccactagctaagaattctcagtcccgactcagtcagtctcggccggtcagtcctgtcaagcaaacgtctgaattgacactatggccgccaacaaccgctccgaacgcggatgagcgtcggagtcgaagccgtggagccaagaaaggagctagaggaaaggaaaagaagattgtcctcgaagaagcattcagctccctagagctcgacgctggagtcccttctgaagcggatgtttgggatatgccgatcaaggcgagcggaagagatgtccttacggtaaagctttcatttagttctctgcactgtctctcttgagctcatccattcgtccgtcgtaattcatttcattcaatctatcttcagtggcagcaaacctcttcttcatcttctccctcgaagcttccttcttctccacgaccccgagctgctagatctcagcagggacagccggtctcgacgtccaagtcgatcgctccgttcagcaggtcctcgaatcaacctctcgcagggccttttcatcacgcttcgtcctcatcgatcactgcagtcagctctaattctaatctgacctggcaacaagccttattcgagacggcccaccctgcctcatctaggccaaagatccgacgccgggcatctctgggaaacgaatcgggtaccgcccctgttcatcttcctagattgggcgtacccgtcaagtccaacagcatccaccatagctcgtctatgaagaacaagcgcgtatcaggctcgcctcccaacaatggggaacgcgtgaacggctcgtcatacccggctggaacggtcggatcggattctggaggagtcagacgccctgagggcgaaatcaacacctatgctggaggaacgttccagaacgcccccttggcaggggacttgcccaagccccgatttggtgctcgcccctaaggagttggagaaagggaggccttcatttctttggaggagctccttactcgtgtggccgaggacagaaagagcgatgagggatcttcccttcaatcttttcttgaattgtccatcacgtctggcaacctttcctaaactgctccctactgcttggggtcatctcccgagtacatatttctcgcccctcttctctctttctattcaggttcattttcttcggccagcatcaactttggccttctatttcttcttttctctcggctcggcgacctcggtttcaaaacgtaccgaacgccaaacaacagctgtttctcacgaaacagtcttttctcggccttttctatcatactcgtctattactatcacctcaactcccttttgacctacactcgcccactcgttgtcctcttgacagaactgtcaaccattcaaacgcatctttatgccaccttcgaccaaccattcgcctctcgtttcgcatcataccaagcttggtgcttgacggctacaactatccatagtctcactgtttcttgtgtgtgcatgctctcgaactagactctctctctcttgtcctcctcaatatgtaacttctcctgcgttactactccttctttgaatcaattctatctgggttttttggtctcggtgtgttggctgctttgcggaaaaaaagaatgacttatttccaaggtctctcgctgtcgctttacttgcctcgtcgtaagtcctgcctatcgtcgtttcttctcgtgtgtacgttcgacctgactcatcgtgttctactcttgctttgaactgcctgttcgtgatcgttgcctgactcgtacagccgtcaccggacacgttctataaattctgtccatgtagagatgctattcaactagcattaattgccaatatcaatcgctatcatcccctgcctcctacctttctcgttatctctgccctgttctgttctgttctgttctgccctgcgcctgtctcttctccttcttcttagtctcttttcgaagctttgctctaagattgaatctgatatgactttgcggtcgtttatacttgaagtcaaccttctgggcgtttgcctttctcttcgtgaagtgatcatcatgtttggattatagtttcgtccagtagaaaaaaatacaatcgatgattcatgctcaaagtccgtgagaatgaactatacgtaccagagacagttctggttattggaaagaaggtcattcgtcaagggtttcacgggtattgatctgctgaacgcgtgagcggcccccagtcggagagatctgtcggctgagtccgtaagaacgatgtgaatttctacagactttccaccatctctctctcactcacccgtacacacacacacacacacacacacacacacacacacacacaaacaatatcatcaacatggctaggatcatatcctctcctccaccgagcaggtcgacatcgacgccaacatcaacgctcggaccagacagccaagacaccttcaacccataccctcatcagaagacattacctggttcggcgccaggcgaacaaacgtatccgaaggtgttggacccgtacaccggtcggtatgtatctacgaaacctgcgaacatgccgttcttggcccaccaacggtacaaagcgtctaaagcggccgccgatgctgccgctgctgccggcaaggatgagaacgcgaatgggaacgacggacggactcgatcagaaagccagacgacagagaggggtatgctcgggtggctcaagacggtcgcctgggcgatcatgttggcttgtgttctcggccggttcatcactgggagtcccgtatgggggtatgaggatgagattcgatctgtctggaacaagcatctctggaaggttcgtccttcttttttttccgttgaggagggcagagggaatgctgttcaactcggtcttattctttcttcttcctgccttcattcctcttttcatcgaaacaccatccctgatggccatggacccaatggtttctgaacattttctgcgtttcttttccctcttgctcttcgtctcttcctagcctagacaaatccagttcaacctggaccaactgtccgaattcacaggcaagaacccggacagaccgatctacctgtcgatctctggaaaggtttacgacgtctcgagctcggctaggatctacggcccgggaggatcttacgggatgttgtatgtccagtcaggaagagaggagagagagcaaggaagtttcatttagtctttcctgtgagctgacagcacgggctttttcttctcatttcctttctctttgttcatcctcaactctgacagaacagggaaagacgcatcgagagcgttcgtcacgggctgcttccaaaaccatcacctgaaccatgatctccgtgggataggacctgctgaactcaaggtgagtacactgaatgaggaaacgcagaccagagattcgactgtgcctcttgtgatcatgaatgatcgacgttctcaccgatgtatcctttaccattggatcattcctcccccctccccccctctacgggtgtagtccctgacgaactgggaaaagttcttcgccaaccacaaacgatacgttcaggtgggaaccgtcagcctgccgccggtcgaccctagggaaccgatcccggggccgtgtatagattctgcgccgaacccgcctgccactcgacggggcaccgacccagccgtccgagcgccgcctgtcccgcccgtccaaccggaacagacggacgagcacgacaaaagggccacactttcggaacacaaagagctatagaaaaggacggtctccatgctttctatcagatgaagctctctggcttggcgcgccccgcgttgtttccaatcagagaaagaaaaaaaagagaaaaaaaaagaaaaaagaagacatctgatatcgaccagaagctagttatattcctctccctctcgctttgtaaaggatgagaacgagcgagatgacagaggacgagctagaaaaagagattgactgagtgcaaatgtattcaatcaaacaagaacggctgaacgaaagaaaaagaaagaggaaaagagtggccacttcttgttaatgatgatgatgataatgatgatggtgatggtgacgatgatgatattgatgataacaaaggtgacgacgaagagaaaaagcccggtaggaagaaaagatccaaagaaaacaggttttgagagatgcgcgcatagaatgtcaatgtaggtttacaaattaaacaaacaaaaaaacaaaaaaaagaaagaaagcaaaagggatggttaggaaaagcaagatcgatcagaccacgatcaaagactcggctgaaagagagagtagaaaagtccgaacgtggtgtatacgaatgaaaacagacatgatggaggacagattgtagacaatacaacttggagagaaagagaaacattgtgagaaaaagaccgatatgtacaccctacgaaagtgcagatagcaaaagaaaggaaaaaagaaaaaagaaaaaagaagaaaaatgcagagaaaggaatctccgagctgagctgtctaaacggacaacatttagaaacccgattggcccctcgaccggcactcaactttgtcgtcgacgacaggaggtcgatcggtgtcccaatcttcgaccccacacaccaagtcatcaaactcatcctcctcctcggccagtcgtctgtacctttctactgcaccttcctcctcgtcctcccaccggtcaccctcttctcccgcccggggtccgtccagggtggaaagtgtgaactctgtaggatcggacacggtctcatcttcgaaggacagcccgttcggtctggtattcttgtcggcggaaaaccttcgggcgacagcggtggaaagtccgtttgctgttccactggcagcaccggttccaggcagcagatagttgttgttactaaacgaagaatgacccgagaatgagcccgacgggctccccacacgctcgcctatttctcgtttgagttcaccgagcgcgttggccgtggtgctcatcagcacaggcacccgtttccatgaccgaggagagatcgtcgggccgtctccgttaggataggccgggatgatcggccgggcgggccgaccggtcggatcacctagcgaggattcaatcgccttttcgagcaaccggtcgaacgatcctccgctatgggaatgggagccgacaggagtgtttcctctggacggatggcttgtcggcggggtcagcccgtcggtcaccgggtcgaacggatagggcgaggtggacggggaggtcaacagaacttcgttccgaacaaccaatttagacgtcgatgggagagatggaaagacgtggtggaccgaagggctgacaggaagaggaagatgatgaaactcaaactgatgagatagatagagcggtccggggagaatcttgagcgacgaggagatcgtctgaatctctgcacgggaaagcgacctaaagttcaaggagacaaatcccgaaagatgtgatgagcattttccgttcagccatcacgagcagtagaggaaaaaaatgttgaaaaagaaaagaaggaacgagggaggttaactaaccatggcaccaagccctgtttatgattctccgccagactaccttgtttaccgtctggttgggttgattcgaaatgcttcaatccgatatcctcgatctcagacccgactgtgccgagctcccaagcggccccctcccaggacttgacctcggcttcgagcccgccgatgttggaaccagaaacgatgccctccgctcttttcttggccatcatcatcaggctgagcgccgacgacggacctgtcggacttttgggggtcggactgaccgatggggttgattcgaccgacgtgggtaaactcacaggacagaataagactttctggagagagagcaggccgacggtcggatagaacaccagtatgtcttgtgcagtctcaggcaggcccaacggaccagaaacggcgtctgcgtgttggaaccgaccgggtgaaaggtctgcaggacggctgatccgaccggattctaccgaccggactcgttcgggagcgaggaagcagcaggtgacgggaggcagggagaggtcaccgacgttgggcgccttgagcccggtgctcgagagaagggcggacggggcagcagcggcagaagacgcagatagctgggagagctttcgaagagaagaagagaacggaggagagctgggcggcgtgaggcagtctcccggaggaagaaccttagggatggacattggggagggtgtcgaagaaggaggtatctgtctagtttgatggatcctcaaagcgggttgaacggctgtcgagagaggttgctgatgatttggcaagcaaaggaagatcagtctaggacgagaggaagagaaagaagaataagccggatcgactcgagcggcccaaagaaagaaggatactaaccacgtcgagagcgttgaggactttgccttgcctgtggcctgtaggaggtcctccgtacgggttaagagggtagacgtctacacagaagaagagagagagaggaggaggaggaggagaagagggacaggttccaatgtcggccgtccggtcaggcatctttacgaggacgacagaaagagagacagcgatctgacttacggagcgtgcctttccctgtggcaactgccacccatctgccagcgttgtcccaactgacggacttgacgacggcttcactgacgcctcttctgaggacgtatcgttcccaaacttcgcccgaggaatgtcctggtgccgggtgtggggactttctaggcggtcggatctcgaccacggcaaaggagcacgagggggcctgggagatgagaagcatctgactgtttggggagaacgacagatgattgatcggctgggccgaacgggcggtcggagatgggtaaaagtgaacgagaggggatctgttagccgggagggaggaaagggtgtttggaccggtgctgttgaccgaggcagaggagagtggatgaaggtcaatgatctgaacagattgctctaccctcgggaacgaagcctgttggccgggatgagattgatgcgagtgttggtgggatgagaaagcatgttgacgggactggaaagagtgttgaggagactgataggaatgctgaccggtcgagtaccgatctcgtgaggaggaggcaggcgcagggatcggcctggacttggggatgtgaccgtccggggtatcggctaacgaagaggaagaggaggaggaccggtcgatggtgcctccggtccattcaccctcttcgtcgtcgttggcgatcttgctaggatcttcctcggtctcgatcaccctgtcatccgtccgacctgacctcgagcgagatgaatctgccgagccccatgcgggtaggttgtgggcgagactcggtctgggacggtcgtgaaggatggtctctgttctagtgccggaggccctttggaggagcggggcggaaggtccgggcggctgggtggtagcaaaggcaagcagcctgtgtgagagagtgaacacgggtgcttgggacgagggataagatgcaggaaacgtgatgggtgggcatagtgtgtggaaggtggcaggatgaaagagatgaatagctggtggatcgagtgtgctctgtaggtgtgggcgcgggtgcgggtgcgggtgcgaatgtatccgtgtaaagacagaaagagaggaagaataaggggtcagcatagccgatggctagagagacacgccaagggagagtaaccaagctaacggaccactacaactgcatgggatgagcgttgaacgttgatgatctttccatcgaggatgattcttttctgaaacatcaatgtctctgggtgatgtagcacgatggccgacacaggttgattcttgtctggcgctggaaagtggagcctgtgaagcaggggaagcagaagatgagggaagaggatagacaagaagatcaaggtcagaaggatgactgtctgtagaggtaagagggacgacctcttagaggtatagaactgacgcgacgagaagcctatgcggctcacgaatgagtgttccgagtaggacgtttcctttgacgccttgatggacccagtcatctttgcgatcagaggtgatggtaagaagctcgatgaccgagtcggtttgaccggaagatctgccgaggggtgcgtcccagatggtgagagatcgggcggtagcggtcaggagacatctatagcaggggaccggatgatgagggattggcaagaggacggaacatgaaggtcagagacaagggacggaggggctgagccaaggaaagtagagaagcaaggagaacatgtagaaaaaggccgtaccgttggggaggcttgtttttgaccaagggcacgatatcccacccggaccaaacgatgttgggttctcgatctgtcctgtctgaccggatcgagatgatgtctccgagagattgagaggatcggacgaggtccggtgtgaccgtggacgacgatgatgatgctggtggtggt

SEQ ID NO: 2861 - DNA, 1382 bp, Xanthophyllomyces dendrorhous
tggtggcggcggcggaggtggtgggtgtgcgatgagggacgagaagtgatgaaaggttgaggtgagggcagagacggttgtgtgtgagacggcagctgctgccgactgtgcatttctagcgaacgacgtaggtaccggcggttgtgggctatttcgacatgtgtgtgtgtcaggacagatgagcagagttgcagaaagagcgttgaagacaagacttaccttgtatgtgtggctggaagagagcaggagagggagagagaaggacatgaaggatgaggccgagagatggacgacgatggtgacgacagaaacaacaacagaaaaaaaaacaataataatgataacgagaacaagatagaaccaaggccaaccgaggacgacgaccggacacaacagagagagagagagagaacgagacatgaacgatgagtgcttctgacaagggcgagagaccaaacgaaaagagaaagaaggacgacgtacgattgacgacctgacgttctctgtctgactgtctctgtgtgagcgggagatgactgacagggaagcgatctggaccggtggtggagacgatgctgtcaaccattccggccggatcttgaagataactcggttgttcgaacgacgtggtggaagcgggagcgagagcaagagcactacagacagccggacggacggaagatgttgtgcaactggttagattatccgaggacgacagagaggacgaggacaccagagagggttgatcaaggagacgatgatgatgatgctgatgatggatggaggcagtagtagtagaagtggtagtagaagtggtagcaggggtagcagtggtagcagtggtagcagtggtaatagcagcagtattagcggtggcaggagtcgtagtcgctgtggcagtagagggcgtggagtgatgcaccggtggaaggacacgcctgtggcgctttgtcattcgaacaggcacacccgacttgatccgaggggggaggggggagagggcaaaggaaaggctggcttgtgtgtatgcgtgtgagtgggagtgtgagtgtgtgaaagggagcgaccgattgaccgacagaggaacggatatgcagacggagcgagggaacgagggagagggagagtgaagttgaaagtgagtgaaagctagtgacaggacagacggaagagaacggtgccttgttcctgatggggtaagggacactagaccgagcacaatagatgacgagtggcagcaggagcaaaacaatagagagatcacacagcgcgagagatggatagatagacaggtagacaggtagacagatagataggcaaacagatagataggcagacacacacacacacacacacacacacacacacacacacacacacac

SEQ ID NO: 2862 - DNA, 9976 bp, Xanthophyllomyces dendrorhous
cacagcggtacactcccagccggccacacccaggaaggtcagattcaacgtcggcacgaaataccaggtgctcgatgtcatcggtgaaggcgcctacggtgtggtgtaagtttgtttcttgctttgtttgcttgcttcctctttctcagacaatccttctatgccatacttgcactcacacattctcgtacacacattcacattcacatacacaaactcacactcacatcctctctcacactcagcgtctctgccctccatcgagcgtccggcgcaaaggtcgccatcaaaaagatcgccccgttcgaccactcgatgttttgcctgcgcacactcagagaactcaagctactaaagtactttgccgagatgggggtcggttcacttcctcacttcttgccgctctctctctcactctctctcacacatacgctcatggctgaccttggtttgttctgctttgtttgctttttattcctggtaatctcgtcgtcgtggtcctccttgtcctcctcaaggtctcggagaacgttagtccatcctgattctctttgttttctcttgttgttcttctttcttttgtcttgccttctttctttaccaaagagaccaagaaacctctctttctcagcccctagactgttgtttcccatcgcaaggtttccttaccctcttctttctctttgctttccttcccctagatcatctcggtcatcgacatcattcgcccgtcttcattcgatagtttcaaagaagtctatcgtacgtctcgagtttccctctttcctgttgcaatttctttccctccatttctcacacccctcttttcacactccttctcctacagtcgtccaagaacttatggagaccgacatgcatcgggtcatccgaacccaagatctttccgacgaccacgcccaggtttgcattatctctctttctctctctccctctactcttctcacatacactcacacttctctcttcttctcagtactttatctaccaaacactccgagcgctcaaagcgcttcattctgccgacgtcattcaccgagacctcaagccatcaaacctcttgctcaatgcgaactgtgatcttaaagtgagcattcatcctcggagcttgtctacccccctacccctctttcgtctacctctcctgttttcactgaccaccagtctttcaggtctgcgactttggactagccaggagcgtcaaaacggcagagccgaacggaacggaaacaggtttcatgacggttagcccgttctctctctgttcttactcgggtacagaatttcgatcactcacacacccttcctctctatttccctcccccttgccaccgctcaggaatacgtcgctactagatggtaccgagcccccgaaatcatgttgacgtttaagcagtacaccaaggttcgtctttcttcctcttggcaacccgatcggacagaactaacctaaccttcttggcggcctcccttaggcaatcgacgtctggtctgtaggctgtattttagcagaaatgttgtcgggcaagccactcttccctggaagagactaccatcaccagctcactctcatcctcgacgttctcggcacacccactctagacgagttttacgccatcaactctcgacgcagcagagactacattcggtatgtgctctcctttttcctttatcctttattccattattttatcatcacctgacaattgccaccgatcattctcttttctcccgacccagtgcgctacctttcagaaaaaagaaaccgttcaacaaaatatttcccaatgctagtcctcaagcctgcgattttttgcaaaagaccttgacgtgttggtctcttcttcctttgcctgctttttcccttcctccttggtgcttcctctttcctactctctgtgcgccacttctgacctcatcctttccctttgttccgccgtgcagttgacccaaagacaaggctgactgtagagtaagtgacgagtgggatttcattcccttttcttggaaagctccctcctaaccggcttgctttatacgttctccgcttccatcgttctttcagacaagcgctcgaacacccttacctggaagcgtaccatgatcccgatgatgagcctatcgcgcccccgcttgatcccgatttctttgattttgacattgagtgtatgttttgaataatcagaaagagaaaaaaagacgtagaaatagaagccgcccttcacatatccgttgtgctgaccagaccttatccttgaatttctatcacccacaatcgcacccacagtccagaaagatgatatctctcgggaacgtctcaaagagctcctcttcgatgaaattatgagcttcaagtcgctcgattaagcacttcctctcgtctgctctgtttcaagccgatcatctcgccctccatcactttatcatcatcaccacggtccccgtcactcggtcctcacccgcccccgccccgttgcttttcaaactgttcatgtttcacttggcgtagttcgatcctaggctggtcccagagatccgactcgtccgttcatctgatccatcgtctcacgtctcacatctcgcgtctcatgcttctgacctctttaagtcacgtcctcctcttcaacgattcagtttgtttcccctctctctctctctcttccgtgtgttccacacttcgagccatctattcaataggccttgttttgtccatctttccttttccgatctgtaatcctagacaccagtcccaaccgcatgaccacaacgatccttgatttctttatgtttcgtttctctttctctggctgtgttccgtccgtcgttccttggtattctttttctttttttggggttctcttggttctctctacgcgactcatgatttttttgccatgtccttatttcctttcaacgccgtgaacgttgatgatgattatcatgttgttgttgttgttgttgttgttgttgttctcggatttgatgaacaccgagccatttaagcaaagaacagaaagattgaaaatatgtatattcttgaaaaccaagctagaaaagaaaaaaaaggcgtaacaacaggcaacctccttcttctcggaaaggacacgtacacacgagaagcgaggacgaaacacagagagaaagagacagggaagaaaacaaaaaaaagagtcttttgagacgagaaaggaatatatatatatgatgttgtccacaaccagataacaaaactatatgaccaccttccaagcgaggagaaaaatagccaatcaaaaggcgaatatcctagctccccaaagacgcattccgacccaccgcaccggaagaaaacgttgttagcgtgattcttgaagaacgaaaaaatagataaatagataaaacgaatcaaagatatgaacttacgaggattcatcgtgctgttgggcgtgcatcatcttgaccacagcgtcgaccaccgagaggtctgacgttcaaatgacaacgtcagaaatcagcatcaaaatcacgatctaatcctggatcaaatcgtgctggaataaaactaggatatatatgtatatatatataagcaagagaagtctcacctagatcagcacccatgtccatccccgtcaagacttttatgctcaggtcgtcgcctacctttccgatcacttccacgtacgggtccgacagatgagattcctttgagtttcgaacgaggaagcagagggcggaaaggattgacagtccaaaaagttgtttatagctcttaagacgatggaccaagtggacagaaaagaaggaagaagaaagtagccaagctaggacaaaccctgttcaagtgcaaatccacctagagtcgtgccccccccggaacgaacgccaagaatgaaagatgctctcaaatttcagcaaacttaccagacgagatcacgtttctttcaccctgactctctccgtcttcagtgtcgatatcttgcgacgatactgacctgtccttgatcactagcctcgactacagcggtatccccgttcaactgattatcatcaaaaaaaaatcataaaaaacaaatagcacacaaccctgaagtcagtctttatatctcaggcccagacagctggctcgttttccaagggtgaaagactcacctttataattttgcatgtcaatcggacagtctgccaacatgcgtttcaacatttgagccgaccacgatcgctcgtcagctttgcttgaggttcgaaagtgcactagaaatataaccctcttaccttgcctctgtactcgttcaggctgatgatcaagacgtcagaaatcaatgtgttcaacacaaagaagaagatgatcaataaaaggaaaaattcctgtcagaacgaagtcttgagggaaacccgagaagaaagcaacgtcatctctcacagagcactgttgacccgagctatcatatccagtagcaacgattaaaagaacatggtgtaaacaagagctggctgtcgaagaagaaacccaaacaagtgaaaccttacgggtgttcgaaaaagaagccatgatgaggtcgaagaagcgatgaaatcgagttgatgttcgagtcggaaggtgtgtttgatcacaacttgaagtggcaaaaacgctgtagttcatatatcgtgacgcgactcgacgcgacgcgttgtatgccacatcttacgcgacacacccccgcctttctcagacccgattaacagcaagacacaactgataattcaataaatcttacacatcaccccacagaacaagaagaagaaacctctccaaagacgaagatcaggaaaatcgagtaaagaaaacaaacacgagaaggaaatagatatatctcgtttgagatcaggataagagaaaagatcaggaaaggaaagcttaaagtatggccagcaacaacaacaatcttgcgcccgaggaaaataaagagaaattgaacagacggaaactagaagtataggaagcaaaagagttcgaagtaaacgccgtcttcatcgacgaatatcggttcggatccaatccgcgtttaattaccactcgcataataattcttgtatgtcgaccgtagcccacttccaccacctagacttttttctccagaagctaccactggcgaaacagggtccacagcaggtccaggaggtggagtcgccagcaaggccactggtagtgctaagggaaacagggttcgatagtgcgactcgagagaacaaggtattgtcgttgacgaggtgtgcgaatgtagggcatggccaggcaactctgccccattggcttgaagcttatttaaacgctcaaaccagagagttcgattcgtagcacactgttgagcatatggcgcaaggtcttatcgtcgggatgaatataagttgaccgaataaatataagtcacgttacccctgtgggaaatgtatattatgaaacacaacttacctggcatcacagtggcggcaccatcaaacaaaggttgagtaaaaaggtcgatgaatgccacctgtcctttagcttgcatcgcggcatcggcttgctgtacaacagagactggtagacgtaaatcgagttccaggttggcttggttgtgccattcctctacaagaagagaaattcaaatcagtgagtaggaagagaacgaagaaaattggagacgcaaggcaggagaggctttaccgagtagagcagtcgaccaatactccgatatttggtgaggccgacactatttaccacgcaataaaatggttagtatgagtctaatatcatcagagaacatactgtgaacgaactgggttgctgatgtctgcacatttcatcaatgcttgatgaaaaagaatacgatcccgctctatagatgtctcctccgtggccacctcggtgagtgaagccatgaaggcgaaatgcatagacatatcggtcgccaaaatagtgctgaacaagattttccggaaatcactgaacgtcgtcgagatgttttcgcgagccttattcacttctggatttgatgccaaggcagtcgagagtccactatcgtccgaaaactcggatgtaattggtgacttggacgaaagatgcccaacaaacaagaagccaaagccgtgacgcttaagaagactagcgatgagaatacagtgcatgttttcgagagcagacttgtctccatatactagagataatggagccttcgcatttttctacaagaaaagaaaattttgaaagtcattggtcagcaatttgatgtcaatccgtacacccggtgttatcatgaggaacatcaagaagtcaaaggctcaccaagaatgcgttgctcaaccctgggtgtgctccgtcgtgaccgatagcagcaagcatgagcgttaagatatcttggggtctgaaaacttccgaaatccttcctgttttcttgtccaacgatcgtttccagggtgtcgacggacggtctccgtcgcaatcaaggagcaactggagcggaggaacgagaccaaggtttaaaagaaaggtatacgttgcttgtaggacatcgcaaccatgttggtagttactattcgcggttgaagacatacatccatgaaaaacaggaagccataagcttatcgacgttctgacgccgatgtcgaagaatgaagcgagagcaattgtcagaagaagaactaactggtaagggttgtgcgtgtgatatatttgacggatggagagcaagaatcgtctcatagccactatggcatcatttcaacaatacacagttaatttttcctcaagtatctgaagatgaagaggcagaaatatcatacctgcatcgatcccgagatcccagaccccctctgtcataagaacagcctcaaacagaatgcatgtcgtccgatacaaatcatctccggatagttcgtagggtttgaagtcccaaccagaaagcttctcgatcaaacgtgttctggtgtcttgattcattggccctagcagcctatgatgtatttcgattgatgaatcacaagatcgaatgagtttccagaattagcggtttgagacacgaagagaaaatttcgacctactccaaatctgctactttgtctgcaccctgaatcgtctttttgacctgaaggtgcatctcactgaccaactcgcaaaacaacgcgtctccactttctgctgctatttcagccaccggagtcaagcctccctcactccagcctgcaccaacctccgctccgtccgcaacagcctgtctccacggaccccgcccctgttctgactgttgctccggcaagtaggccgatgagatctccccatccgatccacatgctctcgacaacgtcaatgcaagtccacccatatcaacacttgcccgacgggggagattgtaatttcctattgaacaaagattcgcaaacggagcggataggtcggagatcgtgaagagatccttttggtcaggtcgatcgggtttgttggttcgcggtgtgaacacagtttgccggcgtaggttttttggaggtagttggaaagatggggatggaatagccggcgttattgtagaagatatggacggagacggagaccccgagacttgtgattgagaagcgtgctccatagcggattgaatctcttcagtcaaacgagaagtatgaaaggggaaggtgatcactctatccaccccagccttctcgcaagaaagcaaggtactcggagatagtccagagtcgagggagtatactatgatcgcaagccttgagtgagttttttcacgactcgagactaacagcttaatctctttcaagcactcgaccacgctttcgtctatctctgccaagcctgcaggactttggtcctcgaagcagaccgcggttgaagtagagctttccttagcgttcacattggaggcatggattcgaggggccgggatgtgatttatcggtatgaacgcgacagtcatagcttcttgaggggaggatgaagttggcgagctgacatcggctagagtaattgagatatcgctggccgacgatttaagcagtactacacagatacaagcgaaagaagagcagagtatgagaaacaagagtggaccatgtcagcgacgtatgtcaagtttttctttgagatccaaacccccaaatatcggtaaaattaacgtggtgatatggtatagatatctgaagagaatcagatagactatgagtacgacttggatgggattgaacatctgacattcgttttgtcactggccggtatgttgaacgatgtaggtgacccagtcatatccctcgaagcaacacaacacacatatgaactcatctacttctcgactataacctcaatccactttctttgggtgtagtcgatacaggctgtaatgaaggcatcgtaggacacgcgacagaggatggagacatacctgtgatgcctagattgactaacgagtccttgatcgaacccgcacctttggatgactcccaagtggatggcagataaggactagttgtcggtcgtttactcccactctttttgctcctgtgctgtttccccgactggtatccaaaggcacccggtcctgaagagaattgcgagaccgagggtgaagtatgaggaccgttgttggtagcagctgcagaaaaaactgaaaccgattcgggattgcttccgtcttgttgatttgcgaacttcgtgttaaacgggatgagaaaagcggtgatggatgagaacggtaaaggctgagacatgtcagtctggcgagagaggataagacaggaccaagagaaagaagaggggaggaaagaaagttatgttgtagtagtggtcaaggcaggaagtaataaagaaagaacaaatgaatagatggcacatcaaggtctctctggcggtgagccaatccgttaattgctcgagcgacttgtaatcacccatcttcgacgcaaatcatttgctcatttcaacttcatcacattcgtgatatttgagaaacacatcttgcgcaaacaacaatggtcaaatatctattccatattcattatcataataaaacgaagatgaaatggccatgcttgaaatcagatgagggtgatacccaactaaaggttagatccaggagcagaagtgcccggcaatcattatgtcgctacttggttcaacgatagattatgttgtcagggtttgtttcgaagctcagattctcgacagattatggaagtgccatagacataggcatatgcatggtgatagacaaaacgaaagatgtctcgaatgaagatgacagaatccaagcttgagagaacagagaaaataggaaaagaacaacagtgaagaggaatgcgatgaagtatttgtatctcttcgtcgctcggacataaaaacaagacaggaagggtgtatacagatatcgaaaacaggaaggtaggaatcagatatagtcaaggttgtttgcattagcacacaacttatcccatccagtgtcaggggcgcaggcaagggggctgagtggggatggtactcagtacgcttgagctcccaagagggaagggatcatgcaatattgcagagtaatataaggaaattgctgaagggaaccatgaggatttgacgaggttccaagcttgaaagagaaaaggggagacagctaacgactacctagtatatatgtcattcgagatatcaagccaagcaaacacaagcaaacacaagcaaacacaagcaaacacaagcaagagcgaagagataccaaggaagagtcaagatataaccaagagagagttgagcagtaccaaaagactgttgcaagaatgggtctacattgcgcaaggtcaccctgcgcgggtccaaccgggtcaactcatgacatccagtgtcatattctaaagcagagacgatgatcaattcaaagggagcagaatctaacaagataacctggtagatattgagagtgacaatttctgattcaacatgatcgttattttggtatgatgctatcagaaa

SEQ ID NO: 2863 - DNA, 590 bp, Xanthophyllomyces dendrorhous
aggcagggcggaagcctagtgtaactagcttacgcacggttttagccgacgatgagctgtaaaaataaggaacaaaagaacaaacgtatccggttcatttacgattagccggatacgttcggtggcaaacgattgcagagagacggaggaatcgatcgcatctgcaatcaaaaatggggagtaacgatcggcgttactccaaagaaacttcagagtccgcagggctcccatgttctgctctctttcgagcactagaaagctttcttattatcgtggtaagaaagctttctagctaagagaactccgctgacggctcgttgccgtttgtcgcttcgagacttaggtcagcggtagaaggggtgaccgtgagggaagccggacagaatgagctataagctcagctgtcctttaagagaaaggaacactcttgcgagcaattctcctttctcttaataagtcaattcctagtggcacactaggctttggtgaagctttcctcggagataccggtacaggcttcgagaaagcttctttcatgagcccttccctctatagtctcctatcaagcgtactcttgtacgctagatcgg

SEQ ID NO: 2864 - DNA, 592 bp, Xanthophyllomyces dendrorhous; identical to SEQ ID NO: 1298

SEQ ID NO: 2865 - DNA, 3843 bp, Xanthophyllomyces dendrorhous
actcccctaaaggagttcttctgcctattccgacgacaaggagcctgtgagcagtaacatgacctttctccaggcgaatgggagttccattgcccagtggtccacttcggaactgtctcttcgttctgtgtagccagagagatcgttcctgcttacgtaatgaaacctctagagaggagtcacgactcagtaaccaatgctctgccagagccccaaattttcccctttccataacatgggctagagggtgctttctcctatagtcgaggcttaccaagtaagactaaacgcataggagaacgtaactcctaccaccatgttatgtccgcggaatcctccggactagacgattatacgtgaatcagttgattcacatatatgggatggctccctcgtctagctcaccccgttcagcgtctggttccagcacaaagatctcacctttgcgggtacaccagacgtccatctgtaggggcctaccacgcatccactattcacatcttccttctgcctttgtacccatcctatactcctctcagcccctgtgttcacgacacacaaggagaggagcacaggacaaaggcatcagtaggatgcgtttaatgtctgcgctgtggacagttacggtctagtaagtggaccaacgcctaacacctgcgtgcgcaatgtacaacaggcttgtctttattccgcttaggagtggagctcgcgctcttgtctgcccttgcccttcatccgtcccccactaggcttgcaagcctcttgggatatcgggtagaattacaagcactctttttcgcatttctaacagttcttccgggttatgatactactaagttgtaaccttccatttagaaacgggttgaagttcccggaggctttatcattaaagccacaaatatccacccgcaggtggaggtgcgtctccttcatataatgcctcataacaccagactacccaaatcgtaaagactaggaaacaagatcactcctgattcccctcttacgaaaccaaaatagtcaattttgtggggtgtattctccaaacataggcttcgagcttgatagcccttcagcactggtcctaaccctcgtggctaagcagtatctccagtagcgggagatagagttcaccattggagggcgaataccggtcctttcgtactaggtattcgatgctctttgaaaacaaagcagaagatagaagccgtactgactcacgtcgtactgaacccaactcacgtagcttattactggacgaacagtccaacccttgtaagcgagtgcacttacaggacaagctgagtcgacatcgaggtggcaaacatcgactccgatatgaactctcggtcgatattaccctgttatccctagcgtaacttacttgttgatagcgaatcctctcgtagggaatccgctggtcaatagagcccggtttcccgattggatgaggtatccctctagccaattaggctcatgatagtcttaaccgaggttaagcggctaacccctactccagatggagcgaggctagagccgagagctgatgctctgttgatttccagtcaacgatcatgaaccattgctcgcctttgttattttgtgaaaggcttccgtcccagacaaacctctccgctatcagcctattggatgtatagtcaatagggtcgctcctctagcaagtttctcaggagcgtcctcattaggactccttgctaggctgaatagaggaggcaacaccgattgttgctaatagagagaggtgaagttgctagggtcttctcgtcttgctgcttttaagctgcatctgcacagctattgcgacttcactgagcctattcctgagacaatggaaccatcactacaccattcatgcgggacaccagtcaaatgccaaggaatttcgctaccttagcactctcaaggttaaagcggccattaacgagacccttacaggggctgccgcttgacagcccaagctaaggtcgcgcatcgggcaggtgtcagcctgcataccaatccttacggattagcgcagacctgtgttttaggtaaacagttgcagttccatgtcgtagtccactgcaacccttacggtcctacaaacagatttctctgccgcataggccctaattttcttccacagcttatgtcttgtacttcgagacctaccgttaggcagatctaaaccccacttaagaggtgacccactgcttcatactcactaggttccacaagggatacagctgcctttataggcgaacgtacagactcattttgtcgagttccttaggaatagtttactcaatccttgccttattcaggctgacatccggtgtcggatacggtacgggatctcagtccatccatcctaatgggtcttccgattacaatagttttcctgcaagccctttcaggcttgaagattgctaaggctcatcagcatctcctcccggaggatgccttagaggccgcgatgacgcaaggttggctaccagagccttgcaaaccgctgtgtcttagggcgaaaggcatctctacctttcttacattactcacgtacgcattttcagctcaaactatactccctggggacagcaagggatcgtttagtttgagggctccactacctctagccgtaactgcccacagttacgtacatccccgtccttcgtgggtgtaaatagggttgtgctagtcgggagtccgatcagctccttagtgccttgaatcaggactcaggcgacgttcgaccgtcgggttgttacacccacactatcgtatagcgacttctaggcttaccgcccggttgtcactgcatcggctaagcctctaacttaggagctatacagcatctcgttacccgattggggctgtttccctcatgtcccagggccttatcaccgtgggactgtgccatgagcgcaggcactcgagtttctgggattaccactaaaaagtacctcacggccaatttagaggcaaagccatactttcgggtgctgttactcacgaccgctctgaggagcctgtcgtggagggccagctataacccgatatgattggcttttcaccactttcctcaactctcctgggcatattgcaacatgcgtcagttcggtctttagcctaatcaaggaaagatcattcgggcttcgggtgctcgcattgactatctagcgcaggcgctagggcttcggttttaacctcgccaacactacgttctcgacgcacccattatgcaaaaggtacgaactctagcttaaagctactagagttctgctatcattatcaggctcatcgatctatttcactcccataatgggttctatttcacccttccctagcggtactctacactagtgctttctctccatcttcctcgtgggttacgatccccagtatagaaggcttctacaccttctagacagcgttagcgagctgttgtcaccgccacagggctaataccttctctggcactcttttcgaatttggcgtactcctacgtgagccgcaggagctggtaacggtagtcgttttgcaacgagggctcctttcgtgctatacctattcagagccctgtcaatacagggattcccctactaccgttatcgggttcgggggttctatagtaaacgtagtttactaagggacgccaattggcttttcgacattgtgccgcccatatggagaaaagcaaggggacttgcctgacaacgttctaacttacgaggcattacttcgtacaaggaggcctcggaattgaaccgagaaggccagtaccccctaacgttggggtaggagattactcctcgactaccctgagagagctagtcgtctcaa

SEQ ID NO: 2866 - DNA, 1214 bp, Xanthophyllomyces dendrorhous
aacccagctctcatcgaagataccctcggatcactcgatgtgatgacattcatccattgtgacaccgaggcgaactgtcgaacgctcgcggatgagtggctgaacactctagacgaaagcgaccaacagacttggaggcccatcctcgagaggcaattgtctcacaccacctcagtcaagacagcagggatcactttcccatatctctgaaatacaccatctgtcagccttagggagcaactcaagtctagggtaaccaaagactcagcgttctgttcctcacgaggaacctcacatcatttctcgtggcctcctctccttcctggcttgaccagctacactagacgcaggattggcttcgacgacgatagggtggaactgtggaaacagatccatcaggagtacacaggatacacgctcgacatttactatgagaacaaaggacgggcttgcgcatgccatggagatgtctgcagagacgattgcctctgtgactgcggtctttgtcagaaacgagccgcaacggaatgcgtctgtcgtcttcaagagcgttgctattgttggatctttaacgcctgttgatgtccaatctgtaacccggaaacagaggagaggaggattgaggcagaggagaggaagctggaggcagaggagaaagcagagcagaggaggctgaagacacagaagctgatggagcttgaggcagagcagaggaagccgaaggcagatgagtggaagcttgaggtagagaggatgcggagggaattaaaaaagcagtttcaggcgcagaagtattccggggtccaacaactgatggcagctgcaaagctagtcgaccgacaacaggtagcggcagatatagatgcaatcatcgcggaagctgcaggtaaagtagcggccatcgtggaacgcaacgagacatatactgcggtctatcagaggacggtcatagtcgcgcggcagaagatctacgagggaatatcttgtcggatcaagactttcgcagagagggctgcccaacgaacgtcggatccggtcgtgcgacggcaagggattgcagtcgtgcggaacaggacgattctagagactcccatgcggctgagtctggaggctctgaagcaggagacattggagcggaagagactgtggagtgagatggagtgtatggagaaaccatatgacgtcagatgagttggatggaagatggacagagg

SEQ ID NO: 2867 - DNA, 387 bp, Xanthophyllomyces dendrorhous
gcaaggtgcctccatgacttgagagagagcgaccactgcgtgccgtgctcggccagaccgccgttgtccagagacatgtcgagccctcctgcggtcgtcgagagcagcgtccgacggcctgggtccagccccacgacttcgtcctctggctgcacaccccacgagacatactctgctcggtgacggtccttgccttcgccctcccatctccatccgtaggcgtcgatgccagatgaagacgacatgagtctcagcattccggcagacactccgatgccgtccggactgagcgaccgggcgaattgtcgctttttggtctcgaccttggatatatggaacgaccgcctttactaagtgtcagagtcatcccggaaggactcttctgtc

SEQ ID NO: 2868 - DNA, 33335 bp, Xanthophyllomyces dendrorhous
cttgtggtggctcctcctctctatcctctcctccctcttctctttctccttcctctcggacaggaggggacagttgctcccagagtttatgggagagggcagtgcgctgagaacgaacagatggatcagatatgtcagtcattgctgcagcctttcttcagatatctcctcagatgacttgtcttccttacctggctgatactgatccggctctggatcgtttctccgacgtttgtctccagccaccaagagatgagccgagaagcccggcgcggcatgttcaggacgacatggttctggcaggccgtggtccacgacttggctttggcagcaaccatgctgctcagaaatctacgataatggcaagtcgctcagtcttcgttcgcagtcagctgcatcactgtcatcatccaggagatcactcactttgagtctttgaactggtgctcagcagggaaagaggcgtcgcggaagttgttgagctcttgactctgtgttggcgctccttggtgcaaatttcctccacgcgtgttgaaaccaacgtccctaaaaataaagccgtattgtattggggagattcggtatctcccctccatccgcgcagaccttcgacatgtggatattgagaaggcgagacgcgtcaaatgttatctttcctagccgggcaacggccgactcgatcgggccagccagtggctcaaaggcgagtaaagaaccaaagcctatctttactgtccctgacaccatagggaccgctgacttggcgtggatttccaccctctgacgagggatgtaaaacgggcagaggtgattagatcgccttgagtgcccaacctgaccgcaggctgagcacgtggcagtagtagtagtagtggaagcagcagtggtagccgcaagggaagactttgccgaggcctgagccgtcctcttgcgcttcatgtcgaacacaagaggagcggcactcctcaaggcaactgatgatttttctgatatgaagtagtgttctgatgtgaaggaatgttctgatatggaagagtgctctgatcatctcgagtccgttgtgtcttataagctgttgggattgatgcctccctgtttatagaaaattcttatcattggtttcccctctgatgggttcgactgggtgtcggtcatgatgaacgacctggtgaaagctctatcgtccacagacagataaacagagaaacaaaggaatggtgagacagattgacggagaagatatgcttgatcgagctacctgcagctgatctcaattttctttgagcacgggtgaagagtgaatttccgctctagcgcttgttcccaatcgagtcctcactggtttcccaaagtctcatatacactacccagctgtcacagtgagatagatcgagaaaaagagaaaggcgatgaaaaccagctaaaaatttcatagctcttcggaaagagtcttggaactccgcgcaactaagaactggagggcgttgtctcaagaaggattaacaaactacagcttgaatgatgctaagactgctgaaaaactaagaaagactcctagaattacaacaagcgatgttccacaagctgatcttgtactttgatagaacaacttattacaccaggatcgtatagcatagtggttagggttggattgaggattcgcaggagtcaccgtaagcaggaaaggctttgcttttaattctattacaggcatacaagtaggcgtttcagaccgaaaatacaaaagagaggaacatctacgcagatatctcgtcctcgaacaactctaagctaagaaaagaagtaagaacaatgcgccacactttccacagaccctgaatcctccctcatctagaacacccaacgaaagactctctttccaatcttttccttgctttcgttctcgacctccagggtagacagtgtagcctcatgttcttccacttcgtccaaaccttctccaagattaatttcctctagcttggtgagcggccgtcggccgataagttttatgacagcgtagacaatcacgaacaggataggagcggcgtaggaaaagatgctagaaagaaaagatagggtgatttagttgatccgatgcgaaataactgaaagaagaagggaaaacagaagagacatgactgacaaactggggacatcccaacctcctttcaaaaagacagggtatccgttggaaatcaagacgatcgcggcaagaacaagtgcataccaggcaccatatggctgaaacattgatcggtagggtaatgttgatctatcgatcttctgaacggccatcgctctgtaccatctgatgtgtgtcgcgctcatattcatccaggtaacgatctgggtggcggtcgagatattgataaacctgttatgtaacatgagtgcagtagaggaagatggttagatgatctcgaattatcacgaaaggaggacaaaaagcagacgaccaaccactcaaggactttattggctcgatcggagcattgaagaaaactgaggccagcaaaacaaagcgtagcgatcaaagcgtatacaggcactccattcctgttagtgcgcttgaatagagcgggagcgtgaccagcttgcgcgagaccgctgcaaaggttgtatggacaatgtcaggctatcattcctttgtttctgtatgaaaatagcaacaaagtaagacatactgaagagttcgagatccgcagaagagaaatgcgctgcctgcagagaaaatgctcgttactaagaaattccgaatatgaaagacaacagttcgtaagatacgtctattcaacttttaaagcagtgcgaagcgtactgatcaataccagcgttcacaacggaacccaggtatttgatgtggagcctggtcatagcagctatataaggagatcttccggctagatgggaacgcccgggttagaaggaaggactaagcaatcatcgacgattaacagagtagatgggtaagacgataagctaacctcccgcagagttttccgcaatagcaccgttcaggattttgtcattgtagggcacgacaataccgacggcgagcgcagacccgaggaagctataaatcaatcatcaccagcaagatttggagcccaggtcggtacgctgtctgcattgaaccaagaaaataaacatcaaaaaacttacaagacaattaatcgaacataaaccgatttgaaggcactaggaagaacttttcgaggattgatagattctgatgcctatagaagtaaaagaagaaaggagagaaaaacagaagttgggctcagcgtacaagtggaagaagaaggaatataagaaggggtctgtttgtggaactaaccaccaaagacaaaaggtctggtccggcaatggtaaaagatgctcccagcaaacaggtccagaaccctcgaaagatagccgtggagttgttgccgtagtaatctgagatagggcttgggttcttccagtatctgaagccgtaggcatccttgagaggatttccaccacacattgtcacgatggtaaacataaacagtccaaaaatgaggataatcttgcctgagaatgccgaggtcaaatgagatcattataaggttgtgtatctttggcattggattgaaaaagaaaagatgatgagaacgtacagagaacgatccaaaactctgtttctgcaaagaactttgaagaccacttatgaagcagggaataagcaactatgcagagcgccgggacaattgccggatgtatttccttttgttttgtacggccgaacagagagggagatagacaaaataagaaaaggagaagagaatagaaggaggtgagctagagaccactcaatcaagaagaaagaagaagccacttaccctggaccaataaccaagggcagcatggagggcagtgatctcgaaacacagcagggagctcattgccaggaagtaggtccagccggtcgctccaccaaacgcatcatctacataccgaccagcgaatctaatgaaggacgactcgaccggcagctgacagaccatctctgcttgaccttcgttcacgctgcgttggtagcaagggaagaaaagttagagaatcagctgatcgattttgatttgctgaagtcatacataggaagaagaggaaaggcgctgaccagaaaatgacggacgtccataccaggaatcccaagagaagcatcaatggccctcccttgactgagtagatcggagaagcaagacaaagggacattaaattaatgagcgcatcgtctctggaaccaaacagacagaggctgatctcctactgagacttcctccaattgccaggctgaaggaccaaattcattcagcatgatttatgagccactacgaatgcgcatggaaagaacgggaaacgcaagcaaggacagaggagaacgaacaagacgtatgtaccaattgttccaccaatggcaagaaacctgatctgtttggccgtcatcactcttctcgtatggttcatctgtctgttcgatccaccttctagaccttcgacctcctgaacgtccaccaaggcgacgtccttctgagattttagttcatccattctgattatggggatttcttctcctattatcgaagagaaagataaggaaattgggtagaaaggacttgtgatgtgttagagagaacgactattacggatgaatttcttgatacatcgtttatatattgggaagctatctcaggccgaggaaacggaagaggcagagtgatgtccgtctatcagtatcttgatcgaacctcgattgtagcaatcctgcaggttgataaactgattagaagataggatcagattcttgataatatgggtctgttagcgtgctcggagggtgagactgagttccaagataagttcgatcaccgaacgagagggccaagaacgaacggaatcaataaagtagtgaaatactttgattatcgcttccggcgcaccgcgtacttcacaatcatagcatggggagccgtcgggcggatcggctgaacgacaaatgtagttgagccccggacttatctttcttcaacttgcgaggctcaacgtcttctctcatcttatctctctttctggttctttcgccattgcttgacgagttctctcagaggttgtgtgtgtgattgtatgaccacatgtctgtccctcgttgctgactgatcaccgttcaactctcaagccatcatcgatctccaagaaagaatcatggaaacataaaaagctagggagaaaagcgaaaaaggtatttactttctcatccttttgaagttaaactacatgtttgattgtttttgtgtctgtctcttcgtccgttctgttgttggttcgttcgttcatttgttcgcttcgcatcggttcgatcctttgcagacacagttgctcttctgtcttcccagatacatctactcttcgtcatcttcatcatcctcctcggtgatgtgctgttctcgtatgaatgaattattcagtcagtgacatgtcagcttcgaaagacagagagaaactgagagaaactcacgtcatacaagggctggacactcttaaggaagaattccttgccctgtggcttagcacccttatcgaaccagtagatcaccgcgttatcagttaccaactctgcgtcccatgcaagctgtgcaggatataagatatggttgtgaagatgtccgaagttgacggatatgtttataggaaagaatcgaaacccccttgttagcatcgtctagccaatcttgccggacataattcaaatacagtcaaaaacgaacccggacaagagaagggaaggccttcatcgccttctgctcgtcataacagaatacctggagggtctgcaaaaagttgacctgctccattggcttcttgcagaagtttttgagcgccggtaagaagagctgtggaaaagaacgggatgtcactcaaaccgcctttcctgacatggaagtgagagacgagagaagaaagaaaagacaaaccttgacccggaggacttggtctttggaaccagaccactcgaacgtagacatgaagttgttccaaccgatcgtcaagatgtccgaggacgaaatcgaatgctcagcctgctgagacgtcaagtaaccaacaacctaaatagatgtgtgtattttttattatgagcatagaaagtaaacgatcagaatgacgctttcaattgggctaacttgacgaagagcagaatcaactcacgttctccttccattcttctccgaactcctcttcctcttcacagtttcggacaatccatcggcccatctcctccttgacaagcgcagtctgtcgcttcgagtaccattcggccacctgaggtaacccttcagccttgaaatgagcctcaacgtgggccctcgaacgctggttgacggggaatacatcggccaagtccttgaacgtggtcttgagcaaccgaagcaaatggtcggatgactgagcgctcaaataggccctgatgaacgaagtcaagaaagaaatcgacaccgctgataaaagagatttcggacaagattgagtacgtcttctacagaactgcaaggtcataatcttttactcacaatctttgacgaggtgatccttggtcagattttgaaggcactcggacgaggccatgccctgagcaataagtagagcggcggcatcagccaattgctccctctcgagcaaagaccactttgtgatgctgttgtgcgtgcagaatttacaagacaatcgtcagatgaagaatcaagaagaaaaaggccagatgaaaactgagatgctgactattggactaaggcgggcaaaacattcttctcgaggggcttctgaaggtatttgtatcgcatgatgacctttcggaggacctcaattttgagcttgatctcctccaagagagcctttgaatcatgctgagcggccccctgttcaggctcggactcatcttgctgagccattaccgagaacgttgatcgcttctcgagctccttgtcgacgtagcttcctccgggttggagaagaccaccgacaaggacgatttcgaacaactgatcggcatacttcaggtactcgagcgtcgacccagcggtgatcagctttgtggccaaggtgtcgtagtccgtcggaggaatcgggtggagaagagttaaaagagcatctcggaagactgtggtgagagatggaaaagtcaaacagattagtaaagtttggtagttgtgatgactagtcttcgactgttttccttgttttgtttgtaactcggtatgcaaaagttgcatggaaacatcaaacacagaaactcactctcgggttcaaactttgcgttcgcagcggtaacacgtttacgttgcttgatacggactccagtaagggagggctgtaagatatggttcgggtggtgatgatgatggaccaagtggatagaacgaggtatgaggagaaaaaaatgaatgagacgatcgggacgcagggccaaagggtaaaagttgagaaactgacgtaccttgttgttgccagtagcgggtgttgaggtggtaggagtagtagactaccggatgtaagaacaaagcgatattcagatgccattgcagcaaagcaaatggtttgtacatggattggtcgatagtcaacgagttagtgagagtgctcgtctgtgatccatcttaaaacagacacgaaagagagtccaacgcaagggaaacaaagcaagaaatatgaaaagactgaccatgcaccaatgagggaataggacctagtagaagaaagagagttagagagagtgatggataagagttgtttcaaaagaagcagagagtggaaccgaatgagaagaaggaaaaaagagtcgaaatgtttctgatggagtcgaatgaagagtcgacgagctggttaggtagaagctacataagactaaatgaatgaagtctcgaatcatatatatatgtatatgacgcctacgtatctcctcggctgaagcgaagttcgcctaggtgcagagagggagcaatagataccccagcataaacatccataaacagcatacagcgacaatgttgcgcttgatatcaaggaccagctggaagatcttgtgaacgagatgagatagatgagatttgtcaaagatgacatgagtgacatgagtgacatgaatgacatgagagtacacatcacaggcagcaactgtcgaatcagatacaaaggcagcataaccatttcgttccttgatcctcttctttctctcacatcgaccattcaactcgcctcgttcattcacagcctctttcggtttctccgtcgttcttttcattcttgatctttctctttgtccttgctgttcattccttcccctcaccgccaacctccttatcctctaaatagtcactgggtggtcctctgtttactcgaagtctcactctccgttccacccgacttggtacacaaacgatgtcacctccgaatcggtatcaactcttaccacactctgctcttcctagctttccaatctttggtcggaagaagcatcactcgttagcttccatacctcgggttcttcttatcctgagtctctgtgtcccagtcatcgtcatcacgtgggtcttctataaactcgccctggtgtctaatgcgttcaggacatacgagaccaacccgccggtattcatcgagcccttcaaaggcaaaggtaaagaggttgagagtagtgtaccggtgttcccgagctgggtaacttcccagatgaatagtccggacaccattctttggaacgtcaagaaggagctatctagacgatacatcgagatcggtcttccggtacgtccattactccatccgctctcaaagccaagactgtgacgatatggacataatgaactgactcctttcttgctatctttctatttctaacttgtttcccttcttggataacaccctgtacttatatttcttcccctctctaaactgacaggatctcactgttggatgcccggccatcagatcgctacgatcagacgaatcaggttatcttgaacaacgttattcccacttgtttcctgaaacagcaaccaatcctacctcgccctacatccatcaaccccagggttactttattgctctgaatcttttcaactcgaaagcggtaatccctcatctgttcagtaccctccttaccgttgccggacttcttggtccgtcaaatgttcacgtggccatatttgagaacggctcttgggatggtacaccaacgttgctcgctcattttgcaagagctctctctgcgctaggttcgtctcagcttgagttttcttttttttctttcctcttatctttttattttccttcttaatgcatgaattgaagctcgactaacttctcaatatcaattgttgctaaacgtaaacaggcgttgctcatacgattcgctccgattcgcacgtcaccgactggaataacgtcgaccggatcgctcaacttgctgaatacagaaacgttgctctcgagcccgtgttcaattactcgccctccaacccgcccttgttccaagcacacaaagagacaaacctcaccagacatccgatcttgccctcggacgtcttgttcatcaatgatatcatcctctgcccagccgatctactcgaattgttgcaccagcggcgtttccaaggcgcaagtgcaacctgcggactagactggagagaagctccagaaggaagtatgtggaggtggttgagaggttggttaagcaagaactataggttttatgatagtaagtccatcgccacactctttttgtatacttttatctatctgtgtcttgtcgactaaccttggaccatacagattgggttactcggtcaatggaaggctttcctctccggcctcgggtagatatgtttggcgaactccgggatggcgttcgtgaactcttccactgggattctgatccaacatatctcatccgatggcgtgccgctatcccgctccccgtctactcttgctggaacggcatcattgctctctccgctcgccccttcctaccacctgcacaaggtggacactctttcaagttccgaaatgggcacacagccgatggcgaatgtgccgcttccgagtgcaagctcatcgccagagatttttggggtgtaggggagaccaaatgggtgctcgtccccagggtcgcagttacttacgaagaagaagggtacaagagcgaatggatcgagaatagagtccgaagaggtggggtaccggggatggacaaggatttgaaggataggcggtttagacacgcgcctagtacggcaatgccgctagaggaaaagattgattggagtatggtcaagaacccagaaagagtcgtctgctttccttatcatgtcggagacagattagaggtttgtcgtgtcctatttccgtcttgttactgacgtttgtactcgatcaacggcgttctcatccttatcattctctgtacttgtcttttatcgtgcattcagatctggcccctttaccaagaggtatgttttgctcaaactccaaacgatatttttccatgcgtattaactttgtccttctttcttattcctctaacagggctcatcgatgaactcatcaattcttcatgactttaaccgaacgtcagctcatgtcccgtgggaagacataatctgattcatctgaccgccaacatttatcttttcaactctggtccttcctcattccgggttttatttttactttttactatttccactgtctcttctctcttcccagtcaacgtttcaatggtgcacacgtgcggatttgtttctggtcttctcgttcatctctccagggtctcgattgtcatgcttgttccactagccatgttttcattctatatcaacatcttttcttcctttctatatatttccctctcgtctgtctcttcttcggtcaaaaaattccttttcctccctttcgtccttgttccctcctttactctctttgtgccccaacggacgagatatctgcttttgcccctaaccatttgtcaattagtttcttctgtttcttcctgctctcttgatcacccggtcacctttttccttagtcgacgaaataaccttcttacgactgcaagcgtcctctatttatccccctctttctgcaacctttgagaatctaaacttcgtcttcttttcttttcactgtaaataatacctttgagttttgaacccggttcatctgattgttagtttgcaggcaaatgacaatgatctctttcttcttacctgctccgtcttgcctctcgctctttcctcagaagcccaggcacgcgcctagtgttataatagacatcacatcacggcgtaaccaaaaacttgaacagagaagaagagagggatagaatggagaatcaacctccaaacctagctaatcgaagagctcgaagttgggcgggtgtcaattctggttcgggtgatggttgtttggttcctcctccaccttcaccatcatcaaaatcctcgtcgtcgtcgtcgttgtcgtcatcatcatcgttgtcgtcgtcgatgcgatcggtaggtttattgggttggctgagctgttcctcctgcggttgcggtcgtgacgggaactgctgttgggcaacgagaggggggacgggtaagacgaaatcctgaggtaaaccttccatcgaagctttcaacgcagcctggagctgttcgtcctcatcatcataatctctgtctctctggtcatttgtgggtcccccgaatggtgatggtgtggacgtgaacgtggatgttgagaaagtagtgggagggtcggaaaagatatcggcgtggtcgtcttcttcgatttcttcatcctcatcctcatttcctactagtcctacctcattctcatccgcatcgtcgtcgtcgtcttcaacgtccatcgcatttcgagctcctctatttgctcgggcagctgaacgatctcgttcctcttgttctctgattgagacttcgatcgcaagtctcatcatttcctcatcttcatcatgcctcggacgattccttgtctttgcactggtccgtccacttccacttccacttccactggatcgtctgaacgtagaagatccaatctcgcgaatctcgtcatcatcgtcatcgtcgtcgtttatattcatattgactccgaccaagttgggaagaggagaagtcgaagaaagcgcgcgtccgaatggtgtttcgagagatgacgggtcggcttgtcttctccttctatttcctctggatgtaccttctgtctctgactctatttctcgtgatcctcttctcggtgcgataggtgttgtgatgttgagcatttcactaacatgattagtcgtatttggagggatgaacgagaaggaggacggtggaaaggatgaagaggggatgtgggtgtcttggaaagcggctgcttggtcacgctcgaaagcagccatggtagcacgggcacgttcgagagaaatttgaacagggtcggccggatccactaattcagatcctactatgggtggcctaacaatgggtccaggagcagatggagtagtattttcaggctcgacgttggcgagcgaggcagcaagggctgcttcgagttctgatgcttcgtctgtcaattggcaagaacaaaatgaaacaacctcgagttaagcattggcagaactcgatgttcagttatgaaaacaggaaacaactgaccgtcgaagttgccatacgctccccagtcgacctctccacctacgctggtctttgaaattctcgagtgagtcgacctgtctgagccagatgtagcacttgtggctatcggaagagagactgcaaatctatcggctgctgagctttccaaaaactcgctctgaatagaagatgacgaagaagaggacgcagaagaacgaggtcggacgacaaaaacagagtagcctgtccatactcggggaagaactggttagatgatatgcttagaaattgtaaagtgtactgagtcataccttcagactcggcttggtttagaaccattgtaagataggtaggcgacacccctgattagacagaagcagattcagtcaactatcttcactcgctatctcgcatgtgagagttacaggaagacacatacaagcgggttgagaaaagaatgaattcaagttgtaccacctatcctttctgcctccaaaccggcgcaaggtaaaccagtgagagtctaggtttaggatgaatgcctgttgatctctgggaagacatagctttagataagtagctgagcgaccaactcgaagctgaacagacaccaatgcttactctggacgatcccaatgtggccgtaattcttcactacgccaacggtcgagactgagctcccaaacctcaagtcctcgatctagaacttggacactgaagaagcctataacagcatggaatcgcgcaagacacgtcgacgacacgatcagcattcttgcttaataactgttctgacgcatgggaccctcgcattccacgcaccagtgtcatccatgttgactgattcagagcgtgcttgactcaaacgttcgttttcgtcactgtccaactgaagagcgattgaggcaagatcggtgggttcaaaataatgggactgtagaaggttgttgagagcatgctctgtagagaaacatcagcataggtttgtgcctccgacatgcatgaaagacttgtcggaaagttgatatcagaacagaggtcagaaaacgagaaaggactaacggccacacatgttagagccaggctcttgggtctcgtgaaagatacctacacggacggagagaacatgaacagagattgatcagattatgaacttgacagagatatgaaatacattcttacgagatacaagatccatgatggagagaccgcgatgaaagttatgtgatggaaattgataacgactgtattcgctgtggtggtggggaagtatgcagatgagagatcaagagacggattcgtggaaggttggaaatagacagagtaagatcttaacgcgcttcatgtgttaaaatgatcaagcgtctgagatacggattaacacgtcggcttttttgtgctacgctcgacgcgtttaaggttatcattcaaatattcatttatttatctctatctcattaagtctgttgatcctcacacgaatatggtcaatctatttctctgtttgcctttctcttgtccatccatcctctccttcttctttgccatcgttctcttgttcatttctctcccttccagttgaaaggcttcattcgagacagcctggatcatcagtagcatacgtcattcgttaacagtttttgttcttttttatttttgtctggcaagtggatccttcttttatcacatttgttcctggccaacattcatccgacgctcgttgtagctttgctgatcacatacatctctcttttttctcttcttctgcttcctgtcgactctctctttttgccaaactacacttgatatcggtttgcttggacagatacagacgttcgaccagtctggtcgaaaacacaacagtatcctcgatgtcgtcccacctgaccccccggccatcccggctatcgggaattccaaccccaggtcgagtctctctaggcggatctggtcttccaactccatcaaaccggaaggtttctttaccacccccactacctaaccaatcgtatcaagcatctgaggataagactctgtcccgggctctctccgatgctatcaggcataaccctcctccgggttcgtccagaaacgccccatcggaggacacaatttcttctcctgggtctcaatccttcttcaatagtaacaccaatagcagtagcatcagtggagcaagtttaacccaaaccccacgccgaccttcatcttctgcttcgtccaacagatcgtacatgggctcttcatcagtagcgctgccgctgccaagaaccccaggcccgccggcacttcggtcgaccggatttccctctacccctacgcccggaacgtctggaatggcagcccgtgctggacctaggaagagtcttttggccagtagtactccccgaatggaaagcaggcacgaggccagaccagggtcttctctgggtactgcagtgggaggtaagggaccagcagcagggttcaatgtcggagacagagtgaggatcgacagtatgggcatggagggtttgctggcttacgtcggaaaaatcgatggtaagccagggatctgggctggagtagaacttagcggaggatttgcgggtaaaggaaagaacaatggaacagtcggagagtaagtccgttgaatcattttgagtgatagcgtctctcacaccatcgcgaaactaactactattccctctctcttacttgatctgtacttacctctagaaagcaatactttacttgtcccgaaaactgtggtgtcttcctacaacactccaagctctccgccccgactacgactggcgcacatcctcctcgaccgtcttctgttgcatccaccagaagttctatccgaaccggttctgaatctggacgctatactccgtccatctctggtcggtctaccccttcggtttcaggtagggctacgccttcaatctcaggcagggcaacgccctcacaatcctccagagtgttgacggcgaaaaggtcggaagaggagaaagagttggaaggaaaggttacagctgggagccgcgcgagcaaatatctaggtgagacgtgatataatcatctctttatacttcatcttctctcaacatgtttcttgcggttaggctcgttcttacttctatcgccttcttctttcgccttcctgtatgacatatcaaggtatgacggctaaacagctcaaggatcggtctgcctcagactcggatggaaaaagcgatttcctctctagatcaacaacaactccccgagcagttagaactaccggtctcggccaacctaccccaacccgcgcggcctcttctcgtcaatcgctcggcgcctcgtcctcctcacatatcacccctggtcgactctctcgctcaatcacaggtggaccttctcgttcgacgcctacctccgagatgcctcctccaccatccccttctaaactcaaagcaaatctagcagcttcagcagcaacgacatcgtcggtatctcatcgaccgtctagtcgtcaatccgactatccttccggcagctcccgatcgtcctccagaatgtctgatatcggtcttaggccgatgacccctaagagcgaagcgattgtctcactcgaaacgaccaacacgactttacaagataagattgcaaacctgatgcgatcttcgtccaggcaatcagatcattatccagattcgcctggtaccggttggggcactcaaacgacatcacctcccactacgcgtacaactaactccactgtctcaatggcaactccaacaggaggaaaagtcgagccaaggacagaggaggcgtggatcaagcaaaagactcgaatcgatcaactgctgatcagagtagattctttggagaaggagaacttggggttgcttctcgaacgtcaacgatctccagagccctctctgcatccttctaacaacacttcttctcagtcaacgaacaaattggcatctccaggtggcggagtagacaatgcggccttgatggcctctctggaagcccgagcgatcaatgctgagcgtcaagtccaggcgcatactacccgattgacgatccttgaatccgaattgtccgccgctgctcaaacggcacgaacatctcaaacaacaattgagcagtttgaacagaccgctcgtcaaatggaggaggatcgggccagagaacaggccgaggccaaggccggattgaaagatctccagagcaagttggacgacaccgaggctctggtgaaggggctgaaggaagcggccgaggtcaaagaggaagggcagactcaatatggcgcggaggtccaagcaaagaagaaggagattgagatcctgcagtctaaagtgacgagactgggaggtgagttggctcaacagaagagtgagttgggcgcgcaaatcgacgcacttcgacgagcaggacaggtcagtcttttattctcaagcgtcttgaagatgaagagatgtatgtgatgagaaggctgattgagattgatatctcgaacaaaatcatgatgaattcaggaaacgatcatgctctacgaagaacgactcaacgcggctgaatccatgcggcttgacatggagagcttccttcgatttaaagaagaagagcttgctcgatcaaaccagcgatctgcttcccctacttcctcctcacaaccttcgagcagagatcccactcagaaagtgatcacagcgatcgagattgacaacgagaacttgattgaacaagtgactcacctgaaccgacggattgcctcttttgaagaacagatcgaggagtaccaactgcagatcgagtcggatgaggctgctgtgagggtgaaaactgatcaggcacttcaagtggagaaatctctcagaaaagagttggcggcggcaagaacgcagatggaaggtttagtcaaatcagagagaagcgcgaggtcgggagtgacggacatagaggaggctctgagggagaaccacgtggctttggagaacgcgagaagtgagatagaagggttgagagccgagatagctgtaagtgaacagtattctctatcaattgttttcaagtcgatcagactcggttgtttgttaaaaaccatttacatgttttgctggtttcccgatcccttatcttgtctcatctgtagaacctggaaaattctcaaggcgaatctcctaatctagatagaaccgaccgcgttcaagaaatcgagaagaagttggcaactgaccgggcacggttcgaagaggagatcaaacaactcaagggtatgcttgaggaaattagagcatcaagaggtgaggcgctcgaagcggctgctagttcgagattggagcttgagcaacgaacgggtgagatcgaggaacttaaagaggtgagcatcttgtcttttcgtcccttctacttgcgttttttagagttcaacttgattcgagagcttaatgtctaattgatatctgatgatctgggactcaaaggctattgatgcactagaggcaatggttgaggagaagattatgactgaagaagatggtctcaatagagagattgcatcagaaaagtcgacccaagaccaatccgagcaattgatcgagttacgtagagcgttggcagagtctcaggccgaattagagattcaaactcaaaagcatgaggttagtaatactcgacatttattaattccaatatcgagcgagaactgattcttctccttgatcgtcggtggcaacgacatcttcatagtctgagttcaacgatcttcagagtaaggttgcagaaattgatcgtagaaaccagcaggaggttcaagaagtaagcgcacaagctttgttcaagtatgcattgtaaattcttaaccgaagttcttctattctctatataagctcgagaaccttatcgagtccaagatctatcgagaagacgagctagagagggaaatcgaggacctcaagtacaagctttctcagcctagtaaatcaagttcgagtgggacgcactcgcgcaatcataccggagaagctcagactaaaaagctcggtagttccgcctcccgaaatggtgatgcactaggtgagaattgacatgtcttatttcttattctcgtatcttgattttgatggtgaacggtgtcgagctctaactcttatctctggtttttttctgaagaaacttgcgagttgtgtgacaaccctgatcacgaaatccaagactgtccacgtaggtcctctcatttactctggtttgccctttagactgaagccgcaacagcaaagaaactccggtcacttacgagatatatatctttgcaaaaactttgactcagtattcaatggatcttcctcagcgacccactactctcctcggtcgtcaaatggggaagatactgccgattctgttggaaagtcttcattgccttcgttcaagaattctggacttttggctgaatcaacggacaatagaccgtggtgtgacgattgcgagacgtttggtccgttcttccttaccccgttcatatttttcctcatgctcttgtttgatctaggacaccatctgatttctgttctcgaaacatctttgcaatatggcatcgattctactgaatgcaatgtaggtcatcccaccgaagagtgtgaatatgctcaagagatgttctagatatttatatatacacatacatgcgcgtgaaagagatacccattctatctgagagtatgtctcctcgtctgtctatacgttatggtggcatacatcgtttcatgtggcctctttctgacatttggcctctttcttgctggctggcggacttatagaccaggggatttctctggatgatcaactttatgagccattattccatttgattatcgaattcaatatcgtcagataagagtaggagaagcgagcctaacaaaactccatgatgaaaataaagaagaaaggagagggaagtaaaattaggagaatgaatagagaaatttattcttagtgttttcctctgaaggagaagtgtttgtgaggcgaagacccaatgatcgattttctggaagcatccactgatgaaggcgatccgggaacaggtggcgggttgttcaaactgtttaccgagccgttggctagtttcatcgaagtgaacgagtgagatgctccagcgttcgatgtgaattggcggaactccaatcgaaggaagatgactccttgtccctcttggaactgccaatgacgattcaaaaaagagggaaggaagaacaaaccagtcagaggatacaaaacacaaaaaggatgacactagcaagagggatttcttacttcgactgcgactctgtcggccgtgggcgcagttggcgagataaacttccagatctgtaaagatataagagcgatcagtcagcatcaatcactcttcatattcaagtctgattgaatgagataaatattccttacatcaacatctgcgacgcctaggactctgcccttaccaatagccttgtgctctgaaacggacaaagagattcggctgatttctggggtgacggagaacttgaaactctcattcctagaagcgaatcaatattgctttgtcaaacagcacacacatccgaaaaattatcaaactcaccattcgggagagacagacttgtggtgtctcgtcttctgagtctttcctccgacactaagagacatttcagccttcacttcttccgctagatccttggcggacaatacggtcacgctcagacttccctctcgaccttgtccgttctgggaagcaaaatcggttgaataagtcacgggagaggtgccctccacggtctcagaagtaaatcgacgagggccatcttgaatgtcggaagcatcgtcgacagggacctcgacaagctagataagcaaatagatttaaggctgaattagcgcagcttcaaagatctcaatgacatatagaaagaaacataaactctaccatttctgaaccattgtctgtctttttcttgaccagaccaatctttcgaccagcgaatcctccaacagaaccaacgccatgtccgactaaacccacgccctcttttaagaggaaagagtgaattgtcatgagcataggacaccaaccgactcagagaatgtaaaagtatttactgaaagctgtctttccaacacctccaacgatagccacaggcgcatgtccaacctgttttaacggaaggataagataagtggaagagcttaatttcaaacgcacagtctcagaacttacattttgaacagctcgcccagcggtagagaatgtggaggtgttctgcgtaaccccgacgaaacagaaggtcagtttcttcgtctaccatgaaagttcgtaaggatcaagaaacaaacctttcgagctctggcgatgaccgcaggttggaagaccaatcggattcgaatactgccctgctcgccgtgcttgacagtcgatataggaatggtcgcttccaatgcttcgaaaggttcaataaccgcgagatcgatcaaccctttacctaaagacttggcttgctcaagttggttccagtcaaagatctcaacttcgaacaaggctccaactcgagaagtcacactggtttcgaacttctcgttccaaacgggactgagagtctttttctatattgatataacatgccagaaagagcgatatatcagcattaaaagctcgaatgtcgcacctatcgaaggaggcgaagacaccgtactttaacttcactcttgaagaccttttcgccgttactgtaaatgtaaagtatcgttcagtactaatgctgagatagcataagcagacgaagacaagaagttgtaagaactgacaggttgaacacggcgtaaggatccgactttccacttcgatcggcaccacgaaggccgtgaccatcgatcaactcgaccttcaaaagacccatgttgttcgcgctctctgatttgtcacatacaaagggttagagttggaaatatagatatacagtgggaagaagactaacctctgggctcaagcacaacatcgacgggcgcgtacttggcgcagatcttgaccgtgctctttcggcccgatccattagtagagatcagagtaagatctccgggagtatcctgcatataaccggaacgagaatcgtcaagatttttggcagagatgcgcgaagactgcaatgagacataccaagtattgtctgagaaatagattcgatagtcttgtgagcggatgcacatatctgtataagagtgtaaagaaagaaacatactcaaggaagaatctggtatccaagctgatttctgagaagatatcctctttcctgagacacacgaaggaaaagagccgtaagccacggctgagcatatcggagtgagcagcactagactacagcgaggcttacttatcgtcatcgtctccgttcaatctgaggcaaattcgaccaaggtcgagctccttgatctgttaacgcaaagtatcgtgaggtcatgtttctaagatgtagtgaatataaatattacagcgaacgtacgaaggcttcaccgacaaagtcccatgccgccgtggtacttctagaataaggagtagtgaactgatgtatgtcgaagtcaatcagtaaatgacatcgatgaaaactaaaaaaactgaacgaaccgatgcccaatagcctgtctccaccaaaacctccagtcggcccttcttctcgagttgtccagagacgacttggatgacaaggagtccggattctagattaagacataaattttcaaaggctcaaaaattagacaacgaccaggttttgtagaaattcagagtgaggggagagtcttacgggtattcaacaagtcctgcctagtcatgaccactccagtctcttccttctcgttagcagaaacatcagcaccctctgcagcagtatcgccaacagcattcttcacttcagagacgtttggagtgataggactcataggactggagggaagggatacgggggaaggatcgtctttcttttcttcgaatgaaattccccccttgaggcttacggcagagaagaattcctaataatcatatagaaccaattaggtcgattaccgatggccggaaaactaatactgtgacaaacggatgatacaagtggaaaggaagactcactacgtcgtagaatagatcacccttgtaccctcccttagacaactggatcttcttctggcaagacttcctaccgagcgacacgtaaggagttcgaggatcctgactctgtgtggcgtattctcgaacgtcaacctcaaccgatctaggcgattttgtttattgtcagaccgtttccgatcaatgcaaaaattagaacatcaatctcatttcaactctgatcttgtgaagcgagaaaaccaacgtaccccaaagaccgatctttggtaaggttctggtaatccataacttcgagtgtgcatcgctcagaaagatgatgcactggaacatatgcatagctgtcccaaacagggttaagatctatgtggcgaaaaaaaagttagatgtgctcctaaccaccatctctttggtcaagaagagaatgaacatactgttatcgacgacttctgttcgggccaatacgttgccggcgctcaaaactcgaacataggggtccgatttgccgcccaaagtcgcttccacattcctgtaatatacaaacatcgatcagttgggttgctcgcgtcggagaaagggcaaaaaggcctatccacttgacatcgacagctttcttgagtaggatcttgaggataccgataggaggaacataagcttgaagggaaaggtcaataacagtttcaaaaattcacagagttagcttcacttgtcagaacgaactgggcagtttattagcagtgaaaaggaaacaacgaaccagctcctccgttcaaacttccagccatacccagaggtttccactccgctgagattcgaattcgtcccgttttggcacccttgagagggaaccagtcctgctgcttttccttggccatgaggagatcttgaagggaaacagtgacccgccctaacgttgggtccttgacgaaatctcgatcgtcaaccacagcaacagtcacgacggacgagctcttgtccatgaccaaaaactcggtagacgactcccaagaaggggaaaagttgtttttgaatacctgccatgataaagtagagaacagacctcactgatcagtaccctccatgtagaacagaaggaaagtttcaaagagattacgaactcctgtcttgtgagcggcttccttggaacctccaatgaacagcttagcataaggatttactccacctggcatcagaattttggatccatccagctccttggcctggtggatggtcaatcggcagatacccgtgcctgataggagatgatacaattgagtcaatttatcatctctatgaatgttggtgctatcttaaactagatctatacttacggctatcaggtatgacgtccaaagtaccgtcggcgagtttctcttgttgaagaaccgggaaaaagtttctgagggacaggcagaatttcaacctatcagcaaagagcgcctcgaacatcacgtctgaaggatgaaggaggtggatgaaacatacgcatcaaatcggagctgacctcggggtcggccttctctcagaacgttcatcgagatggcttccatggtcgaatcctctttcagtttggaaagatcaaagtcaaccactcccaaatcgttgtccttccggctacagaaaacaaacaagcagaccgaatgttcttagagcttgctcctgttttactcggtaacgtttgctcattgacaaggtacttactgctcattgtaatcaaagacgtttaaggctaaactatcattaagactggaaaccaagatatacttggtctctccccactgaggattaccggtactcgaccttggtttggtcttcgcgacaggggccttaccggccacagcgatcgtgacatactaaatcacatgagagaaagtacagaacgtatcagccgttttgtcgatcggtgtgtaatcgaagatcatacgtacgggatccggacttccacctccaagcttggtaccctccaaccctcgagcagagtgaatgttgagctgaacgactccaatggccgagtctagaaaagaaaaacatatcaagtcgatggctttgttgactagcaagaattaaaagatgtcactaacccaacggagcgccggagagaagctgctcgagattgagagtgaaaacatttggatcgtacatctgtagcaggtgacaaggcgagcatgtaagccggatggaccactttgttgagttggaagaacaagtcgtgcttaccattggtccgagattagcgtgcacctgatcacggataaagctcgagagcccaggaatctacaaatgttccaagcgcgagattgggcgcgatcagcgtcgcgcaagaaccagagcaactaggacaaactcacgctagcaatatcaaatccgagagtttctcctccaattggtttcagcgcatagtctgtatatcaatgataacgagaacgaagagaaccaataatctatccagttctcgtgtgaaggaaggaagtttgaaaagtcaagaaaaagagaacaagtcagtgtacgtaccgaacatgggcttttccaaaaaggacatctcgacaagttgtacgtgagggaagttgttcatcagtttaagcttgattcgcatgttaccgacgaaagacatatcctcgagtagaacagggaaaggagctgagataaagctgtttgaggccgatataagatgagcaatgcgcatctctctgaactcaacagatgaaaagaattgacgaacccctttccgactttaatctctagaacaatcttaggatttgtctggaaagcctgttctcgaggggtaatatcactcatatcgttgggcgtgaaagaaagcttccaatccataatcacaacgtcatcagctgtcttggggaacgttcggacagaatcaattcggggagctggagatccgagcaaaaacaaacaaactggtgtgaatattctatctaagcaaataacacgtcgatgcggatatcggagggcatacctttgtttccaagagtaaatgtagtcattttgatgctctcgattcctgcaattgcggtgttagagagaacagcatccacgcttgccacgattgtcgaacttaggacaggttcctatcattcatatatgatcaatccacagacgcgtttagtagacagttgaaaggataattcaaaataaaagggacggactaacgtagattttccagaatcgatgtaagaagttgttgatccagtcagcgctctcggtctcggtgatcaacctagttttgacaagctctctctgaatatcatcccttgcggttttcctaactcgggtgatagaaagctcgtaataggtcgcgcaaacagccagcaagatgatgttccaaccccaaccgagccgaaagatagcaaagaaatgagaggtggctacggcaaaaaagatgacacctgcgttgtggtatgtctttccgtatgcttgctcagaactgtcaaaaagaagtgaaaacgcgtccggtttagtacgaatgaaactgtcaattataaggacaaggaagaggaaaagaccttacatccaagacgctaacaaagacgcgtccgcgcttccaggctgagcatctataccgctcaccgctctccatccaatcttgtactgtcgttgttgttgtcatccacacggcgaggacaatttcagattccttctctgcagtgtaactaagaacctaaacggctatgaactcacccagtcagggacagcctgtaacggcttcgcggggatagctccgggcacaccctcctgatggtagtcaagcccaaaaccacatgttgtaacaaatcagtacaggtctagttgaggattatctaggcaaccggagaatcctgctaacttgtccaacaatctggtctttagatggcgcggcgtttgctttgccgttggttttctcgttggtggctttgtccaagtccttggcagtaaccgtaggaaggggtgcagggttcgagccgtcatccacggcaagctctttagtagaaacaaccgaaaaacaccgacagatgtcacggatgagcaaacaaacagatgatccggataggagtgtacgattcgcaagcgaaaagaatcatagttggtcaactcggtacgcgtcaatagcatcataaactagaccgaacaaaccagtgactgcgtttcctttgatcacagcagacggttgaagtccgtcgagcgtgttcagagccgcccgatccttcccagctgctgctttcttctcggccgtgctcgcgtcaggatcgaatgtctgttggagatgcaagcgatgcgaccataaggatcatcgatttgttgaatcataagaaaggaaggcagtcagttcaaggaaaccgaccggtgcacacggtcgaaccaattcgtcttctagcgaccctcagtcctgtctggaacgtgtcctcgattgaaggctgcctgatttctgatcgctcgtcttgatatacacaggaaatcgcagccataacatcatcccctaaccggtttgaaaatataccacaaaagagaggtgaaactcacgtgaacgggagtcccccgagcctcatcgatctgaacgatctgagcctcggtctgttgggattttggatactggttttcggcaggaggcaaactcatttacctgtagagagatgtagaggaactggaaaggacgcgatgaggtttgttgtaaacgagaaggatagaaaagaatgaaaaaaggaggggacggcggttaggaacataaaaaggaggcacgacggcgggaatgtgatgatgagatctttcaacgttagtggcttatcaaaatctctaagcgcagcaagaagaattttggctctcgagtccctgctccggctttcgccccggccagccgatcccgcttttatatcgagcgccgcagtactttgttccggctggttgcgtcggaagtatttgagcggtacaggcctttgtcactttccttgcgtcaaggcgaagcgacaatatgaaccgcccacaaacagagattgataatgctggccggctcatttataactccgtaacctatccggacgtatagagcgtagatgagagatatgtatatagataaccggataacggataacggcaatttacttgacggtatcgaagcgtggtacggaggtcgtaaagaaagaaaaggcataacaagctactgtcatagaccagaagcgcagaggtcgtcaggagagtagaaggaagaaaaattgagaagtccataaggcagaaaacatatacaacaagaaatatttgtctagaaatatcgaggagaggagggactgaagagaaagaaaaagaaaaagatacaaagaagggatagggagataagacgagatggaaagcatgctaaaaagattgcgttcctctagttatgaatcgttcgtctcctcctcaacatagcgcctcctccgtcgtcttcacttccaccatcagtctctccctcatcgtcctcatcctcatctcctagcccgagcgccccttcaactcccacgcttgctgctcggcctctgccactagccgtcctcggctttgtctgttttccgtcttgctgcctactatgtacaaagccgaggccgactccttggaaacttggaatatcttcctcgccgggcgtagatggaggagttcgttcttgggaggaactggttaggtccgagcttggcaacaaggcatgacgctcgccgggggtggtcatgtatgccggagtcgtcgcacccgagtttgagggcgaaggaagaacagtataattggtcgatagagaaggaagagggacaaccggcgaaaaaactgttgcccagtcaaagtcaaaaagataaacggctgtctctttttcctctctgatgaaaatgtgatgtcagcaagagagaaagcgcaccgaattgagaggaaagcttggttcttcgagaagatttgtctatcttttccaacaccttgccaagcacgggttcccctacgcccgttagacctaggcctccagcaagttcagagtcctccttgaagacgctcaccggagatgatgcaggcgttaatggcagcgttgaactcgaggtcgtgaacgtcagaggcttctccagatcgagagcactagtagtagcaccctcaggaagcgaggcggtagtcgtggtcttcgggctctgaacaggaactcgtactcggcgtgttggctatcaaagaggtacaattgtaagattaagtctcttagatgtctactaactaaatagtactaactatgcgcagagttctggttagaagataggcgacaaggtcctatcaggaacagcacacgtaagccgaaggtcagtaactctattaaaaatccttgctacattcacatcagagctatttgaaaacgtgcgagagatcatactaaccagaagaataagaaatgccaatggaccagagacgaggcaggctaggattctaaaagtaaaacatatccattctagcagactgctagcgaaaccggtcattattggttgcaacctgccgagggtggtttcgtttcggagcacggatgaccatgcagtagaaacagtcgaactcgggtcggaggacacatagtgtagcaattgctgatgagacataagttaaggatagagggagtatgaatttatacgatgtgaaggaggggcgtgaggatggtgaaggctggtgatgcctggaacgactacaccgaaaactcccaacgaaaagatcgaactacgcagaggaccggggtttaccaatcgaacattcaacgttggagaggtgtatgatttatgtcagaccaaaagtaaagattgatggactgaataagcggtaggatgaagttatcaatggtagtaggaacaccagatgaagatggtcctcaagaagttcaaggaggagagacaaaagaagaggatgcagaagatctaaacaaaagagaaggcgtgacactggttacggctaagtcgtaacccagcgaccaatcatcggggccctaacgcctcaggatacaagcgacatcttactctcttcttccatctttaagtgctccttccgatctaatccatccatgcctcccaagtctgcagatcctaccctctatcatgtggcctccaaagggtctgtatatcctgtctttgttactgatcacatgggtctgaacgacggcaagagcgggagttctctaagaggagagcattgtactgactcgttgcatctatctattccccctaaattatatcatctccatttgacttctccttgactctttcactctactagattctggaagaaacttcgtacgtatggatcaaataagtaagctgtaaagatatcttgcatgtcaactgatttgggaatctttctttctggttgtgaccgctccaggtgacaaaaccgtgatcaaccccgagatctctaccggtctccctattcctcttctcaaccgataccctcctcctggatctcgcccagaaccttacgcggttcctgctaccgctgctagtgaccctgcattcaatcctgtaagttctcttcacatctggactcggttatgcagctctcttgggattgactctgagcagtccatgggttgagtatcatgtatgctgacttgtcctcttcctcttgttcaaacgcacatagtattggaagcgtgatgtacgtcttgaaagattccaaacatagtgatcttttaaagccagggctcatcggtcgcatatgttgcatcttcatgtttctgttccagactcgccgaaactacccagccactagtgtaatcactcaatcgtacctgaccaaccttctcctcgcttccccagaagggaaggctgcgttcgttcttccttccatctttcaagattcttccttctagttcgatgctttatcgtgtatcgcgttcttctacacttgcatgagtctaatttatcccgatgttgatctctattctaggattcctggtcccgactccgctcaaaagactgctgtgactgacaaggtcgagcctgagcagactgttgttcacaccctgcctgccgtcgtcagtcagattttcgaggtcagcaagaagaagacgtacgacgagtccaacttgcctcctgtgatgcctgtacttaaacggcacgcctttcaacgggccgcggatcctccgcaaaatgagtttgactatttgccaatgtacgccaaacttatttctttggagatttgtgctcaggccatctagcgatcatcactcgtgccgatgttgacattagttatctttccttaacacaacaggcacttgcacaaatgagaaaagccatctggctatcaagtgattggcaaacaaatcaatccttgttgttttcttcttctctttttctctttcttatcttgtatcttcttcttctccttccattgaggtacattttcttctcctccttttgatcttgttgtgttggtctgtttgattgtttgttgaaacttttattgtatgtcacttctattgtctcccactcttttctctatcgctactttaccccagcgagatcatcaccaagcccccatatacacgtgtacgcgcgcgcaagagcaaggctatgtgaccagagtatcctggttgtatcaacgtgattctgcgggactgtttaattcatcaactaggtgaacagatgggtggataaagagggacaaattagatacggcaagacagttgaaacgaagtacatagagaagcgattattgtaaaacaagacaagagtgccatttccaaaaacaaaaggtcttggaggtttttacgcgtacttttcttggacatatctcataaaagagagagagaaaaggatgtattcagataagctgattagtgaaaaacgagaaagagctggagcaactacaggaaggggtcctcgactcggctctccaccatcctctgaccttcttcgtttctggacaaagaataagagaggaagaatctacatcttcgagcctcatactacttgaatcctgatccatcctccttgaccaagccagcctgcccgatcaatctcaaagggatcatccttctctttgaaatctctaatttctcagtcctccattcgatgttcgggttgtcgtaccttctaaacgtttcgaaatgagcgggtacttcttcgcctgtttcttggtctctgacgagtgggacaagatcgatgggccgccagtcgacttgcgcccaacaaaagccggagacaattccggtagattgaactggccggtcgtctcgttggtgttcatgctgaccgagatcgggttttagtttggtattagtcgactgtcgttctcgagcaattgtattccccttccttcgcttagtgctatagaagatggcttacgtcaatccattcaacttcatctccgactgctagatgcaagacttccggacagatactctctctgcaaaatcacgtcccaatatcaaattcccccgagaaaaagaaaaaagaaacagcacatgcgtgagaagcagattagatcctatcttctttccctcctttgtagagcatctctttaggtttgtacactatatcgattcgctcttcctcgaagcgaacacctctctttcccgctaccacagttacagatacacagacgtccatacaagtccgcagcgatgaaattataaagctcacctcttgtgtttcgcaagcgcctgagacttttgaaaggccttcatgttcctatactgagcgttctgagtacttatagtatcctgagaatagaacgaatgggcgaaaatatccttttctccatcgactgtttgttcgttcgttcgtttggtgttcaccatccaaattccaacgtcatttatatattcgtttgttcgttttgtgcattggattttgtttcaagaaccagacgggaaagaagtgaacggaaaagggtgaaatgacaagagaagagaaagaaggaggatgagccgaaataccgagcgaggcgagaccacctatgacttaaaggtgacaagaagaaaatacgaacgagacatcgtaaacatccgcacacctccggccgagactgaacgatacaccgacatcgataccatcaacgacattggcggtgacgacattgatgtcgatagcgactgcagcactcttgatcgacctcctatgagctcgacggtccttgatagaccaagactcgaaggcatcaccctacaaagaaacgacatgttctttctttcgtatcaatcaacgacgtcgtcgtcaactcagcgttgttttagttacggctgttggttggtttgaagtgggggtgagctcgatgtggagaggtatcctgatgggatgtatgggcaagatagaaaaacaagagattagaacgaaataatgacaagatcgtccgcgtcacacaccccacaccgtactagaattatgagcgcagtgatatacgatatccgtcaatcagcttcagagaacaaatcactttcgaggggtagagtaaaacacatggtgtaagacagagacgtctcaagccaaagtgagagggcataagaaagtgtgtaacgtgagtctcattatatattgtatggg

SEQ ID NO: 2869 - DNA, 7918 bp, Xanthophyllomyces dendrorhous
agcaacccatgtctaccaagagatcccagatctttgccgttttgttaacgtcaatcttgatcaaccctctcgcctctcttctccttaagtttccgcctcgtctggcatattccctgaccagcgtctctttgatcatcaggtagggcttgggcaggatccttaatgttgaacacaattgttgttccgcgggattcagcaagtggagtgaggccgaggtagcgagattgagtggctgaggcggcttgcgcgtcccgttagccgcaacatatggattcttctcctttttaacgacctcgacctgactggtttgtcctcccagcgagattcggttcgctccgccacgggcagacttgacgtcttgtaagcccgatgttcggctttctaagaggatctcgtaacgttctgcgtcggcaacggtggtgatccctttggaccgatatgtttgtagctgggatatccgcgttcggaggctttgttcatatatcaggccttcagagaagacctcgaaatcctcggccgtctgtaatttggcaaaaactttgtatttctggataatccccttgtcctttggtggtcgcttcttctcagcagccatgatttttttgtgttctgtaagtcctctctggaaaatcaggttcttgacctctcttcttcggtcgagcttctcgttataaatttctagcacggctaatttaatctccagatcgtcctcgtcttccacatagtctggagaatctgtggagagcacaatcggctgagcggcgggcaccttggtagaggccgccacaggttgaggtgtggatgaacttgaagggaatgaaggcgcggatatggtctggttgaggaacaatgatgaaggttctataggagtcgaaaccccagatgccgagttcgatggaatcgggcgagatgtaacggaagagggaagtgtctttgttgaacctggcggtaatgtttttgttgatgatatcgagcttggctcaggggtggcagagtctctgctactccccacactcgctgcccgctctctctctgccaggatgtacgatggtaaactcgatccaggaggcggcactttcggggaggcgaatcctggtgcggctgttttccctggaggtgctttctttgagcttgatccccttaatcctttggcacctgcgctccgacttcctccggctcctgcactcaatataggaggttggacgaaggacgggggcggtaatttttgggcagtcatggaagagtagtcatctccccagtcgtcgtcatccccctctccgtcggcatctgggtcgggctcacctaagtccatccgggaggaagcagcatctgtcggagttggcggcgggagcggagttggagggactaccgatggtggattagggggtgcttgtgtagaagggacgacaacaggtagcactacttcctccatcttgtcgtcatcatcctcatcctccactacgtcctctggctgttcgtttccgccatacttgaacaccaaaccaaactccatctccttgacagtgttctctgcgtcgtcgtaagcgacctcgtgttcgaagtcaagtcgacccggcatgaagcctgctatttcatgattggtcggagcagacacaagtggtttttgagcggcgaggttggatatgtctacaacatcagatatagtttagtacatttacagaacgactgaatcagagcgaagagagaaagtttatgagaaaacttaccgcgtgtggcggtcctcatctcctctatccgtcgtttctttctctgcaggaaactttcctggtcaatatcaaaagaaatttctcctttctgcgctctttctgccaagccgcctgttcccatcagacgtatgcgctctctactttcttctctgctctccgctggcaaggactcttccaacgcaccgacccaaacctccatgtagtgctcgcggcattcttcttttgtgcgtgttccgacgtgttccgatgcgtcctgccagttacccaatccgtaaaggtttaggccttcgatcagtaggagctcttcgtctgctccccaagcctcgtggtagatcggatatgaatgttgctcctattgtgaaaagaacgtcgaaggaacacggtttagacaacaagcagtcagtcggttgggaacacggctatatgcgggtgtcaatagataccagccagaactcacaacgactcgatagggatgccagctcttgtgtttgccgccttctttacctttacagaaacacgaagggcatagatcgacttcctcgcaacctatggctgcacattttatgcgaactgtatgggtctgatgttgggacgcgttggaaagaacagtttggattaaacatgtcagcggaggtgtctatctgtgaagggagggaacgagacagaatgggaagagtggatacgaacgcagtcgaggaagcaaaagtcgcagttatctaaggaagagcgtgtggtgatgcgaagtgttagatgattgagagtcgaagcgaaaggagagaagacaagaagaagaaggagagacgtacattgaattcctcctgtcacagctggcggaaggaaagataaagatgaagatggagagatggagatgacatggagatgaatagatgaacgggggccacgtgagaagagacggaagatgagtaagcgagttgacagcaaaaggaacgaggcacaggaatagaagaagaaagagaagggtgacgcgtgtgagatcgatcggtttccgtagtcgaaagtggaaaaggcaggaaggagacagaacaaagacaagagggaagaaaagaaaagaaaagtaaagtcctaaaaacacgtacccgagtgttgttcattctcagcatctttttttcttgacgatacagtcattcaaacaccaagatgacgaccgaaacgcgttctaaattatggagggagaggttgtagagggagattggaatgaaagatggcgagataacaaggtaaaaagaaggccggaacgtaataagagacccttcttttttcttcagtgcttatgttgagtgagtggagagaaaaaaggggaacggggatggtagagagagtaaacggggtgtaaatgagcgagtaatcagggcgggtgagagtaacaggaaagagagaagaacgggtaaatctgggtgagcacgagcttagttaggttctttccgctttcggatgtgtgcctggcttatccgcagtagttcactcgaataaccctaaccagaggtaatcagcacccacatgtacaccttgtagtgatcactccagatagaacacgttcaagcttcatacacagaaaaccactaggttgttcaagatgcacccagagaatccatatttgctctgtcctcctgatttctcaaagctcgcaaagtcaagcgaagagctcaggccgttgttcgtgtgcttggttctcaactcgttggctgaggatcgctaattcaacccggaagctccctcctttgtctttgaccaacacagtgtctttcttaatgcatctaaactcccagtgatcgatttcaagaatccagcggcggtaaggtgatggcaactttttgcgagggtcgtgtgtatctaacgtgcggacactcatggtcgtcttcgttttctctttctctaggtcagggcattgtcaagggccttgctacatcatgatcttgacctaaatgtcactatcccggatgatagattatgtccaacagtaagaatttacgcacaaaaaacccagcgttatgttgaatctatctgcaacatgctgaagcagtctcatattccttacaggttgctaatcggttagactatctactctggatccgctcccttctgagaacacatgactgcctttccgatgttgccctcaagaaatcatcagaaaagattagaggcatagacataggtaccggctcgacagccatctatcctctcatcgggtccaggctggaacctcaatgggagttctgcgctaccggtatgaggagaaactattcttctgttgcccttatttccggatacactcgactaagactgacgaacgttcaacctcaacctagagatcgatccgaactcgtttcatcatgcgcaaggaaatatatcgagaaactttctgtcggatcgagtaaaactcgtcaaaatcgagcctccgtccgggcaggaacaagaccgaatcttgaagccatttgagctgtttccggatcttcagtacgtggtgtccatcatctcaaacgtttttctgcgtcttttctcgggactgactgagcctgcctgtttatctcggctagattcgagtttacgatgtgcaacccacctttctattcttcttggcaagagattagctctttagcatccaacaaagaattcaatcctcatgcggtaagaaactcgagcttccctattctgcatggtctactcgatccgtgtacccgctactgatcaaaagaagccccttgccatacagatatgcaccggggctgaaacagagatgatcacgactggaggagaagtcgaattcgtaaagaggatggttaatgagagcacatccatggggattcaagaccgatgcaggttcgagcgtttctttttaacgtccctttcaatccggcttgtactccgtcgggcaatggatacgaactcaaccgaggcttgcttttttgacctagatggttcaccagcctcttggggaaatcaagttctataaaggacgtcgtcgacctctttcgttcgaggaaagtaaggcccgttccagttgccctttaattaggctttattttcaaaaactctatcacgaacactgctacgagatttgttgctcatgtgttgtatcaaatgctagataaaaaactatgcgatcgccgagttcattcaaggtcatacaaaaagatgggcgcttgcctggtctttctctgctctgtacctaccagatgtgagttcttctgtctctgctctcggagcctatttatgtttatactatcttactcaagccctttgatccttctttcttcgcttcggcctatcttcatgatgacctcaggacctctcccgtccgacatccaaacaactgcatccgtttctcccgccttccaactcaaaatcattcacctttccacccgatacgtcgattgaggatctcgttcgatgtacggagcgtatccttcaggctctcgatggagtctccctatcaactctctctgagcctatcacggtcagctctggatcgcattccgattcatcagagaacccgactcggccaacctcgagttcgactcgatatctagtgagcgcgcgagaagcaacatggtcgagatccgctagaaggaagaaacacgtccgagtcgagaatgagataaacccgatggagcacgacgtcagcacagtggatgaacggccgttcttgagtactcttcttcgatttgatcgtgtgggcctgacaaacaggggaacaaaccggagcacagataaagatggggacaagaatcgagaagacggggacgagaagggatgggagatgagtatgcatctactaagtctgaagacggatgatatcgaggggaaaaataggttggcatgggaaggcctttggaattttatgttgagaaaagttagggaaggagtccaggaatgtgtagaaaaatgaatggaaaccttctgcgaaaacgttcttggagtcatcagagaaatcttcctcatggcagaaagtttgttattattaataacaagatcgtttctgaaactggatgcatcaagatgttatcggtgttcctaacgagataagacagcaatgaatagaaaaaggaatatacaagtcacacggaagatgggtttccgtatccttagaagatggaagtgaagaagacacggagatatgtgcggcaagctatttcagcctcgtctcaatctcggccgagccattaattagtcactgacggtatccctcaaattcggtacacttgacattagtttctactgcctgaattctttataatccgaaagctcgttccatccttctctcttcatatccaagaaaccccggtcgatcctatccaaacgggcgaggtaaaacaaagaagaaataagagacaagaggagggaagagaaagcaaagatgtcgtttgcttcatcaaatcttctaccagaagagaatgagtccatcctacaatcaatagagaacgacgtcgaagggtccggctggttcagactaccgatatatctagaagaaagacccgatcaaccgtttgtttgtttcgtcgtggtatgttctcgtgttcctctcttttgctggagttggatacatctgctgctttacttgatggtcttttgtttatcgctagagccgaacaaatgatcatatcatcccggagattgctcattctattgtatgccttttcggtcttgggtggattatgaacagttaaagacaaagccggggatggaacaagctgtggtacgccccttctcgttgcctccggtctgttctttgccactgtacccagtatcttacaccacatcacgcttgccgtttctctctactcgccgatttctttttaaaaggtggatatcacaagagatatcagagcggaaacagaccaggtatcgattgttttccttttcttttcgttcttgcgagtttgtatgcatatgcgaatgtcttttaaccttgtgatgaaatctgatacatcatgtgtcaacagaatgagctcgaaggttcgtcgcaccatcacgttcccgcattctccgatatttgggcccgactctactctgtgagatgaggcaggcaaacaagtaagcttaactcaacaaaactctggtacatctgcgcggttctttcctcctttcgaagtgtacgcccatcggacgttacaagccaagtatgaagccgatcgaaacatgttcgtacagtgcaattctttgcgtatttgtgtgtgtgtgtgtgtgtgtgcacttgcgaggatgatctatttcgctgatgtcatcctctttttcattccatgtatgtaggatatgtattgtgattgattgcaagtacaagatcttgactctttgattgtgaccagttcctttactcatacacacgcgcgcgatgcattcaatctctttctttttcttgcctcagacgactcggcggaagcttttaggactcactatagagggaagaacatagcagtacgtccttgggcgggagtatgaaagttagacatcaggaatctgacgaagttattctgttttcgtgtttgaccgttagcggttgtacaaggctggggtactgtctgagcctcctaaactcaacttttttgtagacgtccaataatcatatatgtaaacacaagggagacaaaggaaactagagcaagaaaaggatagaaaatattgggaaggatgtgggcctctcttcaatgtctccttctggtagaagctgtctacagaaaacaaggagataaatccatgagtggtccatgtgtttcgactattctttcctccgtatggaagccgtcaagcgtgttaagccataaaggttgaagccggtttcctactctcgaaagagttaggaagccgtcatcgttcgcgaggctttttgtgttggggattttggtttgtgaaagagaaaagagaagagaaagataaaagaatacaagacaaaaaaaagaaagaaagaaagaaaggaagaatgagaggcagacgaggcaaaaagggtaagaaagaaaaggggaaaccctagaccaaggttcaatcagaattaaagtcagctattctttgtccaacgaagagcaagccttgcctgcccttcagacagtttaccacacacgaagagaaagaggaagaacggacagaacgaaagaggacacatcgactgaaacttgtaatgactgtgcgggacttgaaacagagcataacgcccgttacatccgcaggctgtgtgaaca

SEQ ID NO: 2870 - DNA, 17770 bp, Xanthophyllomyces dendrorhous
agacttcccccacgaaaaacttgcctaccattttgtccctgtacgattaccgtaatagcctcggtgctccctgcttcacccccttgccgccttcgtcccaaccggctcagcagtacaccaagatgatctacccacctgcacctccgtcaccaacgctgttcccaaattttccctccccgaactcttctagctcgatccctgcgttcgtcaacagcctccagacatcgccttttaaccacttctcgctctcccctccagctgccgaacttaatggatcattccttcagcagccaaccgtaggattcaactcagatttctctgtcctccaacagcagcagcaactccagcatcaatcacagccgcagcagtcacaacaacaactttccatgttgaacaatccatcaggcttgcttcaatcccaacatctgacgtttggagaaccaggggagggtttccagttccgtaatcttatccctgcagagtacgagccagctgaactctcgatggatcaattgcgcgagttccaaatgattcaagagttcgatcaggggttgtctcatcagtcgccccagacgatccaaccgctggcagaaggtggaggatcaaacggacgaggtcttcaatcgatacatcctcatcaacctcagttgggtgtccaggttcatcagatccagcaacaggcacagcttgctcagagtcagatccaacaacagctcgcagccgctcaggctcagaggatacagcagcaacgctatcaagagtctcttaacagttcgtcctcgtccgatgatggacacgaacttggcagtagcgaacttggattcgacggccttgccgagctctctggcctccctcaatcaaatccgccacagtccatgccgatccagacagctcccatgtctcgtccggcaagcagagactctgtcctatctgctccgtttccaatctcatacaacaacactcacggctatgctcatgattacatcaacaacagaagcaaagcacgatcgtctggctctttgaacaagaacgaaaacgtcttgctctcaacaacggcgacgtcgatagcgtctcctggacaatcttcctttggtggctctcccgaatcttcatccagagaaccaagcatccagcctagtcccttccaatcgacaaagcttccttctacccggccctcaactggtccagactcccacgctctacctaggttggatggcttggttggagagggcagtttgtacgttaacgtgaagcaatacgagcgaatcgtcaagaggagagcccagcgatcgaggttggaagaactcggtagggtcgccaaggctcgaaagccgtatctgcacgagagtagacataagcatgcaatgcgtcgcccccgtggtaaaggtggtcggttcctcgtgggtcttcttttcgctttcctgaaacccataacttcttcaccccttggggttgtatgtgcatgtactgatcgatcgttcatggtcttcgttgtacagaccgctgaggaactcgctcttctgcctcctcagacactcacctcaccccccgaagatgcatcctcattcgcctctccagagggttacactcctatgcccgttgtgccgagcacggcaaaagccaaaaatttgcccaaaaccagagggaagaggaagaggtagacccgttgactttgtctttcaaagaaagaaaaaaacccgaaacacacgcaaaaacgataccaaaacaccaaactcataaccacagagataatatcgataaccacaacgtgccgggtcgcttgggatcacgggaaagagagatagagaagatgcataaaagcggtatgctgtcgtctatgttcattctttaattgctatattcttctctttactttcgttcgttaatacctgtagatgagatactatatttctatttcttctctttcttcgacaattcttccaaccttctttcttcgttttttgttgcattttaaccttttatcttgttgcccttcgtatctttgtttctcttcatttccacacgtttcgatctcaacggtgtccatgagctttcacgagatcacaagatagatgacgaaagatgctcgagatgaagaaaactagtgcaggatatgaatactaatagaatctgatgaaatatacaaaaccaagagaaaaaacacatgtaatcaaacgccgctagaaatatgagacacaaaagatctctggctgccctgcgtattcctcgttcatccttcgccccgcttccaagaactctgtccaatcgatttcctttctcctctccttttcttcctcttggcccattctctcgtttattatataggaactagttcttgttcttcttgtctcctcttttctcttcttcttctctttggccatttggagagatgccatctagttctttcgtcaacctcaacagagttcgtcgacagaaagcagcggaagaggccaaagcgactgcgacatcgacagtaacctcatcaatcgcaacgccttctgctcaaactcaatctcagaaccagcaaaatcaacaacagcaacaacagcaaagtatctctccggttccttcactccatcaacaaccacagcttcatctagacccgacacattcttcttcctcgtcccaatcagcttcgtccgtcttggtctcgccgatcgagtctacgccgaatacgacggtgttcagatcaccagcttcatactcatcccaaggatctctctcgcctgcttcttcctgttcattaaatataggcggtctcaactctcctctcagcccgactgccacgacgacgattagcggtcatccatgggcgatctctccttcggcgtataccggaggagggggaggatcctcggatattaggagacatcaatctacagggtcgagacataagaagtaccttagttcgactcaggcggaaagcttaggtgaagaagcagaggaggaagacgaaggggatggagaagaaggtgggaaagacggaaaggaaagtaagacggctgctttaggtgggttgacgaggtctggtttagacagaatgggaaatctgacaaggcatgggagcttgccttctaaaaatagtggtatgttatgctcctttttcttctgttcctcttacgacctcatagagtggctggataaaggaacaggaaggtcggagttcaaagtcaaggccatggtgctcatctcaaatgattattcctgtctttctgcagcgttccaagctcgagcgactcgagcaggaataaaagcacaaacatccccaggggtctccaggttggactcgatcaccgcttattctccagtaggacccacacaaaccaaaggagtagatcctcaagacgacaagatatgggaacaagcacttgcagagaagaaacgagcggtgagtcactcattcttgctggctcttctatctatctgtttttaggatgtcgcctcccccgtttttggcggatggaaaccacttgtttgagttcgctctgctgaattatagtctttcttctcgacaatatcatatctaccaatcttttttaatttcctgatggcttactcaggaaactatggaatccaactctccgtctacattctcaaacagcgttcttcgacatcaaagatctctacaattgattccttccgggagtcgatcccagcatacaccactctcaccgacatctaccgtccctggatctgctagcctcgtcggcggtcacgccagatctgccagcggaacgggtgagcatgtaaacgaaaattctcaggccgaggtcgaggccagtctccgaaggcatcagagcttaactcaacagggcatgaacacccggatttcagaccgactcaaggcgagtccactccctctatcgaacactcaacgaccatacccagcatcttcctctgcctcacattccgtgttgagcgcgcctgaagatcaagacttgccgcctccgacgtcgcccattcaggcttctccctgggggaaccaaggggcgggttcgaacagtatctcgagtaatctcagttgggaagatcactccagagtactgaatgctggttcgctcctcagtccggtccctgggtcggctcgattcggagcagttatcagacgaatggaagaagaggcggatggaggactaggtggcgtgccggcgatgaacgctgagcagctacaaaccgcgttcgaagctgcttcgctcggtcgatcgtccggagcgcacaacgcgttagggccaccggtcgtggatctcggtcggctctcacctgatttgccaggtggtaaccttcgccggagccaatcgctccgaactcactctcgaacgtcctcccgaagtcatgaccaagcggccttaggtggtaacccacctccgcctaggttccttaacgctagtcctcaacctccttcgacttctcctcgaccggatgagccatcattctctgcttcacccgaaccacagtctttatcgaccggttcgacagcaggaagcgcatacaactctttccgacctacttctgggtctggatcttccactccttccctcccgggtgggaagaagctgtcactccttaccgatcccgtcacgttaggtcaaatatccggccagaagaagccgtctgggccggctacggccgctccctatgttcctccgattggacatactactcgaccgccccaatcggctttgccagggaagacatacgtcccaggtagccaatacgccaagccttacaccgccgttggcatgggctgggatcagaaacatgcgatcatcggcagtagatctggtggggcgttgaatggagatgcttccggcgaagaagacgaaggggggatctataccaccggacaaggcgactacttgggacgttcactgggtccgatgatacaacctacgtcgataggaggaatgggtggaccaattcctcatcagcttcttcaagctcaaatgaatgcgttcacaggaggaaacccatcgggagggatttacccgatacctctcctgcctccaatcacacagagcttggcaggcccgaccggcggttatctgcagccgatcatgggagtgaatcatggagtaaatttttctgggcctggcgggaatccagtgtttttgagagcacaaaccggtttgcccgaggcttcggggcacctggatgtacagggactgatccaggccaaagggtataatcccccggtatttgacataaaccccacaaaggtttgtcgtgattccttgatctagctctctatctgtaaaaagtgcattttcgctttcctcaagctgacatgtgtattgctcggtcgaaatgcaggcaaagttctttgtgatcaaatcttataccgaagatgatgtagccaagtctctaaagtgtgagtgagccgcgtcatcctgtgagtgcgttaacgatgtcgctaattagaacctactgtattcaagtcgaaatttgggcaagcacgcgatacgggaacgccagattggacaaggcgttcaaggaacatgcttctaccatggtgcggtaatctccagagaatcttgctcattgaaggaactttgtctcatccagtttcttcctctctctctctctctcagccgatatacttgatgttcagtgtcaactcaagtggtcatttcgccggtatagctcagatgataaccgacgtagattatagcagtaagtagtttgtgcgtattttagagattaattgtttaatgagccgacctcttgcctgttggatgtttttttttggtatcagccaccagtacggtttgggcccaggataagtgttagtagaaatcctcgctatctgccctcgagtctgtttgctgaaagttgacgtgtatctaatcgttaactccgccgttcgtcaaatagggaaggggatctttcgggttaaatggatctatgtcaaggacgttccggtttgtatcttctttctttcgaattaccctcacctctgcttcagttattcgtcaccgagtgatggctgaacgtctcactttcggattcgtttatcacagaaccaagcgcttcgtcatattcgactaaccaatacatctgagaataaacctgtgacaaactctcgggatacacaagagcgtaagtgtctcatcacatcatacttctatcatctaatcaatatatcctcacgatttttccatctctttattcagttccatttgaagctgggttggagatgctccagatatttcatacatatcaagctcgaacttctctccttcaggattatgggtattacgagcttgcttcgaaccaacgagatatctctcctcataaccagcaacatcatcgggaaccgcctgtcgaaaaagtttggcatcctgcggcagttcatcttccctctttcccggctcagcccacagtttatactgctagatcgggactcgggcccggacctggacccggacccggactggggcaggggcagggacagtcgtttgggatgggtcagccacagggcccagcacttgggtacggacctcctcggtactagaaaggagcttttctttctcgattcctgtttctccgctcctttaagttgttcgtttagttctttcctgggcttttgcacctttttcctcttcaagcctctccggtttcttctttcttgcctttcagtactcaatatatgaacattctacgtgctatgaccccctttctctccatatatagaaccttcaacatgcttgcctttcttctctctatcttcctgcgatttgttgtggtaatttttaaccttctttttcatgtccacttgctaaacaaagagattcctcctatgcgcatgcgtgcgtatattttcacgtatgagccgtgcattcgagcttactctttaaaaatggggccccttcaccccctttcctgtccctttgcttctttctctctgctctttgttttctactttctggctcttcgcgcctactggtccttggtgatgaagaacaaatgccattaagagtggttatcagagtcaagaaggagaggatacaagttgattatgtcagaagcatatggtaagaaaacagagttgccctcactaggcctttattcggccgcccaaagaagaagaatgaatggatttgaactactccaagcttgaagagattgaggaatcaacgtaaaagctaagacggggtggttcgacgaggaaatcctgacaagagtagatgttctgagagagaagaagatgctcaaaagataagaaaccggtcgtaggaaatgatcggaggaaatcaaacggtcctctcacccttagacttgggttctggtaatgcttgtagaaaccgtcggcattgtcgtctacaaatatcgaaagaacgattaatgaaccggacataagacagttgaatctctaccgcgcaagattatatgcgactaagggacttgcaatcgaccacgacgcagaacctgatgttggatgggcagggttcaaaatgagttggaacacgcgtttatcatgatccagtaggatacatgtgaagcaaggaagaagtgcgcatggtcagttacgatgaattgatattccgagaccaagacaacgtggcggaagttctagcccggcctcacaaagattgatcatccgtttgatctctagggactaagcttcgatgagagtacacttcgagtagtggaagtaaggtattcagacccttggctagaacgctcttcctaaaataacaataatcatgataataccggcccagaattagtcacttaccatcaagattgaactatccaatcagaaacaagatacgatgatgaccggacataaacacatatacaaaagattcagtcccggaagtagaatggggccgagtgacatgtcgaaatcagacggatagaatcagcgggctagtcagcgattcatatcacctgtatgagtatagagaaggattagatcaatagacgacgagatgcagtattgcgccaaccttgtcggtttcttcgtgcacgatatttacacatctcaactataaccataagatgagccagtcaaccgatagagcaaagtgcagcaattagattatttatcctgaaaaacacctcgtagactaagagaagaatcatggctgataatcattggcttaccagatcatccacgcgttcggacttgatcctcaactgatcattcgtatatccagacaaacggcgaaaaagtcaatagatatcgaggacgtaaacgaataacgattatcagcatctctgttccgtctgtgtaccgagagagggagagaaaagagagcgaagacaaccatcacgaagcatgtataaggcacatccgggtttcgttcaattatttttggtaaccgaaagtagtccacatagttctcacgaatcttttccaagacaatcgtgttctcttctggagatagattccacgaagtaattgtatttatcggcttgtatgtactcataagtggaggataagacagagtgaaatcttggaagagtgagagagatgaagttaaaccatagaaaagagggcaagaaaattgctaaaccatgctggccatatatcagtacagtttacgcaataagcccgggatgcatgacaaaatgaaatgctgccaagaaactgaacgtagttgggagatcggtccatcttgatccttaatacacaactcaaactaagatgttattgggctctttcttagatacaaaaatcatctggcttatcgcaaaagaaacaatcaggacatagatacattacattgaatttgcttcatttttgtattgatcacaaacagatataaaaaataggaagaaagatagatcaagaagagagaagcagttgcacattgcttctattgcttcttccaatacttgtatgtatgttcttttattcaagatcttcccgtttcatctagagaaatcaatctgttcaagctgccgtctttgccttcttctcttcggcctagacaacatatggacgacgaaaaaaggtttgattaagtgatatttattcagaatgtgcctctcttgctgagcacatatagaggacagatggaatcaatatcaggttttaggaagaaactcaccaccggtcggacaggtccaaacttctccaaacgcttgcgcttcttttcctcctcgaccggatccaacacctttgcgggctcagatttgagtaccttttctgatgtgggcttggccgttgcggctgctgctttaggaggttggatggtgtttgtcttgggtctgacggttgtatctttagtatcgacgtaaggctgcgtgtaacatggaacgaagatagataggcaaggtgcattcagcgtgtcaaccgagacggatggcgaagttggggtacttgaaagagaaggaaattcaacgaacaactccgaaccgggcagctcgactcttcctcttctcaatctcctcatctatctctttgttggaagcggtcttctcctcggatggggcagcgacagatcctgtcgaggtagtctagatggttcaacccgatgatcagcaatcactcgcgtattattgtctgataggagggggcaatctcaccttctcagctatctcaactgacgatgcggcatcagcagcaggtatggatgtagagatagtctggtttgacaaacgagattgaaaagaattacgagtagagtgtgaacatgacgcgttttgttcgatgaacaatatatccagatcaaatctatgaacctcacctcttcagaagtcttcgtctcgttggaagcagaagcagtagttgagtcttgtctctctatagccttcataggctccgagttcgagttctcagttgattcagagttcaataagcgagcgataagctcctctttccgaccgctcgtcggtaggtttgcctcagaaaggagatgtttgagatcgactactttgagtgctttcctgatggataggtgaaagcaatcggagttacagacataaagaaagatttaaccttcgtcagaaacaatacagatccacaccctaagtatttgtagagctactttacaattcgtcttcggtatgggcggccatgattgtaatgtcggcgatgataatgaggggaaggtatgagttaactctcaacgtcaacaatgctgaagaggaagcgaaagatcgcttacgtaatcatgcttacaacgttctcagctcacaacattcatttcaaccatcatcatcatcatcaccaacatacgatggctttcgcgttagcaacctcagatgaggtgtttctattcaagacacctgatgttcaatctctttcgaatcttccagatcttcaggcgcttccttccaaggttgctttttcgaaagcaggcgagtttgtgtgcacgaccgagggaggtgctatctgggtctggacagatttgtcgaaactagaagagagagcgttgatagccagcaaatccgaggttcgatacttttctatactttgtgttacgctcgcaccgctcccttcatttgtattgacgattggatttctaacggcaccgtcggttcaagggacctatatcttgtttgcttctcgacgtcttggacggattgtcgatcatctactcccaaggctcgaaggtacctatcggactatctcactatatgttcgacagctcgagatgattgccaactgattcgtggatgacgtctctcgaataggtacatgtatctaacgcccgcacaggccagcatgtcaggacatttgaagtaggcgactttctctcgcgcgcgtctgaatcataggagaatattcgaacctaattgatgacccttcatgttccctctcttatatcggtcagcactttacctcatcggtaaccgacatatctctgggagtcgatgaagccttacttgctgtaggatatgcgaacgatccagttgttgtattcaacagacgacatggatctcaaacgatcatccctgttcagccaaaaggggtacgctttgtactttctctaatcgttcaagctctcgtctgatattggactttctttattgttcttcgaaattctaacaaggaagctatctacaagcatgtaggcgctctttctttgctctcatcacctttctagaaacgacgtctgcttaccaaattgcgtgtatatttatcagttgtcgatttcatccaactcggcggaatacgctccttgttcttctatcaggaagagatgaattattagtgttcgtatctgaccttgattctgcttccttctctctcatttgatggactgataaaccattgagtacttcttaacttctttgacgaacttgtcgtctctctctagatatgatattctcaaaccgacgtctcctcaaaagattatccgtctagacttaccttcaccgtcgtcacttcagtttatcgggaatgcaaccgacctggcattcaactcactaacccctcactgtgctatcgtgacagatgctgggctcttggtcaccgtcaacgctgagacggggagtgtgagagcgagagagatcagggttcctttaaccagtgtcgtttggagtgggcggtcagaggtcctcataggaaccggtgagtctaaactctctactcttagaaaactatcaacgataagatttacttgatgaataattctttacctcttcattcgtaaatgcgaaccacgtcggaagaaacgggaaagcttctcagacgagacgttcaagacgagtctgtctctgaagatttcacgattagcgccgagggagcaaccattctttctcttgctgctcaggcaagttgaacgcgacctggttttccgtagagtgatttcgctcttggttttctgatcctcatcttctctctttgggccaactgtgcgcgtatgctttcttcaacggaaaaaaggctaagacagttacccggacaagtcgatcaaagcccaccacgaagactggggttgaacctcgtccaagaccttcatccgttgtagttccacctatttcatcaactcacaacccctctagtcgttctagttcacggcctaccagtgcacctctgactctcaactcggcggacgacgaacctttggctcttcggtcttcttcgccttccctacctgccctaccacccgctcgatttcgtccgatacaaatctctcgcccgtccatcgggactgaatttggaacagaactaacatcagttggagcaaggacagaggcaggtacaaggcccgaaatcagaccaatcccatcgacttcctccatttcggtctcttcatctgtgtctgacccaagacgaggatttccttcaccttcttcgcctgttgggtcgactagaagagaacgatcacactcgcccccttcgcctcgttccgaccgatcaatcggagaatatcgtcgagggggtgagagagagggcgaaggaagaaaggatgagttgatatggatgctttcgaaccaaatcaaagatcttcatctagatagtacgttgttcctctccccctccttttgtgcgcgcgagcggggtttttgtgtccgtgtgtttttgttttattttatcataattcaagctgatcaatttgaatggacccatattctgttttctcttgtctccatcgaacacaaacataaaaatagtgcttcgctcaagaagacaaacgaagctcgagacaaaggcattgttcgatcaaacattccgtagactagacgtcctccagagagagaacgaggctctaagatcagagatcaacaggttgaatatgagacctgggtattcagatgatggcgagaatggaggaaacgatgaggattcaagttgatctggcttgattacgatcggatttcgaccgaggatcaaggggatttaagctcggcttatatatccacatatacatatacacatacatacggccatactttatgaagataataaagaaagatgataaatggaacataaaagggaagtataggcatgttttcaccaaacctgaactcgaccgtctcgccagaactctccggtcacgttattgatatcatccagggcaagcatgacgggcgttttggcaccttgttcgagggtcttcacaccgccgggcgccatctggattcgtatcagatccgcatcaaaagaaatatgaaaatgatgacaagggtgatatggattgagagggaaaaggatggtcagttggagtcagaacataggggaatgaagaagatgatcagaagcggacgaacgtcagtcttgacgtagccaggacagcagttgttgattagcattcctgggttttctcgcgcggcgattcgagtgtacgcttggagagcaagtctattaccagagtaagcgcagagtgaaagagaagcagagaagaaggaagcaaaagggagaatacgatgagttcgagtcggagcacatgtgtgtacagacagaaaaaggcgcttacttgctcatcccatacccggtagcaggccatcccttcttagcatagtcgcctgcgctcacatcgttctgatgtgctccaatcggcataaggtgagtctacaagttttgtaatatgatagacagcgaaaaggaaggaaaagctcactttgaaatcggcaacggccttttcgagttcttcctccgtcaggtcgtcttttgtaaatcgggcgagtacgctcgggtctgtgatgatacctgatcgaccggcagtggaccccacattgacgatccgggcttcggtcgatttcttcaaaaggggaatgaacgattgaatgacctgtacataatgtcgtattcgtcgtgtatgcatatagaaagaaacagaacatgtttaagtccgataagatcgtgctatgaatatgagaaggcagtggtaaaacatagaaatcggacggacattcttggttccgtgataattggtattgaatgcataatcgacgacctcacgatcgaacttgtttccagagatcgccactcctgcgttgttgattagtatatcggtctgaagcatcattcgtttgtcatcgtttataacagaaatcaggtgaacatcagtgggagaaagatgtagatgctgatgcgagaagcgcaaacggactaaccttgccagactcgctttcgactctgtcgacaaattttctgatgctctcttgattggatatatcgagatctccgactttgacaacatgatcgcctacagatttcccttgaagaacatcttctaacgccttttttcctcgagatgaatctcttgagcacaggtaaactgtgagcggctggctctgcggcgcctggagaaggatagactttacgatctgaaggccgatccctttatttgctccagttacgacgacgactttgttgttcatgtttcctacgaagcgtgtgtatgtgttgaagatgagaaagaatgtccgaacaactctcgactcacgtcatcaaaaacccagatcgatccggatgaaggatactaacggcagtcaccaactgttaaccctaacttgacccccgtccacgcccttgcccgtcccgccgctgagccgatccgctcgatcagtcaaccagttgatcacgcacggacctcctcaggtacacaaacttgtccctttatatcagctaccgtcgagacgatctgttctgccaccaatctaatcaagtcaaccacccactcaaattattaaacacctcattcacctctgattcaatcgatggctacttcaattcgcctgccgagtgtgacgacgataaggaatcttatctcagcatactacatctggacaaacatcatcctcgcctcctacaggcacatcagagccagaggagtggttggtcacgaatcttctcatcatgtttactcctctgtatgtagtactgatcggcatcaactctttggcttcctgaatcagaaaggcacaggcacagagatctacctgacattccagcaggcaagttctagactcttccttccactcacccctgccccttttcgtccggctgtcaggcaggcaagttgacagcaaactttgaaattttccatctttccagttcatcgtctctcttctcctccgtcttccgtcctcgcaggccaaagtaaaggcagagttgtcggcgcttcgatcaacgctgaccgacaaactcgctccgccgaggcctcatctgaaccgaaatctaagacttcccgcttccggtttgacgaaggatgttctcatggcggaactcgagaaatatgctgcccttggctcgtcagagtctgtcaaaaatggaaagagtggagaggactggaaggaaggtagagtgtctggcgctgtgtattccggccagaaggatgatgaagaaatcagcgtgctcgcgttcgagaagtttgttgtctctaatccggtgagtgtttgttcaaagcgtacgcatgtatggtacatgtccgagcgaactgacaatgaaacaccattcacagctgcacccggacatctttccttccatcaggattatggaggcagagattgtggccatggtgttggacatgttccgaaatccggacggggcgggaacgactacgagcggaggaacggagagtattcttttggcttgcaagacggtatgttccagacaatccttgtcattgtttgttactggacacagtccacaacatgtactaaaagaaaaatatattgaaacgaattcttgggtaaaaccggaaaaaacaaagtaccgagattgggctctgaatgtgaaaggaatcaccaagccagaaatgtttgtaacccgtttcttcaactcttgtgctatggccgtctggaactcgtgctaacatgatacgccccacctcctgtattacccggctacaggatcgtccccgcttcggcacacgcggcgttttggaaggcttcatcatactttcatatcaagcttcattcgattcctgttgatgaaaagacgcgtaaagtcagactggatcttgttaaacgggcaatcaacccgaacacgatcatgctcgtcggtagcgcgccaaactttccagatggcatgatcgatgatattcctggacttggcaagctcgcgacaaagtacaagcttggccttcacgtggattgttgtctcggttctttcatcgtacccttcttggaacgagcaggtttcaaaacggagccgttcgattttaccgtacccggagtcacctcaatttcatgcgacacccacaaatacggctttgctcctaaaggaacgtcggttatcatgtggaggaacaacgagtggcgaagccaccaggtgcgtcttgtataatattctctttctgtgcagttgtatgggaaacgtgaggttgattgaacgtactcatactaccccgttcatgtagttttatgtactacctgggtggaaaggggggctatacgcttcacccacacttgcaggtatgtttgatatcgtgcctgtctggtcaagattctcgttttgattaccttttaaaacttgatctcgcgcaattctatctatatatatcctctaaactttcttcaactcgacaggatcgaggtaagcagcctgctacacttgtataatcatatcacgagaggctttcagctgactgatttcgccttcctccaaagacctggtgcattgatcgctggttgctgggcgattatgatgtcccgaggaatcaagtacgtctccctttcaacctttgatcgacttatcaccttttagtccacttaccgtattttctgttcttctagtggatacactgaatcctgcaaaaagattcttaccacagccactatcatcaaacaggcctttgtgtcctcctcaatcttgagcagagatctctatgtcttaggagatccgataagttcagttgtagcgttcaccagcaagtcggacgaagtgaacatcatgttggttggcgatcggatgggtaaaaagggttggcatctgaacgcgttggagggtcctgcagcgctacacatcgcttgtaccgtacgtcctttcttctcgttggcctcatctgaagagacgtctgacccttgttgtgctctgttgtttgttaaataaataaataaataaataaaaacattctgggatatagctcttgacgaatgcagatggtttgatcaaagatcttgagagcgttgtccaggaggtccgaaccgctcccaaagatgaaaaggatggcacgatggttcgttctcctcttctctcgtcgttgtagtttttgcctgtcaagaatgaggctaaatctatggtgtttctaaataggtcgccctgtatggtctcggtcaaagttcggttggctcgacgatcgttccagaagtagccaagtatgttccttgcatccgagtttcaagtgtcaggccgatcgctcacctattgatcttcctctcgtttctgcttctgtccttgaaaagaatctttttggagaccctctatctagcttagaagatcattcctcttcttggtagattaactcctgcctttacggatcccgtctcttgaaacctttgttagacatccctttccgataggaataacctattctcgttatcgatgtttccagtcccagcgcaatgctttccattttcgatctattcttttccttatatactttttttccgggtctccagcctctggttcgtcctatcgttttgctcccaagtcagggcaacgagtttcttcagctcaggtgaaagaaaaaaaaccgggaaggactacgactacattcatatttcatgaccataaaacttagacaatagatcaacgacgactgcctactcctgacgagcgaatgggtaagagaggaaggaagaaagaaaggaaaaaaaaatagaacaaagaaggaaaagagaagaaagatctgacgacaaatcgaaa

SEQ ID NO: 2871 - DNA, 4853 bp, Xanthophyllomyces dendrorhous
tcttcccgagcccgagcggcccatccggtctacacgcaaacgagatctaacgttcaagctcagttcttcttccaattaggggcccagtagtccgtccctagttcgctcaaaggctgagccgatcggattggtccgccgtcgggttcaggcagttgcggttgtagttgtgattgagcgagattcgaatgcgtcaaataatgcgattgggatggcggttggggatgggattgggattgggtggaaggaatggagaagaatgagttggaggtgataggtaaggatgggggtgggttgtcttctgtcggttttctagtgaacgttgatcccaagctaaagaaccgactatgggggtttcacgatcgtttgttaaacaaaaaagaaaaaagagaaaaagacacacacacatatattgagcattcaaagtcgcaagaagatcgaataaaagggaaagaagaagaagaggatggaccgacctgaacgatttccgacgactcgttccctcatccggaccatctgtcaacctcggtctatcggacctccaacctcccgttctgcccccgttcgggttcgcgttcgaaaccgcgtccccgttcgcgttcgcgcccgcacccactttctcgccgttcccgccggggccggaaacagaagacgagctcagatcaagctgactggatcgaggggtcgtcatgaagggcgtcgcggttaatcttccggaaggaccggagaggatcctgccgttcagaccgttctgtgggtaaaacgtcggtgagttcggcaacgagttctcgcccgctcccgacccggagccagagaccgagccggagccagagccagaagtagagttcgaaccagagggaccgttctgattgttgccaacaccgccacttccacttccacttcctcctcccccgccaccacttccaccaccacctccaccgttgctaccgttcgaagggctttctaaacttcgactgctcccattgttcaacctgagcgccctcgtcagagcctccctctccgcggcagaaggcgcaaaggctctgatggacgaaaagaacctggagcctgctcctccacctggcgagactgcgtagtcccccgggttaccggtcgacgaaggatgggcgggatgaactagtgattcagacgacatcctgccaggaacagagacagaggcagaggcagaggcagcagcggcggcggtcgtgctgtttacgttggcgttgctggcagagatggtgggcacgaaaggggctgagttgacagagaggtctgacgaaggccggttcaacacgggtggctgatggacagacaccgggctcgaatgagacttgttcaacccggtcttcaggctgaacactctcgcgtccgggttgagtttgccgttgtcggccgtgctaccagggatggtggaaagggtggcggtcgagttggaagaagacctaggtgattcgacgaacgactgatcggaactcggaacaccgttgacggagccagcggtagggccggagctagcctcagcggtggaagaaggaaaccaacgtctaggagggaacctcgacaacgtgccggcctggccccttgctttactctccctcgattcggctcctgacttgtccttgttgtccgcgcgctcaccttcggttaccggcccaccaagctgagtgggctctgtgggcgagaacgtcccggaaatacggggcgagatcgaaggccgcctgaacggctgcatgctcgagggtgggtatcggtctgaatcttgcggatggccgccgccgccgtcgtcgtcggaggagcctcggcggagggcgaacgtttccgcggacgggactaccggtgtttccgccgacgagggatccgacaggaacgacctgcgctcgtccgggaacgctagttggggcgacagaggcagggccgagtcttccgtcgatttctttcgctcgctctggcttcctctccggtcgtccggaacaccgggcggggtctgcctgtcgtcgttcccaaccgagcctcgggccgacgtagggctaggcacgacggacgacacaccggaacgggtgggttgatcggagaagaaccggccgagcgagccggttcggttgtgagttcccccgtaggagtatccttcccggctttcgatttctgcttcgctctcgctctccggtgtcagaaggccttcggtactgatcgattggaacaagcctctggggagtaggtctgagaacgaagcagagagagacagaggggaggatgattcgtcctcgctcgactcttctgtcgggacgggtcgaccgaacggggcgtaggtcgatcgttcccggtcgtgaggaagggcaaggttttgggtgtgggtgtgggcgtgggtgtgagtgatgggtgggttggacgatccgtcctgattgtgaaggtgatgatcctgagcgtaggcaggtttgttaaatcgagatgaataagcgaccggtccaaagtcctcgaacccaaacacgtcgttcagagcggacgagtaagccgggaccgggtcgttgggggaagaaggatgggtgtgatgaaggtggggaggattgagaatggaaagcgtggtggatgaattgccagaggtagagctcaggatcgaaggagcggcatgaccggtgccagacggggcggccggaggaccggccgagagagaggtcgggtcaattgtcgtcgaggtcggttgctgctgtcgtcttcggtcaaagagggaaagagagagtggctgaacggggagctcgtagaacgcagagggcgccttgtttgaatggatgcgagagagaggaggcgacggatgaggagtatgcgtttgggatgaccgaccgtttgccgaggccgacggatatggtaccgtctgaccgacggcgatcgagggggaagacgaggatgaggaagaagcagaagaagtagtaggagcaatagcggcagcggcggcggcggaggaagtagtggaaacagattgtgcggatgaaggggaatacgaagaagggaaagaagacgaggtggatatcggcgggggtggctgtggtggaaaggcagactgggcgaaccgttcgttctcgatcgacctcggctgagggaacgaagtgaaggtattggcgaaccgtttggcttgttcgagcgctgtgagcgcttcggttttggaagtctcgaacgcgtcttcttcttgctttgtctggatttccaactctctgacgtctgaacccaactgggccaactcggactctacctttttcagttcctctcttttcgaactcgtcgccttttggatggccgagcctttggtgttcatcagctcgtcgctcgccttgatctcttccctttgggcggccatacggtctctcgcgttcgccagccgatcttcgagctctctgatccggttcaacactgcttccttcagaccttcgatcacccggagtttcttctctgcctcccgcttgagtccttccgcctgtcgtttcccgtcctccaacaatttcgtcctggccttgacctcgagccgttcgacgtcctcgtccctcttccggacccggagttcttccaggttggccatcaggctcgaatgggcagtctgggtctgggtggaaaactggaagagctgggcccggaggtcggtcgtggtggattgggagaggacgagggcgttgtggacctcggcgagggccgggttggtcgagagaaccgaggggtcgaccgagggaatcgagatctcgggaaaagagccgggcgcgatcgagtgaggtgggaatgtgaacgactggaacacggttgaccctgccgcgaccgggggtggggaagaggacgacatggtggttgatggcgagaaggatgaagtgatagtagtagcagcagccggacctcctaccacagttgacgaggcaagggaagggaatgacgaggacgtcaaaagggcagagggcgcgttcgggttggatgaagcagacaccatggaggattcgatcaatgaatgattatttgagctagcagagggatgttcgaacggatgactgccctcctcgttcctctctgtggacgtggccgagggagagagagaaggactggttgacggatcctctaggctgggttgacgagaccgattgttggctgaccgttttgtcgaacccgaacgagagagcgcgtgcggttggttcggtgcgggaccgttgcctccgggtgaaggggacgagaacgagtacggaggaggtagttcgagatctagagctttgttgtgcagaacttgaggtgtgaagggggattttattttttggacgattgatcaaacatggtgacgcacaaggtcaatactcagggctccagaccgatcttttcgggtttctagttgccaatgttgaaagacaagaaagaaagaaagacttaccagcagctaccgattcttcgcttccatccaacgccttcaagtcgacgacgccaaacgtcgtgccatcctttgagctaccgtcgacctttttatttgactggttcgggatcgtttgactgggtgtgacgactctaccgccgaaccaccatctaccaaaggcgccgatgaaccagacgccggcgaggacggtgtcggaatcgtcggttcctccgtccggccatctcggtttggttgatttccgggggtggtgggaaccgatccggtctgccagtgcgagtggggacgaggtggtggatggagagacggtaacgatggagaagagtagatgatcgcgcagggcgtagggaggtgtgcggagggcgatggagactctgttggtgaacctgaacggggcgaaggggccctgtctggtggccgacggattttttgactggctcgaccgggtttggcggaatgtgccgag

SEQ ID NO: 2872 - DNA, 491 bp, Xanthophyllomyces dendrorhous
ggttacaaatcggttactcctcggctatagcgcgtgggggggttgggggtgagcgctgtggttgtatgtgtgttatagagacagagaggggcaagagaggcaagagagcagagaacacacgctggggagccaagcgagggaatgtcagggagagaacatgcttaacagagagcttcctcaacaaagaacagacaacatccagaacgggcagcctgttgggttttgtgttggccgttgtgtagaattctgtagtgaatccattagggcgatttgtagtgtgctttgtaatgctctgcgtagtgtactttccaatacacttcgtagtgcattttgtagtggactccctaatacatctttcaatacatctttcaatacaccttcgaatacaactccctaatacgctttgtagtgcattccctaatacattccctgatacactctgtaacacgcccggtaacacgctcccgtaacaaaccccccccccccccccc

SEQ ID NO: 2873 - DNA, 467 bp, Xanthophyllomyces dendrorhous
aacacatcctctgccaacgctccctctctctcccccactcgtccaacagagcgttctgtcaagttgtctagtctaattctctaatgctctctctagtgcgttgtgtagtgcactgtgtagtatattgtctattgcgttgtctaatacattctctagtcctttctctagtgcactctccaatacattctccaatacattctctaatacacactgtagtgtgttgtctatcacgatttctattacagcctctagcacactttctaatagaatttctgttacaatctctagtacacttcctaatgcacttcctaatacaatctctaatgcactctctaatacaatctctaatgcactctctaatacaatctctaatgcactctctaatacgtcactctaatacgctctctgtcacactcttccatctcgtctcatctcatctctctcatctacacccccaccctcccatt

SEQ ID NO: 2874 - DNA, 1278 bp, Xanthophyllomyces dendrorhous
actcactcatgaccaccaatccgtacactcccctgccactcactgaggagtcggcagaaagctccctccctttgtactccaaggactctcgtcccgaaggagcaaccccatcagaccagccagcctcagacctatcatctcatactcatctggccctaaaaccaacaccttcgggcaagcgatacatgtctttcagagtcgtctggccattttttggctgggaacgcgccgtgatatgtgaactaggtctcaccaagaaggtaggttctttacgttcttctgggcttggtatccttttccacatttcatcattaccttctcctcggctcgtcaatgcgtaaaggaaactgtcgagaggttgcgctcggcccttccagatgatctcagccgagaatccgtcgaacgaatggacttccagatcccggtgggtgagggttgggccgacgtgatggactccgactgggatgacctgataattggataaacgttcaaggagatcacagtggaacccgttttgacatcgagagagcaacggaagcgttagtcaatcttacttctttgtcatctccgaggctctcttctcctttcccttgtttcgtatcgccttctatccgtctttaagcgtcacagctgatactgagttggttgcgtggtctggatgatcagcttggctcttagctttctcggtgatacttatcgcttataatattggtcgtgggatttgttcttctcctacctgaaacaaacgaatcacaaaaatgaacgatctcctgctttccctcaacaaatatctctcgctagcactgcacactctgttctgtctgtttgttcattatcacatgtatctatatgatgtcccaagagcgcacgtgttttacaacttgttttagctcccacccgggacatacctctacatgtcgtgttgtgaagagggcctgtggaggtgaggaagtgaagaagtagagaagattgggtgttgatggactattctaagaattgcctagcgatatttcccaatacgattttcattacgatccctaatacaactcctaatacaatttcctagtgcaactcccttcggagaggaatcaccctcaagggggacgaccagaagaccaacagaagaccatcgagcaaacacatcactctctctctctcttcaatctcttggtcatcttgaggacacacactcactcacacccccgcttgctcccaagagataaacgttggaaacagcctggtgcgctgaccacagagtcccccccccccccccccccc

SEQ ID NO: 2875 - DNA, 4808 bp, Xanthophyllomyces dendrorhous
ttccctcctttttccttctccctcccgcacacattcatctctgtccatctggatcccgtcgccccgtccccatccgttctgctctctctccctctctcatcctccctggttctcttccctgttctcttcctgtctcttcatcgagacctttcccctcttcgtctcctctcctcgggcgatctcctccctctcctttatcggcccgcccgctcctttaatcaatctccaacctccccccgatgtccaagaccgatgacccgacggtcaacggtcaagacctcgccccggctctgacatcctacgactttagtaacggtcagactcacagccatctcgcacacaccacccgaacggtcgatcacccagccaaccctcctaccagcacgcttacgaacacgtcgacagtcgaccgacgcgtctcgacaaaagatctcccggacggatcgctcgacccgatgccatcgtcgtctggtccctccgttctggcggtgtcgccaacagacccatccatcttgtctcttcagccaaaaaagacggtcccattgataaactcgagcctggtcgaggaaaccccaactggttctggttctgcttctggttctgcctcagcttccacctctacgccaagccctgcaaaacaaaacgatccctcctcttccttaccagcccacgaatcgatagcccccccgtccaccacgtcgtccgcacctcggaagctcgatcaaaactacactacctcggccagcacggctacgaaaaagaagaagaagaaaccgttctcattcgcttccttccttccttgtctgtccacaaatgaccgggattacgatggagcccggcagcagccctcgtctgggtcgacccgacccatcaagtcttcctcatctgttccacccaccacgcctgctgctgctgctactaccacatcatcctctccctcgacttcggctcagtttccatcaggcaacctagccactcccatagcggcctcggccgctctagagccctcgtccgtccccgagtcggaacacaatgatctcaactcacagtcgacttcgtctcacccagccggacaaacggtaccgaccgcttcgcgaactcccgtcgctccccgatcgttcacccaacaaaaccaaacagaccctccccaggtgatcatccctccgccgaccccggtgaccgcaccgctggatgagaccgaaggcttaacctcctcgtccgtcgtcccccctggtttcgacccggcagcattcccaaacgcccactttcaccaacagcagcagcagcagcagcaacaagaacaacaatcacaccatcgccatcacccttccacctcttccaatggctcttcatcccaacatcctcatcaatcaaccgcgtacacatatcctcatcagcaatcgaccagaccgtctacaccatcacccccagccggcgtcctcgccacctcgtcctccgcctccgacagcttcgccgggacagactcggacgatggcaggcggtacgatagctcagacttagatcgcgacgcagaagccgacgccagtgagggcgagggcgaaggtgaactcgaaggcgaaggtgggattctactggacgacgaggagagcgacgacgatgtcggcctgttgggaggggttgggattcctttgggacctgtaagtttctccttgtccttcttcgactctgcattcgcgctcaccgtcatcctgaaacgtcatgctcaccttcttccttctcttttcttccttccccaacaggacggagaaccgagaccgctcctccctccgctcggtagtcaccacaacggccggaaatgtctcgtgttggatttggatgagaccttattacattcctccttcaaggttagttctcttttgtgtttctccttttcttccctccctctttcctctcgtttaatccatctcgcgtgcatcaaaagggtagaactaatgaatcattcttcttcttttatcacttcaaaaaaccccctgacctggtcgtgctgcctagatgattccccatgcggactatatcgtcccggtcgagatcgagtcccaggtgcacaacgtgtatgtcatcaagcggcccggagtggacaactttttgaaaaagatgggcgaagtctacgaggtcgtcgtgtttaccgccagtctctccaaagttcgtctttattccttgccgtccctttttacttctctgccaggacactccctgacctttcctctctgacctcttccgcgcccacacctcttctctgtccagtacgccgacccggtactcgacattcttgacattcaccatgtcgtcgcccatcggttgttccgggagagctgttacaaccataaaggaaactacgtcaaggttcgcgtcgtttctggcctgttgtacctgtgcttttcttgatctcgatgctgacgtcgtcctggtcctcgtttcttgtctcgctttcttttctcttctccgcggtctttgttcccctgtcgtttcgttctgccttttcccacctttccttacgttcaccatctgcaggacttgtctcaactaggtcgtccgatcgaagaaacgatcatcatcgataactcgcccgcgtcgtacttgttccatccgaataacgccgtgccggtctcgacttggttcaacgatccacacgattcagagctctcggatctggtcatgttcctcgaggacctttccggcgtaccggacgtcagaggtgttctcgacggagggatctgagtaacgcagacctggggatacttataaacaggaagagcgagaaagtgaatcttctttttctttcctacgggatggcaggaattaaaatggggagggaaagagaagatttctacaccacggaaggacgtgacgcagtgggtttctcctttgtggaaagctcattcgatcatgcacatgttatcatcattttcccttctttttattctgtcgtgttcatcaatccaattcgatgctcgtttctcgatagatcgcgtccctctccttgttcttttcttcttttctttgttcttatttgcctcgtcaatccggtcagccgatgacgtccggcaatatccataatacccacacacaagaccctcttcttttctctttctctctgcgttcacacttgtttcctcgtctcatgtttcttttcttccgacgtcgtcatcgtcgtcatcgagggttacttctttttaattttcatatgacctctcaagggagaaaaaaaaacacctttgcaaccctctcatctagctttactctaccttactctactctttatttacccgatttacgcacactcacatgcatacgtatacgcaaccatacgcacacacacacatatacacatacgcgcatgcatgcagtactctcctcttccagaatcttaattttaaaaaaatcctcctaataaagtaaataatcagaaccaaaaaaaaagctctttcgtctgttggtttgttagtttcgtgtttcgtcccctgctgcttcggatcgcgcctctgtctcatttgtccttgttcctctctctccccatgttgtctgagtttataccctttactctttcctttttttttcgttgcttcctactccctactcgcgactcttttcttcttcttcttcgtatctctctctgctctatcatgtggcttatagggtctccctttttacctcgttcttttcgatctaactctgacgtccggctgaagggaaagtccctcgtgccgaccgggtccaggtctggcctgctccataagactggccgatcgatcggccgactgaatcaaacacccgtttcgcgcaagactcgacgtacatcagatagacgtcacaaggagggggggagggggttccttacatgttagaaacaatgagagcgtgaatatatcgagacgttttggacgggacgggacggaacatcgtctggctctgcgcgtaggtctcgaagaggacgaagaagaagaagaagagaggaaaggtccttctgagaggacatgtcagaggtgtccttgttctttgtttaaggtgcggtatacggagtttaagaacgatatcaaaataaaacaaacagaaaatggactcggagaaaagaacggatggacaaacggaaaaacaaacgaaatgaaacaaggtattgcaaagaaagaaaacatttgggggggtttaaagagagattctcggcggaagaaaaaaaagcatcctcgagggataattgttccggaaagaaagggcggcactcagtagagatgtatatccgaacgaaccctcactcgaacttttcaaaaacacgttttaaacaaaaaccgacagttggaaaatccagagctggctttccatgagggacagcagacttccgagtgaagagtggggtaagaaaggaggggtaaaatgaaaagcacacgacacgtggcttggctggtgtttatcggtctttttccatccccgtgctttggatcaaggccgtgttggtctttgtgacaaaccaagagcctgagtacatggcacgctcttcttgactgtgtgctttccatcaccaaaaagaactgataatgtgaaatatagaagaagaggaaagaaggatccgcgtagatcggcgtatgtcaaggtgggtataatatatagagcccaggaacattccctcaagttcctactctcggtttattctctagttgtactctaaagtatatacagcgagaaaatgagcggatgcaacagaatatcagagaactgcaagtgctcgatgaggagcaagagccaggcggaggaggaggaggaggagggagggagttcaaggtagtatccatgcg

SEQ ID NO: 2876 - DNA, 20447 bp, Xanthophyllomyces dendrorhous
tccatgcgggatggttccgggcggttccccaaaattctgtaatcttccaatctgattagcgcggctttattttatttcaattcctcccaactctccttgcttcctcgtagcccatgctcctcccatcgcctccctgtattgaatggaatgaaaccgaacgaacgacgcctcctttcgatgtcttctggattcacgtggaagaaccgtcgcagcgagagggatacgcaatgtgttgtatctgttgactttcttcttttttagccttcattattcttccttcgttcgtcggggtttcttgtcctttaaaaaggccagcctcgttcagtcttcttcgttgaacagttccacaaaccacgacccactcagcatatccattcgtccattcgtccatccgaccgtctgatagattctttttaacactcatctatattcgtcgttctactcctctgcatccacttttctcttcacccgcatctttgtcccctctcgcacaccttctctcacacaagtcaaagaaagagaagaaagtttcataaacaataatataataaaacaaagattaaaagaagaagagtacagaaattaaagccatgtgttcgtctttgacttccgcccagagagcagtcgttcccgtgagcaacgctcttctcttctctttccctctttccctcttctttctcttctccttctcctcctcctcctcatgttgtcaacagtcctctgaccgaactaacccatggctcgtttcactcccaaccagtcatcttcatttgattctcctgcttccttctcttgctcatcaacaatgactccggttccgacgactcctataaaggcagaagagccaacggatgccctctcgtctgctctctccgctctttctttcattcctctcgactctcctcctctctccgacagacctgcactgcttcccagcctatcgtcgtcttcttcgatagaactcactgcgacctcgagttctacaggttcgagctcatgttcggattgttccgactgcgcacgaaagagcgagttgagagacatagaagagatccatctagatctcatcgcccaggccaacggaaaagcacacggcggcttccctggattccctctagggtctgtcggtcaaggcgcaactgccgctgcgggcgtaggagggagagctaggaagagaagagaaggaaagaagacgacggatgagtcgacgtgatcgttcggaaggttccacctctttcgacttgggcagcatcgtattgtttctattctttccatcatgcaacacaaaccatccggacccatccagcatttatttcgtttaatttcatttttctctttcaccatgaataataaacccccgtcatcctcttcttcctctccttagcgccatcttctatctcttgattcttcattctcttttctcatctcttgacctctgctcttcaaccagccatttccattattttctatcgtcatctttcgcatcttctcattcacgagttgtgttagtgtataaacttaaataccctttcttgttctatatatgttcttctcatcacatcgggtgttggtagataaagaacgaccagaaggatcaattacgtcataagctcaagagaaagaagagaggaagtcaacaacaggaacaaggaagaacgatacgaaacctaagatgaaaataagtgaaatcggagactgagagagaggaagtatgaatagagtttggtaatagaagagagcagaaatttggggtccttctcgggaacgatcgacctaggcacagcggcaacgatgatggtaaaggcaggcgtgagagatatacatttccgttcaagcagagcctccagaatagactttgccgaaaaccttgatcgcgaaaaagaaattgaaagaggaagaagagaaagtcagacttcttctattcttctctctccctgttagtagaagttctcaagaggcgaggaatcaaacagcccgacctttgcttggaacacgtcgtagagggagagcgcgccagcaccggctacacctcgtaggatatttgccccttcagaattttctccccatcagagtaacggtttttcgagcagatgatagagatcgagaggaagctgttagcatcatcgttcgatggaaaacaagggacaaaaagaaaaggcaggaaagagggacacaaaccggcccctttgaatagaacgctagatccttcgtgcttgacgacacttcggaaggcatccatcgtcgacttgtataccactccagatccagaggtcatcatcatcctccttcggactgatgcgttcgagatatttcaacaaccaagatgtaacgaaacggtcagaatcatcggtaggccaggctcaaggccgatgaagaacttgctagtatcgagagggtaagccgctagaccaccgatcgtagtcacaccccatccaaggatgaacgatgccaagaaggatccttccaaagatccggtcacgagcaccggcttgagagagtctgtccgtccatttcgtgcgcgaacagtccaagagtgtcagaagtcttcttaataagatagtccgagaagtggaaagacggcagaccataaagaccaaaagctgaacagcgtccaacagaaaagagtattttgacttgtcagtatatcaaatgaatattattaaaatggctggaaggtaagctcaccggttcctctatagacaatgatcccagcaacggagggctagtcaacccggaaagagaaagaaagaagagaagaaagcacaatcacacaacgcccagctctgccccgtcttcagcatagaagtctataccgatccccaagttgattgagcaacaaaatgagcttacaccaaaccccctgtaaagcccgatgactccatctgaagcaatggttttcctactgtagtaggtaaaccgtaatcatttagcgctcaaacccgttcaaacgaatcttttcttttatagagaagattgagcggaaatgatgagagaagacctactagacatcgatgatcccagtgaattgccgttcacccccacgagatgcgctctttgcatcggccgagagcctggtccgagcgtagtcgatactatatacaaagacgcctagcagacgacaagggaaagaaaagtcccacaagtatacatgtatgaatacatagtcaacgaatgtgaagataggatctgaagagttgcaagactgactggatgctgctcccgcactggctccagaggcgacgttgccggcgaaccaagtccaatatccctcggatcgcttgaacccaaatagggctttgaagtaatcctctataaagtagatgaccaaactcagatgaattgcccttcagttctggtatctgaaagaaagacagaaaagcagagcgtactgaaagcaaagttaagagcctgggtaggaaagtaaaggatgacgttcgcgccatttcctctccagaaagagatgatcccttcgttcctataagttttgactacgtccaacaagggaaaacatgatcgcgaaagagaaagagtaaggtatgctcttggattaaagaactccagaagaataaggaaacgaagaagcgccaaccgaatgcgtcggctattccagagaactctcctgaccggagttgaacgaggagctttactcgttcctatcaaccagcaaggagggagggaagaagtatcatcagaggtatactgtttctatgaaaaccaccgcaatggtactcacgagaggagctgcaacggtcttgctgatcgaagccgcgagacctcccattctaaaacccatggccgatatttcaatagatagacttcaacaaggtgtgacaaaccgggttgcgcttacagaaaatcaatctcaaagttggattttggttgagtagacatggacgaatgatttattgattggagatgttattcggcgttagttatgtgagatattgacaaagcttggtcagatatcagtttcatctcttctcagcacataggatacaatcttttatgtagcattttgaaacggaacggagaagaaaatcttgaaacgaggccgtgtgttcgtgaagttgaccacacacggtcaactccgattgtgcagaaggccctatcagtgaatttttggttcatactagagacacttcagcatgagcagttagtcccaattctgcagatctaatcttttccgtgttccgagagaccaggtgggtttggaatcaccatgtaggggagtgcattcaaggctcaggctgaaccaaaagtcgaagtacgtcacacagctcggacttggtcggatttgactcacgtggtgtcattcgccacctccgctccgatccagaacgtcagaggcacatggtccaaggaagatagtcacatctatcaataattctatattttaacaatcaatcgagctttgctagtggcgtttgagaaggaggagaaggcgttgatggcgcagataacgagaacgggttgttcattaacgttgaagggtgtatgatagtgggatgagggtgctcgtgtggccgtaatgaggaatgaggttcgggatgctgggcctcaatatcgacgactcgatcgccgacggcatggttggcataggagaggctacgtgaagacagtaaggaacgagcctttcttcagctttcttctagaatcactataaacccactaggggaaagagtgttgaacatactaggtattccatcctgtgacgcggaaatgatgggagaaaatcctgaatcaatatgtagctttgcagctcatgaacgaaataggaaacggaagtttctgacgtacccaatccgacgccctggaggaagagacctctatgtgccaatgggatgatggagtatgtaaggaatgctgtcggaatgctatgagcagtgatagtatttggttggatttaaagggtacaagcgtcaggtttaggagacatatgccgtctcttggctgaggcctgaaattaagacaaaaagggttccaactcacaaaagtacaccaccgctcaggtagattggccaaaatccaacttggactctctctattgcctcgtgaacggtcttgccctccatcaagctcatcacagacagaaacatgcttacactccacggaccccagatactgattgaatcagacccactaggatgagtgcatgaaacaaatggaccatcgaaagtcaaaacaaggtgacatacgtttggtcaaggaggacctttatataaaacataattcaaacgagtaagcctacaatgccgacagaaacaattcagtgaaagtctgaatgggtgaaagaagataccttgctaccaagagcactagctttgcttttgaactttattttatcaacgaacttgaaccactgtgctagtaccggtgcatggaagatgaatccatatgctgcgaaccttccggagcgggcgaactagaggtaagggatatgtgtcaatcgttaaacaatattcagcgtctctgaactcagttgatcggattttaaattgagaacaagaacctacgtcatgtttttcgtttctctcgaatatcctttgagagaggatgtccccagaagacatgatggtagctgcgactagtgacctggttgtatctagatcagaaaaggacaaccacggtcatatcttgtcagaacgattatttgcccttactgagctacaaagaggaacaacggtgtgtaaatctgaacaaaagtaacccacacggcctcttggccaattgaatattgtaccacctccagggcatgttagttcgttatatatgtttgagcaagtagtgtcgagtgagcgttgaaggtgagtaatgaacataagagaaaaaagtgaagaaaaaaaaagttggaaagattagataaagagtttttgataattactgttattcaaaaatacgcgtctaagctaagatagacgcgacgcgttttgaaccactgatttccatttgctcgtttgtgcttcttcaaaagcccagcacatcacccttcctactttctattcgctatgaatccgaatcggaagtcgctggcacccattgttcttgcgccgcacgcttcatctgttgctcactcttcttcctcgtcatcggccccacaattatccgcccaggattcttttgatggacgatctccttttgacagagaacgagatcgtctactgagcgagatttctaaggttcgttctctctatttgttttaattcttacttttcatgacatgggcctatagagttaacgtcagtgaatattatattaacaaccaccaacacaggacttcgaagaaatcttgggaaatgcaaacgggtacaacagaagattagaagaggcattgcaagtcggaggagggtttaagcatatggccgatttatggggtttgtccacttctatctaccacacttattgttcctcctcaattgtgtgttcttctctctgacatgattgtcgatcgttccatatatcgcttgcaggcagattcggggagctcatgagagaagtaaatatatcgcgttcttacggtccatcttccatagctgacatttctcgctcattcttaattctctatacttagggaaaggctgactacccagccaacccagatgatactcagatcacagacgcttcaacatcctccgtagcccaagatcaggtcccttcaaacactcgcttgaagggcaaacatacaaaataattatacaaatacactaactctagctctcggtcgtcaggaggtttatcatcagataggcacagagttgaatctaagagcttgttgagcaaacaagagatcaaatgtggcagagagtcgatggaaggaaaagcgtctggagcggacatcataccccttaaccagagagaaggcggcgatagctttctgtgttaagaattacatacatatgtttatctacccatgttatcaacagtcttgatgaatttcaagacattttgttgaacacgtaaagttacattctcgggtatcgaatcatgagcattgactggctggcgcttcgacagttccgtccttcgacagtatcttttccgtcttctcctctttcatcaacttcaataggatcccgatgatttttttctccagatcgagcaagataaactgagcattttggtttgtgtagagagaggttcgcgtacttgttagagaagatgggaggtcaagagagagaaggatctgaatagatagccgttttgctattattgatacacgagcagaagcagaagagtaagcggttgtagcatgaacgagaaggatccaatctcatttggcaagcgcatcaacgaacctattcttgaggatagtccgagagctatatcagatgacccggatctgaataagggtgtagccaccggtggtcgagtctatccatggcaagcagttcagaagagcaccaatgcaaatgtcaacattcaggaggccgagagcatatgttctacatcccagttaaacggatccttactcctacggcaggcattccacagctccactcttttcccaaattgacactgctggccctgccatccgaattggccgctccgacccaaagtaagagagagcctttaagacgagttatatgaaggaggaaagatggggaggatgggtcgagaggcggtaggagatgagtttcggttattatcgacgggcagttcatcttagcgcacaataggacgaggtcaagaaacgaaacgggatgatggcaagctaaatggctatatgtgtgtgatggtatatggctagaagagaggaaataacagaaaaggttttggcaacgcgcacgtgaatgatcagcgtcttttcccttgacttgtggcaatcccaacttgcatcatacgacaaccatcgactttcgacatcactttgctctcttcacatccttctttggtattttgatagagcacaccgcggtctcttcctgcaaaacatctctctatacattaggagatcaagatggattccgaactttctctcgaagagacaaacaagcttcgaatttctttgggtttggcacctctcggagaagggccggcaaccaatgaagaaggcgaggtcgttctcgataaagaacaagaggcagaggcgaactatcagaagcgaagagaggaagacacaaaggcagctgagaccaagtgagtcactttaggtttcttctcattaccccaagatgaagaggatgatatcggtctcacggttgaaggtggagaggattatcttcaattatacactcatcatccgttttgagataccatcagcactgaatctttactgaatgcttcctgttttcaaacagagccctccaggatcgaattaacaagtatgttccctcgtcctcactagtctccaagagacgcgtcttgtatctgatttttgggctacatatccttattctcacagagtcaagaacaaacgagagcttgcagcaaagttaacgggcactacccttggagaagagtcgaccggatccgctgccgcttgggcaaaacaggccaagaagaaggcgaaacagttagcagcggagagagccttggctgaaaaacgagcgaaagaccaggaagagttggatgagttagggaaggcagaattgtattctgaaagtaagttcaacccttttgcactatataccctgaatgctgtgagctatatcatcctttcaaacttttcactaattatttttcgttcttatttgtttttggtttcgtatagaggatttgagtggactcaaggttggacatgatgtagacgaatttgacgaaggagagcatatccttacgctcaaggattcacgtattctcgatggagagggtcagtatcttttacatattctccgtcttgccactctatttgacatggccatgttgtttcgtctcggttatggtttttcagaggacgaactcacgaatgctgatcttgctcgagccgagtttgatcgtaagaaggcagagctcaaaaaatcacagaactacaccggttacgatgatgacgaattcgatccctcaacgtcggcggtaggaatgaagaagaaagtgttaacaaagtatgatgtggatattgatggagagggcgaattggtgggtctaccttatcgcgaactgtctctgcgctcgcagcattcaggatgcttacatcagtatattttacgttgtggtgtgacttgtagggcttcagacttggtggaacagtggcacctaagaagcggcagttggcagaagacgaggacgatgagttcgactcgggtgtgaaccgaacacttcttgctggtggtttgagttatgaaagtgagatttttcctcaaatcactatcaaatctttcttgttcctttctttcttggctttgaaatctgaccgttaactgtatgctctgcgctcgaacagaaaacactgaggtgtccgattatcttcaggaaggagatatcggattcaagaagcccaaggtacgccttctccgcgttattagccctccgttttcttttcgccacgaaagctgataaatcacttttttgatattttttgaatactatggctgatcagaaaaaaaagaagcgctctgctcgagttattgaaattgatgaagaatctcgagctccgatctcatcaacaacatctccgaatggagaaggctcgatggaagtggacgggtctggttccggtccatccggcgtgtcaacgccgaacccgccggtagaaaactttgtggatgatgacgagctgcaagctgcgttggccagagaaaggagaaagaagaacaagaaagtcgttaagttgacagctgaggatatcgccagacaaggtacgttgttttcttatgaaccccactttatcgactttgttgttctatggctgggggagggaagattcttgttccgtcagctgacgtctgcaaaaccattctgaccccacagccgcagaacagaaagcagaggaggaggctgcagccgctatcgagcggaattctcgcgcggctgcgaatgacaacatccatttcgatgatacgactgaattcgtgagaactgtccaggctcaagaaccagttatcaaagtcatccggacgtccagggctgaagtcaaagaagaggaggcagacattgatctcaacgctatggctgccgatgggaataatggtgagggcgatgtcgatatggagggcgatgcagacgatgatgaggatgaggcactagccttagcggctcttcgacaaggaatgagtgtagctgagatgagggcaaatattgataaacagctcgtcaaagaagaagcgccagaacagaatttgagtgttagtacctgttgccattcaattcttggccctcttgtataacttgtcaactgtgtatatctggtgggttctaacttgtttctcggcttgtgttgtgatagatcggtactgctcaagaagcccatattggtcgaggaatcgccggagctctcagcttgttgaaggcttctggaaatctggccgcaccgacaggtgaagatgccgaccgagaacgaactcagaaggagcgagacctttggcttgctgatcgtcgtcgaaggttggctcaacgtgaattggagaggattcgggctagaggtgaaaacaaagaccaggcgacgagagagtacgagaataggatgagggaacagagggaagcggctgatgcgctcgagagcttcaagagttacaagccggacgttcaaatcgtgtatcacgatgagtttggtcgagagttgacgcctaaagaggcttggaaagcacttagtcatcggttccagtacgtcaacaattatttattcttcatctctgttatccaagagaaagaaatttcactgatgctcgtggttgttgttatcattccaattcctacagtggcaaaggttctggtaagggaaagactgataagaggctcaacaagattatagaagagcggaagcgggcggccatgtctatgggagatactagtatgagccgaaatttcaccgagaggcaggaacgaacaggagaggcctatatggtccttacctctggaaacaaagggtatgtgttgatctttccaaatataacacccctatcgtgcacgtctgacttgcatgtcctatttacaatatcctatcttcttacagcaccattggagaaacgtcggatggcaagaaacgaaagtagagtgtacagaacatacaaacgcgtgtgcgtcgggcttggatgagtctgtagtcttttgatgaacgatgaaggaggtctatgtcgtattcagatctgttgttgtccaaagcttcatgtgagaaatcttataggatctgtccgtgttcgacggggtcgctactcagacaaaccagagtgtcctattgtaaatgctacggaaataataacaaatacagagggttgatggtcaagaacatcgtccattgtgggggacacgacattcccggtgtggggggttttaaactattgtcgtcatatgtatgtagaataagagtaaccctaactttcccaatgtggaaaaacttgcagtcagatgattgatccttccggtcatgccggagttctccagccttaaaggcagcggggtgagtaagtaaatgtatcaactcacttccttcttatccatccatctaaacctaccttaccttttgtgtccgcgaaaataatcagtaatatgtcccttcgaaccaacttgctccgttctgctttgcgcgctcagcccaaagccatcccttctagggtgatggctaggcggtcgttcgcgtcggacggtaacttcaaggtgcctcccccctcccctgccgccgtcaacgcttccaagactccgtacgtttttatcgttttcgatctgacgtctcatatagtagagcagcagcacgtactagggactgatagagtcattcaactttaccttcacagttatttccttggaggattaggtcttgtcctcatcggtacgttcagaatgatcaccctgatcagtctttgacctccatctacggccaatcacagccctcggatttcttaacctctttatcgccatcttcatcaattcccttgtttccgccatatgtttgactgattcactggaactataacacacgccctgctcctttgaactcgtttaggtggtgcctactacttttttcagccgggggtatccgtcaaggatcagggcaagaaggttgataccgccgttcgatccgtcgccgcgtcggtagagggcaaggtcggacttcgacgaggaaaggaggactacgtcaaggtctacaaccgacttgctgagctgttggatgccgatgaggacaatgattatgacgatggtagctacggaccggtcttcgtccggctcgcgtggttcgttttgtcatgctttttgtctcagatagaccatctcttctgatgggtgatggagagatccttgtttgacttactttctctttctttttcttctttttatcaaaacaaaacacattcttgtttgcaggcacgcttctggaacatatgatgcagagaccaacacgggaggtagtaacttcgctaccatgcgattcgagcccgaagccaagcacggcgcaaacaacggtctgaaccttgccagggacagggtagagctcgtcaagaaggagtttgactggatctcgtacggagatctctggaccttaggaggagtggctactattcaagagatggccggacctcacgttagtcaagggtttctgtctttgtttgtttgattccaacgcgaaggatatttccagctgacaaacatctcgggtaatcttgatcatgccctctcaggttccttggaggcctggacgaatcgatggattcgagtcagatgttactcctgatggccgactacccgacgcatctcttgcccatgatcaccttcgacagatcttctaccgaatgggattcaacgatcaggagattgtagcgctcagcggagcacatgctttaggaaggtcagtttatgctcatttcgtcgttcatatatcatgacctgggcactttcattgaatacaattctctatattgttctccaggtgccacaccaaccggtctggattcgacggaccttggaccttctctcctacaacctttacgtaagtgtttgttaagctattgacatgccaatgttgtctggtcttacggtctcctaacttgcgggttcctctatagcaacgattacttcaagcttttgtttgacgagaagtggtcttggaagaagtgggccggaccaaagcagtacgaggacaacagcaccaagactcttatgatgttacccactgatatggtgagttttcttgtgttctctcttcttgttggcatcaaatcgaaagttccaaaataaccgactgcatttatttattgtgttaggctatcgttaaggacaagtctttccgaaagacagccgaagcttatgccaaggatgagcagcttttcttcaaagagttcgtaatctctctgttttctcttacttccgatgttctttacagagagtagtctttgttgacatggcatgatcaacatattagtttctcggctgtgtttgccaagttattggagcttggtgtgcccacttcccagtgggcgggagaggcttggacgatgcccactctggatgagcaggcagaagctaagaaatcggcgtaaatgttaccatctctagttccgatctctgtcctgccctgttcttctcttctggtttatccacaggttccttgttttctgagctctttttatattttcgggtatttgtatcatgaacaaagatatatgaatctggtttgtttgtggaagacgaattcgtgtgaagtttggctatatcatgcacattgaagatggatgtcagacttgaatttcttttctcgtcaaccaagtttaaaaaataagaacgattttcgttcaaaaaagatgttccgagtagccgtgcaggtttaggtttgaagaaaaatgagaagtggatacctcaaaacagaacaataggatagaacataacaaaacaagagtatcactcttttagtctctatagagacaattcagatctagatactgattgagtatgcctgtgaaggtttgttataggttcatcttgttttcaccagttcgctccatcaattcggctcttggcatggcttttttttctttgggggcgatcgccaaagtttaatgagccgtacaggcatactctctacgaactccactgagttaaataaaacttttgaaaacacacgctttgagtgcgccccagaggtttcatccggtatcaaaaaaacaagagtgacagattcagaagagaaaaggagatcaatggaagaaacgaggatgtttgatttgaatttagcttcagcttggttcttctttccgtaatcatccattcaatatcatccggaattgaatgatcgccttttatccagctttatgggccttggcaaagagagtcagctctcttcatgcctaatctttctggctcaccggatcctcttttggtcaaagcttctttgatggtatcgtgtggatgatcgcggctcaggaggaatgtcacatatgttgcttgggtacgtgtgggatagcccgggagtttctctcattgtagatctttccaaaatacgcgaagagaacaacagagattgtcaaaattcgaggcctttttaatcctattctgtttaataaaaaatattctttctgttttgtagttatcgagtgatctgcaacacgtttccctcctcgaatgggtccttattcattcttagtcgacgctcacggtgggaagactaccgacgaaagacaaactggctaaaaacaaacaaaagcgggagagaacgggctgaaaagaaaacttaaatggaggcaaatgaaacagaagaatttagaaggagagacgagcgtcatttgcctctgcatttcacgcgaaccatcgtcatccccgttcactaaatacccacggatcaccactcacggccttagatcatagagatcaaaccccggctaaaaagcgttatatctcccgatcatattcaaaatcatataaactccgatggcgtgtttcaaacctttaacagacaataagccgttcaaaaatagtatacttctaggtgcaaactccagaggcgctatagttagattaaattcactcggtccagccgatatggacggaatccgagcaagaacctattggctgaatgtctctcttgtccttccttaatctcttcgaccaaaattcaggaaagaaagagggagtaaagataaactccgtgccttaccggttgttcggttggtcttggatgaacacataccttctgcacagcggcgaagcacgagaaaaagagaacttgcccttcatttcagagatccggtcggctggtcggtctttctttggattgtctctccatcaatcgatcgatcccatccgaccctccacctcttacttctgaagctgagcgcgcgcgtggtccccgtcccgaacgcccggacagcgttcaagaaaatccccgaagagaaggtgacagccggtatgaatccattctgtttccttttctctttctttccctctgtacatctcgctctttcggttcatttgacttttctcacttctgtttctttcttcccttttttttcgttcttgtgcttttctacccctctactttctgtaggttcaccaggttaaacgaccagagagcgcctgatactgtccgatggtcataacctagtatcgacttacgttttgagcttttctttggtgcgagcatctccttttcttgctaaacctcttcactcaattcaaacctttcgactccttgtcttcttccgctagactgttttctttattctccgaatcgatctctcaagttccggcatttaaccccagcccccttttgggactaatccgtcacctcataacccttctgtttttcctcatccgatccacacgccctttccattccatcaacccttggcttttgtatgggtgactccaaaacctcacgcctcatccagactgaccggcctccactgccttcagggacaacccgtcacattcagttggagacggctaaagaagtcaaacccagatcaggcagggtgcgtttcgttttccttggtccattttgatccttctcccaagttcctgtttgaaagggcgacacgtgcatgtacgagttcattcgtttctttgtcaacaaaggataaaagattttttgacgatcaagccttgacattgaatttatctggttgaacgactgcaataacacattgagaaacctcattagactacgactgacatacgttctttctacttttcttttccctcccccttttctgtctcttcttctttctctttgttccgtccaaaggcctcagcctgtgcttgtaggccatgtaaaaagtgagcatttttcgcttctgaatagtccgcgctcttatcccgctcggaatcaaaatgttcgcgcaggagagaattaaacgaatcgcttgtccgtccttctcgggacttttcattctttttatcttttgctatccattttttcccgtcttcatagagcccatctcgcctgtgatgatagtaggccgtgcaaaagatgcgtcactctgagcaaagtagacctatgtgtagacgttgttgtaagtttcggtcttgtcggtctgttttgcaccgagactagctttctgattttcctttgtctctggcgtgggtcattcatccttcactcctctcctttcagcaaaagaagcggggacgaccgaaacttcatgccaatcagaactccacatcagccaattcctctagatttcgaacgcctccaacccaaagaggttcggttacgaaccgaacctccagaatagcttcctcccagtcagtccggcaatcgacgtcaacatctcctcagaatatagggccatcctcagctccaatgtcaagagagtctagaccgctggctcaccaagatattggctcgtctgttctctcatccagttcgacttcatacggatactcctgttctgccgatagttcactgtcaccacgaccatcactagcatcaacaccagcgacaactatcacgttgatagccaccaccgatctgtacattctacgctgttcggcctcgtcgcttcaactcctaggtcgagaggcttcgtcgatgagccaccggtggctctcctcactgcttgtagaggatgatctttgggcaaccgaacagatcagggaccctctcacatatcctaccggacatagagttcgaacgagtcggtcgatcgaagaactgatcgagagattagatgacgccatgttggagagcccagtagagggaacgtcgtacccggatagagatgttcgactaaagagagctgatggttcatgggaagggtacaacatgaggatgcatcttggtcgagcaggaggtttagatcttgggttcgtttccaaatcatcttttgactatcgattaggccccacttatggcgtacaaagatgttaacttttttggtgtcttttcttttttgggggtggtacatctatactcttccagagatctaaacacgtattcgaacgcatatatagtaatctccctgcttcccctcctatcagcctctccgttcctgatcgcccaaacatttccccagccaaatcaacataaaaaagacgacgctcgttcgtccagtcactatatatccactcatccgagtccatcagccttctctgagcgaccaacacataaccagcttggtccttcgacttctaaccatcatcaccaccagagcaataaaaacggcgttctcattcctccatctgacatcgagttggccttcacaccggcatactcgctcagccagccgattaagcaggaccgaccgacattgccgccgatagcgcttctcacctcaaccttgccatcagaatcccagttgaatatcaaccatccggggcaactccgaccaatgtcttcgccttcttactcaagctcgctattccgtcgacctttcgacaccgatctaccggaccgagggggaagatcagacggaagaagagaacaagaacacggagtgcaggcaacctttttttcatcttcggcctcctctttcccttcgcgttcttcgtcgtcctcgttttcgtcttgtccatcctacgctgtctttcatgcacccatgaatcagaccatacaaccggttcatcctaaccgatcttcctctctggtatctttggtatctgaccagaggtcccccccgttcctctcaaggcgttcacacccgaattttcttccatcgacctatccttcctcagcctcagcttcttgcccattaaaacggccatcggtagacttagcactgagcgcgacccaagctcaaagccagagagactcttcgttttcaacagcctcatcactctcggaaccttggactagaccctcaacctcgagcgattcagaacgaagaagttcctcaatggttgaacttccaggtctcgagacgttattttctaatgaatctggacctaggcctggttttggaaccggctcaagatcatttcgaactagaaacgtcggccttggtgatggcggtgatgacgacggcgcggcaggaatgaagacaaggccaagtgagttgaggatatggagaagtgatgaggatgtcaccgggccgttgaatggtcggtcttgaggaatgtctctattctctaattggtttctcagacacacatagacatatacatacacaaacgctctccctcccgttcatctttttcctttccgccgcatcacatcgcatcgatcgccgcaatataaaaaaatccaaaggagtgctactagtttcctagggttcacagataatcccttcattccttatagttctggacttgtttctttctttgcatgtactataaacatatcttttattcgctttcttcgctttatctatctgtctatctatctatctacctgtctatctatctatctatcttttgtccaacgtattcatcccaatcctttccttttgtctttcgtgtatcatcgttctcttccaattctttctaacctctcaaaagatccattttcagtcttaccccattttgaatctcctccgagcaactctgcgacgaatctgtacaagcctctgtcagtacgagccacagctggttttctctcactttcaatagacaagtcatgattcttatggtctattctttctccacgtgagatacattgatatcaaaaatccttaatccctaggtgctacacggataaatacagatggtttcgttttttgtttgtttattcgtttgtatgcatgatctagtgcttggcatccaatttctgtagagattaaaacgagaatgtcaaaacaatggactaacgatggcaaggaaaaccaggtatactggagatgatgaagaacaggaaggagcgggaaaagaacgaaccttgatggcgagctcgtcctcaatctggagctgctcgtcaataacggctcctcgggaaggctcatttccgtgggatcgagcggcctcggtagcgaggggctcgggctgggcatcctttcgggcctgctccttctcggccttctcagcggcggcaagggtgttctgtaagagcagcgaaaaagaaaatatctggtcagactatatcgccgtggaagaaagacgaaagggaaaggaaatggggaatatcagactcaccttgatggacctctcatcggtcttgtccaagagggagtgagcgttctccttaccctcctcgaacttctgagcgtgagcgtctcggatctcctgctcctgagtagcctggtgctgatcctgctgggcagatccgtttccgtggtcggtgacagtggcggcgggactacacgaagaaaaggaatagaaacgagatggagccggatgcaatatcacaacgtgttcagaatattgcaagggaaagagtgggaggacgagaacagaacgtacgacataatgattagtttgttgttttgtaagggtaaaaaggggtaattctttgaaagtagttttgagtggtaaaagttgatgaagaatagaaagttgacccaagggaagacttttctggcctttatactaatcgagactttgttcgagaaggcgaagaaaagaaaaaaaagcgccccagtgacgatgtgatgacgtaactgatttcaacccagcgagtcaaaactcgatcactgggcaaccccagtcatccaaacgggggctccctcacggcctgaagtgcatcaagcgatggttgttgtctatagacgaacgatacattaatatcacctttcatctcaaccatcgttgcttgccatcttgtctcttgaccatgacgttccttctttgccttcctgggcgtgcgttttgtgttggtttgcctgtgttaattcacctcagcttaccttgcattcatactctttgcttacctcgcctcgcctcgccttacctggctttgccttgcttgccttgcttgccttgcctgccttacctgccttacc

SEQ ID NO: 2877 - DNA, 106985 bp, Xanthophyllomyces dendrorhous
  misc_feature (37044)..(37053): n is a, c, g, or t
cctgccttacctgccttacctgccttacctgccttacctgccttacctgccttacctgccttacctgccttacctgccttacctgccttacctgccttacctgccttgctttgcttttcttaccccttgtttgctcacatatcctccctcacctcttttggttacttaccgccctgaaacgctgatctttcaggcatttgtgcctcttttgattcctcgccctgactgactcggcaagttttttccgacatctcatccttttcctccttgtttttgttttggtcatatttctcccctcttctacctatctcttgctctgatgatgcgtgcctctggaggcttccccttcccatacctcgatggtttataacaggatcgatattttttccgccagactcatctacttttggctttcttcgtccttctgaacaaaacatctaatgtcgcaagtaaactttcccctaggcaagacttggcctctagatatccagctgtgcattctctcccatctgtccaaaccgtccagacaagaagcgtgcgaatcagatatagactgggaggaaattcgtctgataaatgcccgtctgttcaatttgatgttcgtcagttgggactggatggtgagcaaacccatatttgtctgcttcatccgattaggatgctcaacctgttcagatatctctttgaccctcagatttatgctcgacgcctgctatatcagacgatcgtggttcagggggaggaccaactgcaacgattcttatccacacctatccctcttcgactgctttcctacaccataacattccatgctatcggacgtcatcacctccctggttcgccgacgtgcattcttgaacacataaccgacccatttagtgcgatgagcaagatcgatccgtggacccgagtccacgggctccccaaccttaaacacctagccctcgattggccacctccagaagagattcaacgtttaaacatagaccacggtcactggctatcccagttggtcagcttggagatcacccaaagagaagggtcaaggacgtgtcggttgggtcttccgccggtcatgccttgcttgaaatcacttatacttcgagggatcaatcctgtgttgggtacatcccttctagaaagaacgtcttttccttgcctttcttctctttctctatatgttcaggcttcatctcatatgtcgtgtaacaaagaggaatctccaccggccgccaagcgcgtgctccaaatcgggttgtgaggggttttatttattgtactttatattgggtctctatcaaatgtattctatattttgtaccttgcgcctatatgcggatatatatggtcgtcacttaatcctcatagaatcaattcagagaaccttgtcggattatatgttatttgaagcgagttctagtggctgaatggttttggatgcagtgctagctttcgtgtcggctcggcctacgccgtggtttccagttcgctcccaagcatcgctctcgtagaactcttgggtcctcttcttctctaatcattctcccatacataattccttctcatccttgctttcttcttattctgtttctgcttaactggattcgccctcttagcccatcatgctggcccatttgtctttccttacagttgtccttgtggttgcatacgtgagtgacctgtccttctgtgttggcttctgtcactttctatccggaaccgttcaggctaactcatcccgtctcctttgtctttgtgctatctggaatgaatccttcatctgcctcggttcaaattaactcgcttctgctgaggacatgttcgttagctctttcacaggtatcagctcgtttcggatcatctccttccgtttatcaggagtcactacccacggttcaatcagtattcaccactaaatacattcgaggaccaacgaaacgccggagtacgtctttctttatgtgatcagaatctttgctagtataaacccctagcaatttttcaagagttcctttccttgtctctgactcaagcgtcttctttgcttcattactccttgccgaaaccacgtgtgttcgactgggaaacaacagctttcatcttcaaactttgatctagagtcaaacaatatggccgctggagactctagacaagggcttgatgcagctggaagcgctgaaattcagcggatcatgagagaagaaggtgtctcgttcgatgaggttcgtgttccagacggcattttcttgcttgaggctacttgttgtcctaaactaagggggctcgaaggtgtgtatcgatggagagcgggtaactgacataaaggaggccttcttcttgtcctgattctgtcgaaccacaaccccaggctcgactcaggagacatcaacatctattggctcgaaataatgtcgatccgagcgggatgcctttggactcgaaagcaatcactcggctgtagtcgaattcacatccaaattctattattccgacacacccgccttcttgaccctcttcctgccagatccctcttctttctattattctatccttctattctgttctgttttgagaagagatagagactttagaaatggtatgtcgcgcctctatctatgggtttccatctagcatgtgagttggcacaagtacaacgaatggccgacgtccgtccctttctatcatgtcgggtctggtttatgtctcccttctctcggcttggttatcttcttctctctctatgtattcgaccattcgcatgcttttcggatatccttcctacaggtagatgtatatatatatatatatgtgcgtgtcgatgagtttagccatctggtaagagtgctagatcgggcatactagatgagacgcggctgataagatctgtacatgagagaaagactttggccatcctgcatcccgtttcatttcatcctcaaccaaccaccacacattcctccatacaatcagacatggttatggatctcagctgagagcctcatcgaacgctgactgatcaaacaagccatttaacgactgttcgtcaagattcttctctcctaaacgagacgttcagtggtgctttttatctgatttagatcagctctatcacaggttctgctcaaagggaccgttcatcttcagcatctttcaccttgtagaacgctatcttaagatcatatagcatcggctttctttagaatattccagcagacaagaaggtgagtgctctctgttcctatcggcttcctgctcctcttttgttcttttgattgactgacgatagtcgacatgttatttaggtctgatccttaaatcgaccagactgccttggttaattccctcctctcatcttatcttcttcttcactatcctcctccatcttctgctttcaaatgccacgagcgacccttccttcaaaccaatacaattgtcaaacagacgatacaaattcttctccgctccaaccgtcatattctccttcgatccagaacggcctattgtccgccgagaacttacccacctcgagttcctcttcctcttcacccgacctgtacctcctcagagattccggcacgtcctcttcgtcttcttttagctctctggccagtggatatcatggtttccgttcggaaggtctactccatatcatagacgactcgaatggtcactctgggtcggccagaggcgatcacggaatcggtctcgaaacagagctcgaggatgggttcgcgaggctgctagtgatcgatcagggcccgaaggagaccctagggatcggtttaaggttgagcctcgagacacaggccgatgaggatggtcagacggctgatgaatcgcgttcgtgatcatttctacttctcccttccttccgtcggctaatccggtcttttctgatctcctgcatacgggtgaatcttactgtttccctctctttttcttggatctgactggcgggctggaaattcacccggatgcaccgatactgcaggctcgttgaatatcactcagaaaacaagtcttcttgctccgaaccatcttcgtctctcggattacacatctgctacgacactaaaacccaacctctccttccctccctctccggtgtcttcatcttcgatagagaacacaatatcatcagccgcctgttcatcctccccttctgttccacagactccattcctcagacaggtttcttcaagatcgttcgtgtccaccacgactacgaccacgatttcatgctctcctgttcaagcgtatagttcattaccaacgacttctcgaacgagtgtacatccgtggcagatagagctggccaatcatcagacaggcacgccccataagcgcgctcgagcggccagcgtccgcagtttccattctagtgaggaggagcaagaccaggaagatgacgacgacgactactaccaccaccaccaacataggttgagaatggacaagccggtcgtcgacattgccgactcgtttggggagacctttccttccatccctcggagacgaggtcataccactcccttacctcagtcggctcaacgacctgaagctagttctattcatagatctccagacctttctactcgggtccgtcccggcttccaaccgcttacttcgacttcaggtcgacctctaaaagggaataaagacagggcgagcggtcctactaaatccgctcctaattcgagcttcaatctggctggtctgaatccgcccaggccttatacacatcgggcacggtcccgatgtaggacgagttcccaaccgagcccagtcgctgagcctgttcgttcaggaggggggttccgccaggaagtagcttctctgttcaagagttttgatacggctgctaccactgctgcctctgcctccgggtttcgaaccggcgtaagacatcaagatgacccttcggaccagacgtcatcttcttcgacgttggcgtctgatcaagcatcgaagatgattcctcggacggtaactgatctgatcaccgcaccggtcataccgattgctcaaggatttaccctactcttcatttctctcgctaccgtactggccctttcgacaatcatgatgggctcgtatggtctaaccgcctgggacgaagctcgaatccgattgagagacttacagggccgagtacaagaaggaactagacggattggcgaaggcgtaagagagggaagaaagctcgtcgattatgcgatcgaaggtgctagagttattggaagtgaagccggtgtcggcgctgatcgatttgaaagagctaatatgaatccggataaactcactggacggccgagaagatcgagcttcattagttcaagtcataccagggatcatccgttcgagcaagttcatacttcgctctggaatatcatcgggcagatcatccctataaagatgctgaggttccagtgcacagattcggcgatggcttctcctcccgaaggtgagcatcttcgaagaagaccatcgaagagacctgcaatgagtcagaagggagcaaagtcggcggcttcgaaggattccccatcgttatctgccttttctccttcagcatctttcttctcgccttcttttctcccaacagaccgcgcggacgtcaataccttcacctcttcggggacttctacctggacgacaacgtctaatagatcttccaagtattctttccaatcagaaatcagaaacccattaacggaccgatcgaccactcggactttttcgtcacctcttttgggaagtcctgtaggttcttcaaatccatcaggccgagctccgtctgaaagtcaacttaggtcaaaaacctatccacaataccaaccgaaatcccaatctcaaccgaaatctcaatctcaatctcaggcgaaagccaagaaacgagcgcttccacctcgaccgccattgaaatggttgatccctagcatctttctaactctgctagtcgcattgggcgcgatggcctatcgattttttggaggcaaggctgaggcgcacgtaggtaaagcaagggagagggagaaggcaagggagaaggcaagggagaaggcaagggagagggcctgagaaagggtcagagtttgagtcggctgccgatgccgcgtttgaagagaaatgtgagctagcaaaggactcaaagtgagcaggcactttatcgaagactcccttcccggtcgtttcgtcatttcttcttcttcttcttcttcttctttttcttttctttgtttatttgaagtaaaataaaactatcgaattcttcgaatgcgcgacgtctctctacagagacgaatgcatgtatatccctcatctcttctattcggaaaaaaaaacttttccgtgcttttgttccaccatcgtaacgacctcaacgatcttattcattcagctatacgtatatgcatttactgtaccatttgtagaacactatccagtctataaactccgtcaatttatgatcaccctctatccatactcttatccatagccttggttgacgcatcaaattcctctcttttctttttcgcctccccttgtttatacatccagaaagagataccgttgcttctgtactagtatgtaagattacactctgttcagtttgtttgtatattgcaacctctcgtatctcgtacgctctcttctcaagattcttctatctctcctttctctgtaaggcgtccgtttactctactagtctcttcctcttgtgctttctcgaaacgagtcatggactgatcatgtatgctcctcaggtccgacgggaaaacaaagaaatgattttcaacatatatatatatatgaatcctaggaaagatagagagtgataatctttcaatttctaaatctatcgatatatatccgtatttgacgcatcagaggagagaaacaaatagaccaagaagcgagaggcgagggaatacgaggagggcaattggaagaaaaggggatctatcggctgattgtcgtttgaaggggcctttcttctttccttttagctattactacagatgatacaacgaatgagcctctaagacgattaacaatagagctgagctcaaacgagcggcaagcaagaccgatgaacgatgtgagggatgggacgaaagcgagaaagaacgaaggaaaacgcagacgcaatgagaaaagagaggaaacgtttggagaaggccctcacttttccttcaaagctttggtttttcacccaaggcaatcttttcaacaggtacatctccgcctagaccctctttccaacctgggtcttcggttgagtcataaacgatgaccggaggttgaaccggtaggtctgtcgagttgtcaaccagacgaagtctatctatgaacgcttttccgtccgatgaaggtttagagagtgtttgaacagaaacaggtgatttaagtcgggaattgtgaatcttgatagacgaaggttttatttaaacaaaatcaacatgaaaaatcagatgtcagcattcgagctaagcacttctcttcttttcaaagcataagggaagggagaagaacaaccaacctgtgctcgagaaacccgtcttccagtcttgatcctcctcttctccgctcgatgccacatcacgtcctcgtctctacaaaacacaaacaccacttctaccagataaccagactgtctgaactctgtcatcacccctcggaaccaatccgaacaggaaagagagccgtcaatgacgactgatcgatgctgttgcctagcaaccgtggtgagaagttcttggagaagagaggcttcagcatgaagcaaggttgatgcgtcgtcggggtttgagagcaagtagagaggtcgttcaggaagtaactgggagagtttatccgggtctatcctgtagagtatcatggtatcatgaacaccagtgaacgagatacagtcgtgtgagcaagaaattgaacgatccttctatacgcggtctgaccagtttatgatctatatgtttgtttgtcttgaggtaaggaatcaaaaaggaaacatcaagacataccacacgaaatcatcttccagccgaatccttccatcttctaagaaagttctcagcacatgccccttcccagcgcccatgcctccacttgtgaacaacgcgaccggctttgtcgaccgacctagttttgtggatgttccattacaacatcccggctccaaaggatcggcctgtttgtttggcgacttacaaatcagtgttgaatcctcctcgcagtccgagctattcgtacagctcgatgtatctttgccacttgactcgcgtcccgtcgaagaattcgaacttggtgtcggtgatcgagaggaaggatgacagaaacgacattcttctttatgtgattctgctaacacaagcgagacgatctcgtcttgaagcctatatagttgagtcgaacgcacaaacaagcccaattgaaatcggttgttgaccaaagaaggcgaggaagaaagaaagagacagggagagaggaagatgaatatgcagagacgcacgctcgccgttccggacttggattccgatgataagtataatccaaccgacttctcgcaaacccccatggtccatcatgcatctccggtcttgccagctcttctagactaagattcttgaaatcagcgtacagatcagaagttgaccgacggaggtcttcttgtgttagaaacggaggcgggctgccgagagtcgtcggagaaattaaccggttcggggatgtgaaaagcatgggtgaaggaaagagctggttggttggcgagagagtagtcggtttggatggaaacgagatacttcgagtaagccggattggcaagttgaatttcgtgctatcgttgtcgtttcagcaaaaaagaacgggagatgaagaacgtcgaaaacaagagaaggtgaaggaaacgggcatggagcattaagattaaaaccaaagaaatgttagttagcaagaataactggccgaaagatatagatctgggcttatccattctgacaactctctaatcttgagttgacaggtcatgaaagaaattgaagttatcgagagcacatacctaagtagccgcaggctgaacatcaaacaagagcaccaaatcgagctcggaattaaggaatgaagaagataaagagaacggaaggaaggttagtcgtaagaaagtcattggttcgctcggcttcgtctgacgttgtcgtatgtcacgtgatcggcaggcccacgcgcacgcaataagcagctcttagaatattcagatattcagacattccggcattccgttttcaagtcgaagagtaaagatcatgaaatttgtgagatgtatgtatttatatatatgtgattggcagacaacaagagatgctccaacatagaagaataaggaggaaaatgatggtaacaacacagatgcccgaatgcggatcgaaagcgaaagaaagggaattgagtatgagtttacaacaaagcaaagaccagcatgaagtgaatggaagagataaagagatagtccccgagtaagataagaggaagagaagaaggcgtctagattaaatctggggaccagccaaaagaacctcccgcgacacaccatcctcgtacttcttgaaagcctggttgaacatgccagcaagcttggtgacctcgctggtgaaggcatcttgcgacggccaggccttgagagggttcaggatctctgaaggcacgccttctacggccttgggaatggacaagttgaaggtagggaagttttcgtactcggcattggcgagggatccgttgtgaatggcgtcgacgatggcccgggtgtatttaagcgggcatcgtcggccggttccgaactttcctccggtccatccggtgttgatcaggtaacagtgagcgttggtggccgacatcctctcagcgagcattttagcgtaccgagcagggtggaggacgatgaagggctgtccgtaacaggtagagaaggtcgggctgggctcaacaataccgtcctcagttccaggggtcttggaggtgtatccagcgataaagtggtaggaggcttgctccggagtaagcttggagattggtgggagaacaccgtaagcgtcacacgtcaagaataccaagttcttgggttgcgagtgggagagcgaaccaggcttgtggccatcaatgtagtcaattgggtaagcacatcgagtgttctcgatgatgctgacatcatcgtagtccggcgctctgttggccgggtcgtaaaccacgttctctaggatcgatccaaaccgaatggccttgaaaatctcggactccttctcagcagacaggttgatacacttggcgtagcaacccccttcgatgttgaaaactccggtatcggaccagacgtgtctgagaaacaacaaaaggtaagcgaggcggtcggtagaggcgagatatacagaaaaggatacttactcgtcgtctccgatcaaaagtcgcttaggatcagtcgagagcgtactagaggaggaaatcaaaagatagattagtgaatgaaagaagaggcatatacaatcaaaaagcgacgtacgtctttccagttccactcaatccaaagaacaatgtcacatcgttctcgtcaattccctcgttggccgaagagtgtaaactgagctgtccaaacttgacgggctggatgtagtgcatgacggagaacactcctttcttcatctctccggcgtactcagtaccgaggatgaccatctccattcgcttgaagttaatctcgactgaggtagtcgaggtcataccggtggtgaatctgttggctgggaattggccggcattgtagatcgtgaagtcgggctctccgtaagtctcgagctcagcctcagtaggtcgaataagcatgttgttctgcaggattaacataaacaaaaaagaatcagtcttggcagtactaagaataactgcattgcacctatgaatgcactcaccatgaagagggcgtggtacgctcgggaggcaataactcggaccttgattcggtacttggggtcggcaccggcgtatccatcgaaaacgtctgtcgaaaaaagaattgaaaatgttttctttagcgacagcgcaaaggatcaagcaaagcaggaaagaatgatagtacttacagacgttctctcttgtatttaagtaatcaatggctcgctctcggttgatctcaaaagtgtgctcgctaaagcaatggagaggcaggagcgaaggtcagtagatggttcaacagtagctgaacctcagaaaagtagaatgtaggacgtaggacgaactccatcttgatgtttacagatccccaccaaacatcgtctttgctggtctcctcgtaaacgattcgcttgtccttgggcgatcgaccagtcttctttccggaaaagttgatcagcgcaccggtgttggagatgatagctccttcgtttcggatggcatcctcgtagagggtggcgactggagcattacgcttaacatctacagagcggcaggagagaatggaggacaggtatcagaagagagtagctgtatagactgggacagctagatcaggcgacttacggatcttgtccctacagtgcgaaaagatgagacaaaaaggatgcgcgcaagagtagatgcatgaattttgttagtgggttaggtgaccaaagattcaggcgcctatgtatgaccgtctattgagagcaacaactgcttacatgtcaaacccggcttgggacaacgaagtgagctcttcaccgaggaactgtttcgagcgggaagtacaagcgagagagcgatcaagcacaagagccgggtaagctcaaggtcgtgtgcttcggaagacggactgagtgataagcgggggtgaatcttaccttgtagttgttggacattgtgaaaaagggctaggactgagatgggactatgtgtatgtgtgtgcgtgtgtgtgtgtgtattctgaggttaggcagaagggcaagggcaatgatgaggagaagaagaggaagtcaaggatggatatggctaaaggggtatatataccatggacgatggtcaatcagctggtctggcatcaaggagcggatatggaacaactgagaattctttctaccagaggcttaacccgaaaacggaagacaccattgttagctacaagagaatggaaataagcacaagagaggcatcattaagcgggtagaacatcagcatctagagcaacgagcactgagagtaggagcaacatcgaggtatcgtcagcacgagcagtaaagcgcctgagtgaaaggtcattcaagctcgggtttatcggatatcggtcagagccgggtatcatcggcagcactcgagcgagatgtaaccaaaatagtctttggcggattcccgctcgctggttgtggtgtcgtggttacgcaatcaagctactcgagatcagccgactaaagccttgattacttgaaccgggtctgtgtgtcagaaggcggtttgacatcatcacctcttgcgcgcgctgtctttcctcccgtttccggatcgatgttgcgcgcacacatctctatgtactaacatcatgctgatcaagagataacactggttgcaacactccgacatgatgatatggacgactgatcggatggatgctgacgatgagaccttaagatctcataaccacaatgaaccagtctgactatactcatgcccatgctcatagacacagacacaggcacaggaacaggaacacgcgcccacatctcttcctgttccttccttcagaacgacaagtgtttccgccctggaagtaagccacgggcaaaaccggagccgaacaatgtcattcttcctacaagagacatgccctttcgtgtgggcgtgaacagatagtgtctggctcggaatggaaaaataaacgatacaaagaaaagaaggcatgttctttccatttgtttgcttcaaaatacttcatgcatctccatccaacgttatatccgacgacgttctcacccgactgttcctcagatacgtcggtcggcctggagcgaaacatcgggaaagacttccgaaggcctcttgctcgatcccacaagcaaggtctctcttggctcttccaccgaaagattccgaccagcaagtcgacggaagaacgatgggagaaccagaaagggcacaaggtgagggtatcatgaaaatttatctcttctatctctaggcggcctcctggtcgcttactttcttctgacccgatctgagctcgcctttctttcaccttggaactccgaagcgcccgatcctttccccaatacgcccatccgtatctcgtcaaattcggccttctcaaagcgcgccattaacgcttcccagccccgtctgccgatgtcgccctggaattcctcgagagatacctcttagatccagccctcattttgaacctgattccttccagaccgacacttcgctcccattctctcttgtaacagcctcaccacgcgaagcatatgtttgcgcaacccctcaatcgccatcgactctctgtcggtccccccgaacgaaagtccgacgtaaaaaccggacatcactcgttcctccatctcagaaggcaggcaaccagctcccagatcatcgacgagaggaaaacaccagtccagtcgaaaaagcggtatggaaacacgtagaagcgagaaagaacgtcgttttgactctggtgagggatagttcaggagaaggaagaagacacagtctcagggcttctgtcaagggtgtccagagtgcaaacgagttcgagtactggtctgatgttgactcttctgaagttgttggccagcatatatgttgccattgactgacgatagaccaatgatggtcgatcaccccattccttaccctctcagcatacctctttctcgattgaactactcccaaataccatcatctccgacatgtataactcggaaacagctaaagagattgttctttcacaagcgcaagtctcttttcttctgctcaagtccctaagaacacttccgaagatgttatcgcttacttcttcgtcgaatttatttaccaaaccccatctcttattcaatcaccttcatttccacttcttgcgcttgctttttttttctcctctatttccaagcctgtaaaacgcagtcgaagttcgcttttcgctttgaaccctgcagcgctttgctttccatctgggtggtgacgtgtcatgctttcaaggatttcatcggcaagatcttttcttctttgaaagaatgtagtggatggtttgttgtacatatagaagaaagcgagctagaaaagtacaacgcccaaagatcgagtgacctgatcgaaacatacacgagtgaaacaaaagacagaaagacgagagaaatacatacgcgtgcacaagagaagcgtgggttatagtttcgcaacttgtggatgcagagaagtgtgtcgttcgttcacaatgacgttttctgttgagccttgtttcgtcgacaccggcgagacaatcggccaagctgtcaggtcagccattggaatcgttacagatcttgccaagtcagagactcgtttcgccgcttaaccgagacaagttatagaagaaggtaaactccgaaagacttcagtacgcgataaaatgtgactgctcgggtatttgaaaactcacctatcgcgttcgttctccttgatttgccttccctcctgaacgctcctatcttatctgcccaactattcagtttatcctcatcgacttttggatccaaccctacgagcttagctttggatactctccggcgtaaggtcagaccaagttcggcaaatcgttggagagcattttgcaaagtaaatgtggagatggattctagtgttgatagatcccccttgttccccaattcaaacattaaactcgtcacgattttatgatcttttaatcaagacccagtgctagaaaaggtgaagcaagataggactcacctgccaaaaaagtgtttttccaaacaactgaacatgactcaacagatccttctctgacacccatcgaacataccctgactgtcgtcctgaaccatctttgggctccaacagacttatcagcgctatggctgctagccagtaactctcgatgaacggccagacgagaaagcagaaaaagtcaaatgtttcccttccattgaggcgttcggtctcgctaagcgagacgagctctgtttcgttgtcgaacgaaaccacacgctcttgctaagaagtaccaaacaaagagaagccaatgctgatatgagaggttgtgcagaactgaagatctataaagtataggcctctcacaatcaaagtatccatggtgtttcgcacattagcttctatgccttgtgtggagaagacgaacttagagggaaacgatatgaacaaccgacaaacactggtgcaaactgaggaatggcagatcgactcacttctagcctgagaagatccgaaagaaatttgacctcggagatcaaatccgtaagcttcatcgcgttcgaggcctctactttcttgacttgaaggtacagtgtagccgagaacagacctgtgtttcgatggatcgcatacataaaatcagaacagttgaccttcctcagacacatgcaagaaagacgtatgtcaaaactcacattcgctgacgaacaaatgtaacgtctggtttctgtatagagatagctcgaacggtttcaaaggaaataccgtatcatctatcacttcgtttgatggtttctttccgatcacatctttcatgacctgtagagttctgaaacatgtgcgcgcgggtcaaacaggaagattagagacaacacagagcacaagcagatgaaaagcgatgacgatagcatacctgttaaccatctcgggcacagtctttcctccaaaatggactacacggccgccccgccgaataatggcagcaataagccattcaaccctccgtatgagatctttagtcgacacaccctgtcaagaaaagagaagatcgaaccgagggtaatgagaaaggaaggataagatagtggtcgaatcgattgctagccatctccaagcagatttgaccaattggcatatgaattgatgtgcctctcggtcgacttacccgagttgttctcaatgtaagtagcgcggttgcgactaaagcagatggcatagcgacactcgcagctgtatcaagccagatcattaccagatatatttagtgagcatgaccgaaagactgctaatcgttaattacagtatcagagattgtatgtgtatttcgcgctttcttaccgtttatgtccgaaagcactttgaaccccagataacgaaggaaaaccatcttgtccgcttcattgcgcttgatatcgaatgtctcagtctttccttcatgcacagccgtcaaccttcgcgctgtttgctcggccatagtttcctttaacgagtaaggtgtttgaaaccgaacgtcaattctaccaagtttgaggccgagaacagaggaggacgaaagtagaccggagagcgattcaggctgtttgggaatgcccatcatttcctcctttcaattttttatcaataagatctgtgagcactctatcgaatgagagtcggatgagcaaatctacttaccacataacttctgctctcgattactttgtcgtactggatgctaaccggcgccaagaggacatccgtcgtacgatctatatacaggtatagcctaaatatcttcacggtataggacagaaagatcgaagaatactgcttaccagaaataacagcattcaaaatatcctttgaagtgtagagtcgcagtttcagtctatgatgttgtagaagtatcagcagctatgtacaggaaagagaacatttacctttagaattccaaattttggaggaagtaactttccacttcgagaacgggtcccttcgatgaaacattccagattatgcccacgctcaagaagaagcgagatgtattctctgttcaacacgtccatcatcgtttcatccagttaacatccatctggatctcattgcgagctatgatatcgggaagaggaatacagaagaaacactcactttgctacaacgggatagagctcgtcatctccccagcttcttcggataaacattgctccccctctgcgcagaagtggacctaccactggaagattcagattgtttcccgcctcaaaaaggaccaaaccagacagagatggaaaatcagctttgggtttatgcatcggtcgattacatataagtcactcactactatgtgcggaagtgccaaccctatacgaaagcatctatgttgtccacgacaaaatatttcagccaaacgatcatatggctcaaagaaggaaaaaaggatcctaacagccatgagatcaacagataatcgatgtgtgacttgtgacatggcaagaagatgatggcccgcttgttctttgctgcaacagcggccacctccctaagcttaatattttgaaggaacatgtgtcaggacaatgatcacttgaattaaggaacgtccgggaagaatgaacattactaacttttactagttcttcaacgtttacatgaattccagactggtataatctagccaacattttttgtagaacggcaccgtagactctaagatagacgggtcagtcaagggagcatacaagacaaataaacggagaacgatgatacgcagagtaagaaaggatttcaagttttctagattctatgaggagaaaggaggagcgcgcacctgatcaaccgaggattctctacttttgctactagctcacccgccatcttcttcgttacttcattcaatgccaatgtggccttctcctctagcttttccttgtcttgacccggtcgaagtttcatttcttgtactttccttcgagccagtactttgatcctcgatctaacatagggcgatgtcaagagatcggccatgatagatgcatagtaacctggatatagaatctgattatggagataatcctcaattagttacacaacattagaggagaggcggcttgtgaggagattaaagtaggctcaactgatgctcctagaggctagacaagatttggttcccataatccagcggttacttcacaaaggattatgacctctatcaagaaataattcaagaaggaaatagacctcacgttctcgtaggatctccatcgtcttccggcaacggcatcatcaagctgtctgagaaaagctatcggatccgacgtaacggaactctcatacttctcactagaaatgaagccccaagacatccggaagaagtgaccgtccggtcatcattctgaatatgagtttaaactcgtccaaacagcttgcgttgtagaagagcgaagggacgatcgtcaagaagatacccacaaaagatccttcactgggtgctcactgtcctgaacgtcaaaataaatcgggtccaatgtcggtttaggaagagacgtcgtcatttcctgagcggtttctttcgtatccaaactatctatgagtgtcgaccgtagaaaatcaaaagatgtgtgtatgattggcgatccaggattagagacactgggttattatccgaaatgctggaccggcaataatgaaagccgatgaaccgtacgttacctaaaatgaaacgtttaatgactaaatctgtaaaaattgactttgttctacgtctttgttcatctacttaagtagtgtcgatcaaatcaaacaatgcaggaacaaaacaaattcatgatggtatgtttataatgtatcgatacggctagacggaaattgaggaggaatggggtaaatgagaacaaaacagaatagaattgtgaggcagatgaagcaaggcaagagggggcccttagttatttacacaattggaagaatagggagagaaggcaagactgtagaaaggcaagacggcaaaggaatcgccgtgttctctagatctatgatttgtagaagaggcggctaggtcgccgcggtgtttttgggggggccggacatgtagaacaagaaatcgaaagagacagataagaagacaaggaaaaagaaaagtggtgaaagagcagatagaggataacaacaagaaagacccaaaaagaaaagtggaaggaaaaggaaagaggagaatgaagagatagggtggtaaggaatcaggatgagaggatggaggggaccgaaaaggaggtggatgattagggtcgaaggctctactcgagcggcccttgtctcctctcatcacttatggacacagcgagctctatctgaccagatcgtataccaaggtaagaggataccggagcaatcggcttttaactgctctcggtatccttcttctcccacagtttgctgagcacgccttcgaatccttcctttcctagtgctgcattggcgacgaatcgttccagcgacacagtctctagcttgtcggccacagatttccatagagaacctcgagcagagatctctgccgtctgggagaagagcgttgatgattttggagaggaatgggaaggagagtaggtgatggattcaagtacagtaaggtattctgtatgttgagcgggacataacagtggatggacaggccaatagaatcaatatcagactctatccaatttgatcggccaaggtatatgcataacacaaggagtagatgaatcagataaaagaaatgcagatggaaccacggacgtacgggacaaggatagattgacagagaacatcgtcatcttttgcgacaccgggtctacgaacgagacctctcgaacgtatgcatcctcagttccacctaacatctgcgatgggccaaacgccaaggcaaaaagcaatcggttgataggttagattgttatatctagtagacaaaattgatatttcgtaaagtatcataccttgatagcccatctctgatgattagaatgagaaagaaagttggatgtaacatcgtgagcaatccggccgaaagcgaacgttacgagaggacgggacggagacggaacagaagatcaattactcaccggtgcgctttgtttgcaccctataacgcgttccctaagtagaccaaaccatagacatatgagatgaggcattagttattacagcttgaatgcatgcaaagattgacaccattgtggcaaacgattcggtacaaagaggaaagaggggaagagcagaggggaagagagggttaactcacgtccgcacaacgccggtggcaggatccaccgtccggccaatcgtatccacactgataacatgggccgttgccgggtttggatacttttgccacacaccagatacaaccttggaccactcgtggctattattcgggtgatatgtgatgccaattcaaagacacaggtgagcatagagaacattgagaaacgttagtggtcgagtggtggcccgacaagtgtcaactatataaagagaaaggcaagaatagaaagacaaaagaaaacaagccagaggaacaacaggttcaagataagaccaaaacacttacgggaagctgaaagcctgagagaatatttgaaccatggtttcaaggaagaaggaaataagacaaagaaggagaagaaacgaaaagttatccgatcgtaagaagaaaggaaagaagagagaaggggagaaaggcgcaaagagttgaaatgaaggcgctgacgaaaagagcatggaaaaaatcggatcgtcggatcgtgtgcgcttggttacggtcatcacgtgtaaccaccgccatgctccgctgagctcctcagtctccggaaagacgccttcgatcaaaggtagtgagcgtcctatggatatcgctttgatcgtttgatcttttgatcttacttatagttctgttcataattggaaaccccgatgctctgctctgctcaatctgctacaacaagcggatcatctcataactcatcggtaacatcacttggaaagctcggtatggaacgagcaatatcttgaaatcccgaacatcacttctgttgctggagattccgatgaggaagaaggatatgatgttgtttgttattttcctaacacgtctttggcgtcatgttgatctctgttgccttctgtcctcgtcctctttcttcatatatcacactcctgaacgaacagtgataggaaacagacacatgagagaccgatcctggccgttacatctgctggttatgtattctttactgttacaacgtttgcgctcaaaaacctgttgtcttagagtggtcttcgtcaggtgcatttcatcatgtttataatcgtacatcaagcctagcataagataccggagagggacagacagaaagaaagaatcaagggatcagagaactaggtagatagtcattgataaacgaagagggacattcataccttgatctaaattcaaacggcttattcattttgaagactttccagcgtatcgacccactgagccacagactctacatctaaccgcccgctatcaacctcctggatagctcgaccgactgctatcgctccctttattgatccagctttaatccagacttgagcgttcgttccgatggcgcactcgaaggcaactcgcgaggaaagagatctgaggagaggataggatggaaccaacagcctgtacattcaataaataacaaataaataagaagacaaaagtaaaagatgtttattatgtctggttcaaactgactgcaaagaagaagaagaactatacaaaccttctggacatctgaagagaacaagtgaccgtcataccttccttcaactcgccaaacccgtcagattttctggtggtcgcatcaaaacactccaactcaggctccatatctctgttcgccaatgatatccgagcatacaccagggatccaacctggtgcaatcatgttcggttacgcgaacaacgtcagagtgcaagattgtcagtcgaacttgctcaatcattccagatcaattagggatatgagcacagattagtggaaggatcaccttgaggttaggcttgtttcgcttagtagcaccttcaaacgctagagcatctagagaagcgtggtgggcagagccgatatctactcgataaccttcaccatgacgggcaatgacggtcccgatgactgactcctgggacgcaggcacgtactgaaccatagtacagacaggaacctagttttttagagatgcattctccagcaccaggcaggctatcgaggctgaaagacttacgcgttttccccttccttccacataaattctctttcctgttttgtctgatccaaactgacctgcctttgtggcaatcagaagctggttcgtggacgaactcgaagaggcagttgatgagaaccgagctgatgtttgaagagttccaggaccaagtttgctgatagaggaggaagctaccggtaaggtatctcctggaagaaggatttggagagatgtcatgggtattgagtctatgaaacagtcggagggtaggcctttcaagagatttaccaccctgagtcctgataaaaaagctgtttaagccagcgtttgagctgcagtaagcttggttacttcaagctgctagggttatgatcatatacttcagtagctaatccgaggctgacgccatcatcagtggctttctggcctatgctcatatcaggctcaataaaggtttcagatcgattgtctgttcgtaacccttttgcggtcgcgtatggacaaggtaggttttagtcgaacgcgaccaccttcaacatcatccatccttttctccctctctcatcatccttgatagtcttctcctttgtctacctttctcttcctctttatcagcctacatctataacacacatcacatcaaaagaaccatggccggtccagctagcaaaaagggttcttctgtaaagaagaccgaaggaagcaaggtacgtgtcgcgttctgatctactgcctgctcgtggttcaacatgtcttccttcttctcacttttttcacttctcttccttccattatctttgttacaaacggggctcatcggtatttcaaccgatcatcgcttcacaacttcaattctcttgtatcctatacttatcattctggtggaacttttggtggatgggtgaatcactcaatcgatgacactaagttcgaagtcggagacaccgttctctgcaagatgagaggctatccagcatggccaggaaaggtttgtacatgtctcttctctttctcatacgcgaactaattgatgctcgattctggcccaagtcaaacgcgtcgaacgagacattgccgcctttttcatgatattcactcagtcatcgctcacttccgtttttcctctgccaatggattggtgtagattgtttcggacgactccatcggagatgacgtgaagcgagaaaggccgtctaagggtcagttctggtgtatccggttctttcctaagggagatcagtgcgtgcatttctacctgccttttctcatcctaattaagaatctacccgttcattcatacatctgtaccagctgttaaagcgcgttactgatgtctcattacctcttttcttctcttcaaaaaaaaaaaacaacaaccgtctttcccttgtcaatcttcttgaactgtctcccgccacgcgactttatcttccatccactttagctcctgggctcaaggccgagatctctctcacctcacctccgccgccatcaaagagtacgtcaactcagccaataagaaggcaggcgagcttctcgaaggatacaaagttgctggcgatccgaccgattgggaggccgagcaggatgaactttccaggcaggccaagatgtataatgagaatttggatgagcttgatgacgatgaggacgagccgagcagtactggaaagaggaagaaggctgcctccaacggagagaagaaggcaaagaaggccaaggtggagaagaagcccaaggtcagttctagatataataataataaaaaacttctcattttctctttgttggcgatacctttgtctcatctctccttgatcaccgttttcaatcaatcccacgcacagtctgatgctaccccaaaaagtgctaagaacaccaagaagaacggcaaagtaaagtcggctgccaatcttgagtctgaagatgaagccgagggcgacaagccaaaggaggccgcttccaagaaatctgctggagtctccaacgatcagagtaggtgtttcttcatctctggttctcttttgatgaaatccaggtttctaatgggtttactcatatccatctctttttttttctttctcctcttatcataattttctcaacgcgtctcctcatttcaggctctcttgaggccgagttcgtggttttcttcttctccagaaaggtacctgcaagtttgattaaccatttgatttgtattttgcgacacgttaacagcgcccaaaaagtgaaggattggcgacacaagcttcagcgtgggttcttgggaaagcttcctccgcaagtaagtcaaaaacagctattcccgggttttacggcgcgagaaaccctttttgacacgtgtttgggggtatctatcatctcaatttccaatttatcaggagaaggacatgcctcagtgccacgaatatttcaacacgattgaggcttatgactcgatgacggttgagcagctccaggtacgttttctatatgccattttgattgacttgttcattgaatgagagatctcacagattattccttctttctgcgggtcaatcgatactgtttacatattcgaaaactaaatagacttctaagatcggcaaggttatgcgaaagattgctgctttggacaacatccccaacgaaaccaaatacaacttcaaggagcgagcgagcaagctgatgggcaaggttcgtatgctcatatatatcgttggatctattttcatgggtttaacatctcaaccaacttttatcccttcttcaacaccgcgccaaaaagtggcaaactcagcttccttctggctctgctgccgaagaggccggtacgcccaccaatggggcttccactagcaaaaaagccactgctcctgaatcgaccaaatccaagtctgacgacaagccgaagtcgaagtccaaatcagctgcgcctgaatctgaatccaagcctgtgtcgcctccaaaagaaactgcgtccgaggagaaagatgctgctcctgaggccgagaaggaggttgaagccgatgccacggagaagactgatgcggacgttgtgatgaaggatgaggagcctgtttccgccgctcccgaggcgcaagagaaggtggaggaggctgagcctgcaaaggagagcgaagacgttccggttgttacggaaaagaaggatgaggtggccgccgaggatacgacagaggccaagccagaggaagctgtaaacgagactgctcctgcagagagctcctaagcctctgtcgactgtcctctcgctctcttcgtcaatttgcttctactggaggatggcgagggtctttgtttgtcccctgctcgagccaccttcttgtttcccttacattctggtctaatcgtctgaagacgattctttcccttccttttcttttcgtcatctggtgcgctctttaccaagttttcactgattcttttactcccaaacatgtgcttgatcgacttgatatcattctgccattttcttttaccggagcctccttgttttgtttccttcttctaacatgtacatctcttaaatggatggctccctccttactatctttcatgatcttcatccttctttgaaatattcttttcctcctgtttctttcggataaaacacattcccgcttaagctggatcacactggtgacttgatgtcgaaatttgtctttcaggtctcatctcaatgatcccttttctattaattgagaatgatttgtctgaaatagagtgtcttttcgaaagagatgtttacaaaggagaacaaggctgaaatttcctccagtatagagaacaattgaataagaattacttactctgccattcaatttctctctatcacctcctgttctgacgttgagaaacacgcccagcgtgtatcatttcagattcttctcaactattgaatcctcttcaatatttaagagaaatgagttccagagtacgtcctctctagatgtctttgtttgatttgctatcctgctcggttgtttctccttcttggcccaacggcgcttgtgtcaaacgaccgatcggtagcccttcagcttctacttgttgtttccgtcgagcctggttctacattgactatatgcacacgctcatgattatctttgaacattctcatgctgaattataggcggatgcccttgctcgtctcaaggcctctagacagaaaaaagattcatcgcctagtgtatcgtccgtcgactctcaatcattcaacccggctgtttcttccaaaaacaactcgtcacggttttttccatcccaatcaaactcgtcttcctcttcccttaatggaaatcaaccaaacgttcttgtactaaatagtagtagtccggtcaagactaaaggatttctggattacgatgatgacgagcctattcccagatcgtcagcctatcgatctcaacccccttcgatcatcaaccaacatgcttcctcttcctcttctacaccagcgagttacactcaggattatattccccgtcctttcaagcgtcaaaacacatcctccagagaatcttccactaagccaaatccgttttcgtcatccgcacccagtcctgcacattcctcatcttccactcgaccaggaacaagtgctgtgagagcaaaggtgatcgcaatgaagttgggagactctggagaagtgattgatgtcgaccaatcctctgacgagctagcgactgaagactttcctgcgctcagcgatctcattcgaccttcaggatcaaattttaaggggaaacgtatcgtctcgaacggtagtgatggcggtggcgaagacaacgagacgatggccgaattcatcaatgatgatcctgtctcgatcaatagattcgcctcaatattttcgcatatcccaaagaagagggtcgaacgcgttctgagagagaacggcatggaatcatcaaaagcggcagacatcctgattgggttgagtggaaacgatgacgagattagacacgtaccaaagtcatcaacgatgaagaaacaatctgcgatctacgccaacaggaaggtatccgatggaggaggggcgagaatccaatctggatcacaatcgacaagtagatcttcaagaaatagagtttcgttggacgattcggatgccgaaagtgatgatgattttggaggaagctctaggaagggcaggggcatgcagaaatggacgagggatgaggatgcagaagagcagagcgcgttggtatgcagaatatctcttgactttaggactttgtgaggatgatggtatctcacctttgttttccgctcttatgatcatcaggactggttcaacagttgcgatcatcaagaactgttgaatgtgacgtgtgagttccatgttttagtctgatcataaggcttcacatacttctttgcattcgcataagtattccatcgactaatttgtactatggttgctatcatccgtattttaatcagcatgctccccggaccaagcaactattatcgtttcccttcgaccatttgagtctgtcgacgatcttcgaaccaagatgaccaagaagaaaggcgtctcgccccgattattcgagagctacatcgagctcatgttgggctaccataaggttgatgctgttctcaaaggatgtgagatggtcggagcagagctggagctcgcaatgagcgcattcaccaacagtcagacaaagaaggaaggttctgatccaaacgcaaatggcaatgggaagggcgccttggggattgtgcacgccgaagtggatgtcgagcaggcgcttaaagttgagacagatccggaaagaaggaaagcactgaaaggatatatccaaaaacagcctgaatcatttactgaaggaatcttactgaaggattatcaggtcagttgtgcacacttttaggtttaatctcaagacacggtgcttgaaaccaagctgaacgcactgccttcttattcttatctagctatttggtttgaattggcttaacttacttcattcgaaaggacttagttgcatcctagccgacgagatgggtcttgggttcgttgcctgcctctattttcttttctcgaagcataaagcctgactatgatcccatgcttctatagtaaaacaatccaagtcatcgcgttcttggctcacttaaaggagaggggaaaacctggtcctcatctgattattgttccgttagtgccattattttccctactaggaatatggactgaaactcacatgtgcaatctttatctcatcagagcttcaaccctggagaactgggctcgagaatttaacaaattttgtcccagtatcgaagtccagacgtactatggtccagcaggagagagacgagatttggcttatcaattcatggaggatgaaaacttggacgttgtaatcactacctatcaaattgctgctggatcgaacaaggatgataaaaaatttctgaaaaagatgggtttcaaggtgagcttcgatcgacttgggcttcatcgaggtatatgtttactgagattatccctttcattctaattcttcagtcggccgtgtttgacgaagggcatcaactgaagaactacaagtctgctagatatattggactcatgtcattacctgttcaattccgtttactgctcaccggtactccgctacaaaacaatcttcaggcatgtccattgttgatctgatgctctttcactctgtccagaatatgtgctaatagattctgtttactttgtctgccggtgattccttggaatttaacaggaactagttgtatgttcacctgctctcgctgtttcggcatgagccttcgtctaatctatccacctaactttgtttcgtgttatgccttggatcgaatagtctatcctcaactttatcctacccgattattttgaagacgctgaggattcccttcgtgcaatcttcaaagttagcactgactcacatgccagcttgttatcaaaacagcgggtatcccgagcgcagaaaatgatgaagtaagctcaaagatgtcgttgttacttgtcgttttgaagaagacaagaagacacacgcgagcgagagtactgatgtattgcacgatactttgttatgtgttttttattatcattgatatcaactcttagaccgtttgtccttcgtcgacgaaaaaaccaggtatgatctaatatatacgcccatggcgttttagcagaggaatcgctaacaactgttcgtctttctgtcatcaggttctcaaggaccttccgaaaaagatcgttcgggttgaatggtgcaagatgaccgaaagtcaatctcaattatatcgagaatccgagatttcatccagcaaacttctcaaaacgttagctgacgatgccgagacgaagaagaaagaaaagactcggaaacgagtgcgggacgatttggagattgacaatggaccggtggtggagaagaagactggcgattcaggaacaaatgttctgatgaaccttcggaaagctgcaaaccatcctcttctgttcaggagtcactattcagatgagaagttgaaggttttggcaaaggatataatgaaagagccggaacatagttagtcctatctttctcaacgctgtcacttttggatgcaatctgattatgaccttttattgggtctcttgtcctttcacttgtgtttgtagtggcgtccgattacaacttgattattgaagatatggaggtaagtcgcctcttctattgactatacattagtctgatctaataaacaattcttttctattttcctaattcgctatgcagataatgtcggatgccgaacttcatcacatgtgcgaaatgtacaaggctactcgaaagcactctctacccccggagtgtttcttagggtaagtcgtgcttcgattttgcctcttgccctggctgaggacagttttgctaaatacagatatcccttaccgattgtgtttatcctcgaacagctctggaaaagttctcatgctcaagaagattattgaagattgccaagctgaaggaaaacgtatattggtcttctctatggtcagtccttctcttctcattctattttattcaacaaacagttcaaacgcgcatgggattactataggctcaactgtatactactctcttcggtagtttactcaagttctcgatattttaaagaaagtgcttgaccaactgggtgttaagtggatcaagctgacaggcgagacgaaagtggacgagagacagagtctagtcgatgaatttacgaacgatacatcaatccaggttttcctactgtctacattggcaggaggaatgggcatcaatttgaccgctgcctcagtagtcgtcttgttcgtttctttaattcttcatttttcttggcctctatcagaaatctggtcacgtcgaagctcatattgtttgtcataacgtttcagatatgatcaagggttcaacccacataatgagaaacaagcggcagacagagcttaccaaatcggtcagactaaagatgttgaggtacgatcactctatgacttttcttgcatctgttgacaaggctgtagaacggctggaatgagaaaacaaaagctgatcttgcttctctttcgttgttacggatgatatattcaggtcatcaccctcctttcaccgggaacgattgatgaagatatcaacgatctcgctctatcgaaactcaagttagacgatgctgtggccggtagaggtgaagatgaggagagcgcggaagcggaaggaaacgacgagttagagaaagagagtagagtgaaggcctcattattgagcacgttgaggaacaagttaggaacaaagctagaggattctggaaagtaacttggatggtgtttatacctgttctctctttttttggtttcggttttttcttcaaaaactatatcaccctctctttcctctgtatatcgtgtctgtcttctgacttgcatccctcggttcagctcttttatatcaacaaacatacaatttaccaccgatagttctcccacatctcctctattctcatcttgctcgcttccatctatattatgtacatgtctatgcttcttgttgcgcgtgtataagtctgcacgattgtttaccaagctgaccaggacataggcaaggaaataaagaaaagggacggaattgataaattgcaggcccgggaaagaaatccgtcgccttgacgaccgaaaaatctacaaatccagcccatcactgaaattttcagcccagtcttgttctaaaagtataagaactcgaaaagagccttgttatcctttgactctcaattttcttccttcttttccttcgtttgttcttttcagtttcattctgtgcgactatatctgcctacaaattgaactgtactggtgagtgtctcctcttctctcttttttcttaccatttcttctctacccctgttcccaccagcctttcctattcttccttaacgaagccaccacatctaccctcctcgcgagggtacgagagcatggagatggatgaaaatgatgatgcaaatattccatgctaatacagaagctctgcccccgggtagcttgccgataactatattcgctctctaaagcacctctgattatctgtccccctcctttttgtttcttcgaaacttcggcctttccgttctgaacaaagctatcttgcaggttagaaatttgagagctgactcttgtttttgtttctgtcccatctataccttctcgttccgtctattggtcttggaaatataagacggaagaattgttcgtggtattatgataaacatatcaatgataacacattcttcgaattagaattggcccagtacttgagaatttccttgagcatttgcacatcagaccataagaacaaaaaatgatactttggttatctctttcggatcatgaagtgagaaagtcccttctgacaacgacgtgacctgtcacaaagaagatgacggtcacaacaatcggcaagaagaatcgtaggacgaaacttggtgccactcaggaagctctacagagagggaggacgaaatcatactatctatagcattaaagcctttttgaggtgtttagttcaatttccctcctaaccttccaaatctttccgatgacagcaacgtatgagagagaactcaaagtcgatacctcaacaagaaggcgtcacggggttctatcctagccgagtagtagttggcaatcctaagagcaaaggttcagcgagagagaaatcttatatttagtctctatccatcttgtggtacaaaacatgaaacagagagaacaacgaacgtatcaacgacttcaaattcattcttgacgtaaaaattccgagcgatctcgtttccaacctgacagtagacaaacactgaaccgatcttctgaccatcgggcgaggtgagcgcttgagcgcgatcgagcacatgcttcaacagcagggcgcctagaccttgagatcggtatgccggaaggacagccaatgtgagaatatgaagatctgatgttgatgatgaagaagaggtagcggaggtagcggaggaagaggtggtagtggtagaaggtgggaaggactcgaaccgagacgagattgaaccgacagggacatctgcatagtagactgagggatatatcgtacataaataatataatcagatccatgtccggacgatatgtacattcagatcgaaatacagattccacatacccagcttgttgaactcttccaaagaggcgtctaggatctcggtataatatttgttactgtacgctacagggaggatctacaaagaagggtagataaagaacatgtacgtttgagaggtgagtgagcatcgacacgtaagtcataagcatcgatgcacttttatctatactaacagcactgtttaattttctcagggttccactaatagcagatcgatcgaggagcgaattaagattaaatcgtgtccgagggaggttccaaaagataaagaagaagacaaagatgagaactgagaaggagaaagcgaaattgaagacgacggacggacacattgttaggagtaaacgaagacagtgtaaccctcgggtgaggtttgatagtcttcttagagtcaagagaaatcggggcggatacagtagactttgtgtccatcgaggaaggatcagcagttgtggtggatgaagtagcagcgctcatggttgatgggaggatggctaggtttgatgggatacagacgaagtgggaatagaagatactgtatgtatgtctggttacaaaccaaactgtaaccatcgcgttcttccttccagcgttcctattcctgttcctgatttccttccctgtccctttctctttctctctgcccaacattcatctggtgagcatcttcggacgaccatctcttcttttcgttctgaatctatcggttggttgatctgctggagaagaaggcctcgtcagctagatacagacagtttacaatcgctcttcttttggttttttcttcatcctgtagcaccaatgtcgtccgctttagaatacatcaacccacgagcagaaaccgttcggcgagctcaggctcttcaggtctgtagtctccctttgtttctctcctctatgtatcctcaagacggacaatatggtgtgctgccgtatgctcaagcccactctgtttttcggctctgttcaatctcttctactggctcaaacgaacgtatcttttaggtaaatactactggagctgtcggtctggccaacgtcgtcaaaagcaacttgggtacgtttttctccccttttcgcctgtctagcagtgtataggctgtctaaacagagtctaagctgatatctgcgttgtacggccctccatatataggtcctcgaggaaccatcaagatgcttgttgacggatcaggaaacatcaaaatgactaaagtatgatcccgtcttgacttgctttttttttctttgcttagttttgttccaatctgaccgtgtcttcccttctcaattctgtatcatctcacaggacggaaaggtcttgctctcagaaatgcagatccaggtagattatctcttcttctctcggagagttgttcttaatactcttccgcaccttacccttgctcatgtgcatatagctaacgcaacacatttctaatcgtcaaaacagaacccgacagcagccatggtggcacgaaccgctgttgctcaggacgaacagactggagatggaaccacctcggtcgtgcttcttgttggagagctcttgaagcaggctgagaggtatacatcggagggcgtccaccctcgagtgatcggagatgggtacgatctggctatgaaggaggccctgaaggttagtcttttcatctgctttcgttagctgagaaggaaccttcccagcattgttgtcctcctgtggctctctgagtgttgggttcatgatatgggacggttgctagcttcagtgaaagcattatctcgagaaagaaaaaagagatgtgctgcatacgtcagaattctaacttcgcttggtctccaaaacatatacacactctttctcattatctacgtctacgctcgctttcatctcgaatcatggtcgacacaccagttccttgacaccttcaaaattccttcaaaatccgatcgaccaacccttctctctgttgcccacacctcgctcgctactaaactccaccccaagctggctaccaagctcgcttccgttgttgtcgatgccgttctcgccgtccagcccccggcacccgccgagggcgcgaccggtgttgatgcgttccagatgccgatcgatttgcacatggttgagattatgaagatgcagcacaagatggataccgagactcagttgatcagaggattggtgatggatcatggagcaagacacccggatatgcccaagagaatggagaactgctttgttttgacattgaacgtgtcgctggagtacgagaagacgtacgtacctcatgatttcttctctgacatcttccacaatatacatcagataggcgaagtgtcgtactcatacttgcatgctcttttctgtccacagggaggtcaactcgtcgttcttctactcttctgccactcaacgagagaagcttgttgagtccgaacgacggttcgttgacgccaaactcaagaagattgttgagctcaagaacgcggtgtgcgatcaggatgtgaactcgaaagagaagccaaagacgttcgttttgatcaaccagaaggggattgacccgatgtcgcttgatgtgctcgtcaaaaacggaatctttgcgctcaggagagccaagaggaggaacatggagaggtttgtctgttgtttagcggttgtgctcgtttagactcaggctctccttactaatttttattgttattgatcgtaggcttcagctctgctgcggagggactgcccagaactctgtggatgaccttaaacctgaagtgcttggttacgccggtttggtctacgagcacacccttggagaagagaaattcacatttgtggaggagtgcaaggagcccaagagtgttacgatcttgatcaagggtcagtgctctttttcaattcgctatagcgtacatgactgtatatcgattctgattacggtatcttgggaaacgtgaaccattcttccatgatccttaggacccaactcgcacacgatcactcagacacaggacgccgtccgagacggcctccgagccgttaagaatgcaatcgaggacaagtgccttgttcccggagcgggcgctttcgaggtgtcttgctgcgctcacttgcagaacgagacaaagaagctcgcaaagggacgagccaagttgggtgtcgaggctttcgcagagtcgatgctgatcttgccaaaggtccttgctcagaatggtggatgggacgtccaggactcaatcgtcgctttacaggttagtctctcctgttctcctcagcttcttgctccctgtaaactgacatttgaacacgttttcgtttggggcgcttacaggatgaggaggctgagggacacgtcgttgggttaaacttgaagacgggtgagcccttcgacccgatttcggagggaatctgggacaacttccgggtcaagagacagatgatccattcagcgtacgtgctttcgttcatacctctctttctacagttcttgttcgactgttttctacatcgtattggcgcttcgaattggatatctaatactactgttttgtcgtaacgggttatgaacgaacagagccaacatcgcttcatcattgctatcgtgcgacgagatcatgcgagccggtcgatcgtcgtaagtcatcatttctgtcacccgttcatagcatcattattcgttctgtcctcactctgtttcattctccttttcacatcccataccgtagtctcaagggggacggccagtaaggtagtttagtcaaagaaaaaggaaatcagtaaagcgagtcagagaagaagagctataggagacgagggaagattcttagaggggcccttgtatccttatggaactgaaaattacaacacgaatcagaagtcgagcctcttgtgctctttccttttcaggaatgtcatctacaatgaaggccataaaaaccaaaggaacaacacgagtttacatgaagaacatagtagacagaaggcagaggaactgacaggaaaatcgataaggaagaatcgaaaatcaaagcaaggaagaatataaaagagcgtgatggaagcgtacggatagacagctgatatctcattgtgtctgcgagagaagaagcgaaaacgaagaaggcgtcaagagagaaggagaaggagaaggannnnnnnnnngaaggagaaggagaaggagaaggagaaggagaaggagaaggagaaggagaaggagaaggagaaggagaaggagaaagaaaaaacaaagagtaagagaaggcatgatgaggtaagagcgagtccattttgagaagaaaacagaagtaagagagcacaagaactacacgaggagagagagagcgaggagagaatgtatttaaacacacaaaaaaacctgtttatcttttcggtttagctgagatgaacagatcatcgagtgaatccgacccgtcagattccatgtctttgtcaactccgtcttcatcctcagattcagaaagactatcgacgagtcccttcctctcgtccgcactatcaataccaaaaatgggaaacccccaggaacgtaatcaactactgagtccggaaggatgaagggaagagaaggagacgcatgtgaggaagaaaaagaggaatacgtactaataagtctgggcttccacctttttagataaatgcgggtaatcctttccccgatgagaaactcgttctgattcgacatgttgtgcagagctgcttttgctgtctctcgtgctgtgctcagtcacacgtacacatatgcgcgagacggaatgacaggtagatggaggaagaggtaagaaaatacaagaggacgagggatgtgtaagagaaaaacatacgagaacgaggatgttgacatggcactcggtgatagtggtagtttgttgtcattgaatgtctctgactcgaagtgaccgaatttaccctatatccaccaaaaatagacaaacacattttcggtcaaatctcttcgtatatactgctaagagctccctttgtagaataagcgcagatctcacaatttgaggaggagttgaagagacttgtggtccgaacaatgaaggatacccgctcctttgatctcttgtcgaaaactctacagcatccaacgggtagtcttctggtatcgacatgatcgacatgtctcctccagaatttgatcgtatcccttggtgatatgtcgggctccgtactgacggcgagtgaagttgagtagaatgtatcgcttcctctgggtggcctgcccgtccgacacgatggacagtatcctctggatcaaatctcagcgtcccttgtctaggaggttgtgaatggtgtatctggacttgttcgcccggctgtgcgtagtcatgttccttgatcaccgacgtgtcagcagagcttgttcgagagggcggtcgatcggtaagttggtagcggggtatattggataacgcatatggatccctaggatcgtatccagcattaccgttgggtcctctagatgtttgacggctgcttacactacctgctcgacgagatcgagctcggatgatagatccaattgcaccgaagcctcctctgagggcgtccacaccaggttcctccgttccggtgatcgccttctcttgatcctctgttggacgctgggcagcgagcaaaatcgttgatttccgatcaagagacgtgagagtctttggatcaactttgctcatctggaggatagtgataccagcacagatgactaagaagcccagcatgatggtgattatctgtacagcggaggctttcagtcctttgtataggatgatggaggtaaccagagtacatgtcgtgaacgtcacataataggttggagtgaccatagacgtattaaacagctctaaggctttgttcaggaaattgatctctgtgagtagtgtcccaatgacgaatacctagattgagttcaaaagcgagagtcaacataggtcttgttttgctaagacgaaagtagaggataaagctcacgaagagaaaccagaagaaccagaatgtcacttggttgttgcctcgaatactggtcagaattgaggccccaagtccctgggtacagctgaccgacagtccaccaatcacactgcaaataccaatatgaaccaacatgtttgactttccgtactgtttagaaaataacaatgacaaaatacactgttaccggccaagaaccagtagaataacagtatggctatagtttcaggacatacccgcggaacgaggaagaggattgccagcacagcggataggatcatgagagccgaccaaactaagaaaccaggggagataaatagtttcatgaacggtcggatctctgtcacactctgctgttcgggagaattgagagcaatgaccacagagccaatgatacacaacgcgcatccaatccaacctaaatgaagttagaagaactaagtattgagtacgtgttgttgtcaaagaatctgtaaagattgtacgagtactgtcgctcaccaaagaaagttagactctcattcagaaagaacgacgagagaatcgcgcacacgaccacagataaagctcctaaaggctgagatttagttgcaagaacatccacaaaaaaaaagagcctgcacgttagctcatagacagatgtttcctccgaccgatctcttctttttttggggggaggggttttgagaaaataaaaaaggaaaggaaagggaaagaacgaacagtcactagaagcgcttctgtgaatgcatctgacagtagccgaataattctgaaagtggatcaatttgataccctctttgggtattttccaaagaacgatatatactgacaagctacaaagttgaatcttcgtagtagttcgagacgattgtccacattttcagctttattcgtggacaaatcggtatcaaaacggtgggcttacatttctcctagaaccatcagcgtcatctgttagacatgcatgataaatcggcagcatattgagtttacatatactctcgtcttctctggataaacaatcaagtgaagatagcactcactcctatccaccatacccagtctttgagatacgcatgtccttctccagctatcgatcccgactttgcctgtgctctaagtagccccttcttcttgattacgaagcttgctgtttgcgtatcagaccagaaacaagagcaaacgaccagatacgcgtacacttggcatatttagctttgtccttcacgagcgaccgacatgttctaagtttcttcatgcatgcaacgctctggagaacggagcgatagacagataaagcataaggcgaacgtacacccaatgaaaatacctgataagatggccaaagtgagcccgatgattctggagccaggacaagcgatcgttgtcggcgcgagttagtcatgaacattcagatgccagcttctcaatcgaacgacaagaaaaaacgaagggtcatatacgcacttgaaggaagcaggttgtccagatgctacaaaaatccatgaacagggaaggagattgcaaagaaaatttcgaaggtgaatgggtatgtgtgttttgatatacgcttctgcggctgagatgatcaaggggcaggacataccagaacttgtggccgcactggacgcagacgcggttgcagacgtcaaggttgccgacacagatgatgacattaccctgcttggttgtctatcaagggagaagaaagccaaggagagaatcgatgagtgatgcatggccgcaggaggagaaccggctgagctttggcaagctcgcggaccagagtatatgatgaccgacacctagagggtagctcgcaacgcgatgtttcaaggtctgacgaatgagctcacctggctgaaagctggggagctctcacttgagaccgaatatgaaaacagatagcaagaactaggggtccagagagatactatgggatcagaagcctacttgtgaggatgcaagtaaaaataggcgagggtgagggtcgaagggtgatgaagatcaatagcaaagaagaaaaaaaagaaaaaaaggaggttttgtttcataacatcatccttcacatcctcagaccatcctcagaccatcctcagtcgttcccatcaccatcaccatcaccatctctgtctttaggctgtcctcagaacatgatctattcactctatatatacgataggttggagccgttctcttttttcgccttgtggtgatgtaaatctactaatcgtttctagtcctgatctcctcgttcacttagacactgcgatatcgtgtattatcaatcttggcatcgtcagactcccttccaacgagcttcaccaggatctctccttcccgaagtctctcctcacgtatcactcagcccatccgacggtcagatcaattcagcttctgcaccaaagaaagctgttcatacaccatcaagtaatttcgctgcagctggttctcccgctcaggacgcgggtaagagcggggctgtcggatctggcaagggaggtctaccattcgatgaagaggccaagctagtttatggtgtggtgctgagcttacggaatatggtcaagaagctcaccggaaggtttgtctcttgatatctgggaccatgttcgcttcccctttggttggtgtagtatgcttataatcgctctatatatgatacccatcatgctctctgatctcaatcaccttcgcttcgatcaagtccgcaatcaaactttcaacactacgccactacgtcatacgctttacatctgtttgaacctccaaccggcttgaaattcatcttgttgacatcacccagcgtggactcaacatcagcccgaactgctttgcgaacaatgtggggcccatcaggagcctacggtcaatgggtcagtccaaacccagagaagggggaaaccgatggtggagaaggtggaagagaaaagagaaagggactggacagcgagtgagtgattcgtaatttatacatctctcagcatgcattgcgcttacgctgacctctgtattttcgtctatctctctgccatgatcctacttctttcgtcagacaattccgactagctatagatacccaaatgcgctctatgccatactttgcaacaccttgataatatagataaatatatgaattgtccttgaaagcaagccgaataccggtttgacctacgatgtgatatctatgcgtaaaatcattccatacaccttatctctatctacaatatgttcgtcaatcctatgtgacgtctctgaaactgccatgattctcaagagaccgtgtatgttgttggatagaacagctgaggagagagctggaggtcagagaagccggtatccatggcaacgtctctgatgctcaccggagatagccttcattcgctcgttcaacacccatcgtccacaaccgctctgtttgctctcctcgctctcgctacaagatggaatatgacttagatcctcgggtggagatcgtcagtgctatcatttattccttcttcatatgtaggaatggtttgtctcgcacaaacgaggccacctaggtattccttctctcccaacccaagcacaactcattctgctttcttctccatctttcgattgatctcgcacagacaaatatgatctttacctggatgatgagcgatgctatactggatattgctttagaatcgcacgctttcattcgaaggggaagagaagtgtgtagtatatgtggtttgatgtgagtagttgggctattcactacatacaactcttgagtatgaggtgaaagggattgaattatagtccatgtcgatatatcaacatatctgatcctttttacttcttctcttcggaccacagttgcaaacaaactggctgtatgtgattgaatttcctcccttccttcatgagtttgagagaagccgactacgggctcactcgggatgtcttctggctcactttcatgacctgggctcatcaaatatatatcaatcacacttcacctagcccacgctcctccgatctctacgtcggtgaacagatcatctacaaactctcccgctccaaactctcgagcgtcgacgcctgctccttcggctgcttttccgtcgtctgtatcgaaggacttcaacaatccaacgacagatcctagtagtggaaatgtattttataactgtattaactgcaaccgacccgttcgtcaattcctttccccttgtaaccctttgcctagcccagaacacactgactcacttctttcaagaatgataaatcttgcaacgaaaccgggatgattgatatgatggcgctcatctcttgagtagacggttagcaatcgttacgcaccccacctgtctaaatgcttaggactgggtcaaaacagacgagccactaccggacgagcggcaaccgctcaaagagctatgtacgtctctgattcattaccgccctgcgtcatcctccatacagtactcttgattcgtttttaatcgaaggaaactcttcgggttcgatagaaacggaggcgatcaggtcggaggatcagacgctgagcagaaaagtaaggttttattataccaaaggcaacgtagctttatctgctgaatcgcatgttgccccatcttcaatgaaaatgataaacagacagattcctatctgattctagatacaagaaggtgctctcttcgtctccctgtttctcttagttcacctttagggtgcatacaccaacctccatcatttcgatataccttacctctgtgttgaaactgaatctaacatcttgttgatttatataaaacaatttttgtaaaaaggtgtcgacaatatccaaaccgcccaaacccaaaaagacaaaggcggctgcaaaaacacctgtaccagcgtctgctatgccagcttcatattctacaaagacccgtacgttttatgatctcttacttggtcttcatctcgcgctaccccgtgtctatgccatcttgtatgaccaacatattatttcccatcgtacctctcaaatagtcccgggtcaacaaccgtatacggctccttcaaatttaagttatgggaatacaggctatccaaatacccttagtgatgccgggtttgaagaagacgatgatgatgatagtgatccaggtggttctgtcgtaagcagaatagggaacgaagtcaatggggacggggaagaggatgatatacccttgaatttcgatggtgactatatgggtacgtcactttttctcctcatttctctttcactccgatatgtttatctgattctgtgccgatgagatgagggctgactctgaaattgtggttttatgcagatgtggacggagacatggtgtatgtttcttcttcctcttaccataacatcgcgttgtttaactgaagcgctaattcaccatatgctctttcctcgcgcgcgcatctgtatacaaattggattctacagagacacagacagctcggacgattgaatgacgatgtttttccacggattatatatatatatatatatatatatatggggggaatccttctgccctcacaaagatgaaacaagagggagagaacacagtgcagaaactattgtagaagaaaagcttacatattcttctctgtgaaaagtagaggtcttcttcttcagggtttcaccgagatgcttctttaatcccatgtttacagtgcttcaaaggcaatatgagctggtttccatctctttgcatcacgatccaattgagtaaacaaagtccccataacataagacccactactacgactactacaaaacaattttctgctacttagtttttgacgcagaagaacgctaagccttctctagctaacgcagtctcaacctccagctgcctctcgtcttcttccatccatctatcctcctttgataacttaagagttgctcgtttatcaggacctgcttcgtgtactttgagtaggttctcgaactttgtcctttttgcaatgagctcaagcatcttccggggatcagaatgaccagtaaagatgatgagacctcctcgagaggaaagagaactgtggaccttctcgatttgagcgttgagagacgtcagaatcgatgtcacgtcaggagagctgttgatatgagaagtggtggcgatgtcggcttcggcgttgatggcatcagtatcagtggtgattagggagggggtagatgcgactgatgcttgagattttcgagcccctgatggtttattgaaacggatagggaatctcgtcagccaaaagctccgaatgagccacttttgcccgaaaactatgtcttcttgacttacatcccaatccttcgctcaaagatgtcaacctgccaaaagaaaaccaatgggatccgacgactttactcaactcctcaaccacctcgtcatctgacgcgcagtccttcaaggttgttacttttgtttcttgagtgaggtatctagctgggtttcctcggtcacataacgccgtcagtttcggctcaccagaagccttggtggtgcgttgaattttttggaagattggctccatttcggcggctggatctccgaaggcgggacctgaaacaagataaatgatagagggtgtttgttcagtgaaataaaggagggaagaaaggaagaaggcacgtaccgaacttgagcttcaaatgcaaaagctccaaacacgtcctagcgtcttcttcagagtcgtgacctccagtgctcctctggatatcctttcctaggaacgtctttgccagccatcgaagagacgtctttagaggaggtcctctaggatgtttaaagatcacagcggtatcgatacaccacggatgtcttaatttgattgcctttaaatcggattcgagcgagtgtccaagtaagatcgtcgggcgctcgaggagatggaggagatgcgcttgaatatcaggcaaggtcagtgtcgcggtgtcgagagcttctttggtaattccggaaaatctggagaatagcgatgtttagatcaatttttgaggcaacggtttcttgtaagatcagataccgaagagaaacgaatatgatacgaactgagtcaagtaatccgttacaggtttcgaaggcttaacaagctcatcataaatcttgtttctactttcgaactcaactatggagattcgagccaattgaggaccctctagagtcatacactaaaaatcccagcacaccaatcaaagagaaaagcgttagaacaggctctcggaacaatcattgaaagaaatagaacaagtgaacacgaaccatctcgcagtccaaagccaacaccgggattttgtcttgcttcttcaagtcctctagttcagacggcgttcccccaaacccagtctcaacccaaccatcctcatccgcattcctgccttccttatctggatagtactctttgtatataactctttggccatcagacccaacggcgagtccagagtccacaggcaaaggcctcgatcgattcaagatttcgcctgcgtcgtctggattcatattgggcagcgcgatcggaccgcttaaaggagaggaaattaaatgagggattggataggagtggtctttcatttcttgccgggtgagcaaatagtgggagggtagtgttggaggaagagatgttgcagcccctaaaaaaagttattccaagaaagtgcccgttagaaagagtagaccacacggccgggttgtttcagaagcaacatgtggagcccaatgctaccaagaagagagacctactaagcagcgcttctttgtccttctccttcttctccttatctttcaagcttagtggactttgtagaaacgctgccagcgcgctatgcaactttgtcctatctcccggacttctaaccggacacgcatgactgaacaacctctgaaccactggtaaatttgtcaaaactccactcttgtgagttccatgagctggtgggatggcgaaaggcatgttctgagtaacagcctgaacaggagcgcctagtagttgagggctgattcccggaatgaagagtacggttaatgaagcaatcgatggtttgttctcaacttgaatccatgtcggcttaggggcatctgagacgatatgaagggctagatctctaagatgctggttgaagatgaagaatatgaatctgacattgtgagaatgcacgatgattgatgtgcaaatattgtgtcaagatataaggcactaacagcaattccaatctttcttccatgactaaacccattaacgacgaattgaaatgagggaacgagcatctgttgtgccaaatagataaccaaacgtattcagtttagcatatattatcattatttgtcgactcggtcttgaagaggaaagaaacccttcaaagccgaggggagactaaaacaaaaccaacctgcagtttggcctcctgcttctttctcttcttgtcttttctacgttcttctcgatcaataggagacggggatgtagctgctcgtttggctgaattcggtggtgaaggcatttttcttaataggccatgaccagattgaaggtgggtaggacgatctgtctgaaggcggagggaagtgttgggccttttgctcgaactctgagggttttctttgcttgtctctggcgatcacgtgcatagtcacgtggttcaagagcacttctaggattttatcggagaacaagaccactgtcctccgaacgtccattcaggagacgagaacacgtcgaccatcatgcttttctttctaacatttgattgattgaggactcttaagtctgatatggcatccttaagctatagctcatcagaccgtacctagattacttctccctggaagacgttggtaatcttgagagagacccttgcctcgaatcctttacagaccttggacttgacctagtaagcggaacagttcattttatggagaggaaaagaaacttaaagtctaaagacaaagatgggagggtgactactttgcagagagtgaagaaaaacgaaagaaacaagaaataaagagacaaaacaaagaggacaatgaaccgcaagaaagtgcgaagattaagaaagcaacgtcaacccaaccgagcaaacctcttcccctaaccgcgttcataccaccctctgcgcgacagtcaccaataccttctcgttcgcgatctcaatttcctcttcgaatagcacttttgcactctcgctcttctgagcgtagtccaaagcagtgcttctcgtctccctaccgatcgcctcctgattagcttgaatgacaccggccatctgctcgctcgcatttcggtagaagacatcaacgtcatctgtagcctgaagcccggccttcttcctcaattgttgaacagaagcaataaatcctcgggaaagtcccttgagaacgagctcaggagaagatcggatatccaacacaacgatcagctctccatcctctttagcctcggctttgtcgcccatacctccgtggaagtcggtgttaccggtaaagtcaacagaggcagtgacggtgatgtctccagtggtaagagtttggccagcgacctcgatcgtacccgtcgacttgaactccttgacctggtccgagctcaaagcgctaagggcagccttaaccttgggcatagctcctcggagtcgtcgaccaagaacgggccaatcggccaaagccttgtacacaacgttcacgtcctcctctcttgaagtgtatcgaacgctctcaatgttgagctcagaaagaaggtagccctcgagacccttgacatcggccaaataggcagggtctgggtggaagatgacaagctcggtcagcggggtcgtcttaagatctagcgacttgtcgtctctcagctttcggccgatagtgatgacagagagcaaccgtcggacagcgacctgaacggcttcatcagcataggcctccttgggttccgggaaaggaaggaagtggatggatcgaagatcctgagtggtatcctcggtaggagggatgaacaccttgagtcgctggtataagctctcagtaatgaaaggagtgaaagacgacatagttcggcagagagtgaagagagcctcgaacaaagtgttcaacgcagtctgagtatcctcaataccatcggagcctttcattcgctttcggttgaatcggatgtaactgttggtaagttcctcaataaggttgatcaaccgagggataacagtgtatagtctgtaggcatccatttcctggtgaacaattttgatcaacgactggcaccgggcaagaacccatcggtccatcacgttatccgaaagcttcgcgttcggatcgtacttgaagtcaattccgtgtgtcttcttaaggatagcaacatgcgaggcaaagaagttgtacgagttgacccaagggagaaggactcgggagataacaagcttaacgccctcttccttgaagttcaaattatctcctcggacaataggcgagtttaccaaaaacattcgaagggcatcagctccgtatttgttgatcacctccacagggtccgcaaagtttcgtaaactcttggacattttgcgcccatcagcagcgaggaccaaaccagagcagataacgttcttccaaggcgccttatcgaataggtgagtggccaagacaagcaaggtatagaaccatcctctggtctggtcaattccctctgagataaagtctgcggggaatccaccctcaccttcgagcttctccttattctcgaaggggtaatggttctgagcgtaaggcatacttccggactcgaaccaacagtcaaagacttcctcaactcgtcgaaggacagtcccaggggtcttctttgaaggaatggtaagagcgtcgatgtcatgtctatgaatctcagtgatgccggtcttcccagtgagctcttcgagttgagcaatggaagagacgcaaacgacctcggacatgtcatcgctgacccagagtggaattggggtaccccagtatctgtttcgcgagatgttccagtccctagcgttcttgagccagtttccaaatcggttctctccaacatattcgggaaccctaaagacatagtaacgattgatgaaatgttagggcgtaatacaatgatgcagaaataaatatagtggtgatatgatagatggacgaaccatcgggtcttgttgttgttggcaaccaatcggtctcggtaatcctctaccttgaccatccagacaggaatcgccttgtaaagcagaggagttcccgatctatttgatattcacacaaccaagagtaagtatctcgtcaaattattgagatgtgccctgacagaacataaagagaacataacaaaacacgaaccgagggcagaagggataggaatgcttgaggacaccctgcacgatgagccggcctcgcgttttaagaagcttcataatctccttatcggcatcctaagaaatacccaattttaatgacacaagattagctaatgcatttcgcatctggcccagagtgtttcttctgatgcgatgtagatagaagatatacgaatacagttaagtagtacgaacctttacgtagacaccctcaaagtcaggcacctggtttgtgtatttgcccgtttcgtcaatagggcaaggaggggtctcatccttggtgataataccgttctcaattgcgattcggttatcgtcctctccgaatgctggagcttgatgaacaagaccagtaccggcatcatttccaacgtagttatcacaaacaactcggaaagctcggtcttcaaactgatcgttgttcgagtaacgtcaaaaaaccattggacaagcaattagcaatatcacttcttgaatacctggatgatacaatcctggcgcaagaaccaagaaactcagacgaacctgctcgacgaagtaatcaaatagaggctcgtatctccaacctttcatgtcctttcctaggaacgatccgaccttcttccatttggccttgtcttttccagttgggtctttgtaaagcgtcttaagtaagtcctccaaaataatgaagtttcggtccttctcgacatcatgaatcttgagataggtaaattcagggtgaacacagattgccaagttggaaggcaaagtccaaggtgtggtcgtccaggcgagaagagatgtcgaaggatcgtcaatcaaggggaaagcgacggtgactgtatataaatttgacaagaaagattgtaatcaggggacctgcttagggtgcacgaaaactgaggcgacgaaaagttgcgagacagtattctcaccagcagggtcgttaacatccttgtaggaggatccagcctcgaagttcgagagaggcgttcggagtccggtggagtacggcataactctcaatcctcgatagacaaggtccttgttgaaaagctggccaaagacccaccaactgaacaagtttcaagacaaagaagcaacaagattggtatgcattatcacaacacaaaaagagaaagcttaaaaagatcacttacacagactccatgaaagtaggatcaagtgtcttgtaacccttctcgaagtcaatccatcggcccatcctctccacagtcgatttccactctccagagtatctcatcacctaatgcacatggtagcccaattatccatatgcaagtcagatccaccgcccacccaaagtgtcaaatccggaacccagttatagaattcgttagccttttgaatcggtaatgaactcattctacgaacgaggtacatcaaacattatgatatgagagacgaacgatagatcgacactcgttgttgtaagcctcgattcccatcttcatcacatcctccttcccggtgataccgagtttcttgtcaatctcatgttcgacaggaagaccgtgggtgtcccatccgaaccgtctctcgacgtggtgtccagtgctatgggcatgtcgggtgataatgtcctgttggattgtgaaagaggtgaaggcaaacagcgtcaatctcagcatctcggtgggcttttcactgagacagctcttggtttcagcaggtaactacaggatctgcgagaggcggcttgaacgcccattaccccactctctttccatttcctctcactagctcatttttcagccgacgtgcatctcaaatgccgcccaccctcgccatctacggatacttctctctgaggtgtgagatactgatcagttaaagtttgagtaacgaaccttgacggtaccggcaagcaagtgaccgtggtggggtttaccggtagcgaacggcggtccatcaaaaaaggtgaaccttggcttgccctcggactgcttgagcgaagtttggaaagcatcaatgtctctccagaattgaaggacagtttcttcttccttagggaagttgaaaggtcccgctacatgttttacccaggttgatgaaggggtacaatcaacggaaggaaggaacgaatgattcgagatgtagtccggtcggacagacaaatgaatgatcattttcgcatagggcacaagaaaaaaccaaagaaaaagagaagagtaaagaagatgagtttcgaaaggcacaacaacagctaccaaactggagcctctctaagatgctcccaccagtctaaccaagtgctcgatacgtaccgtttgggggcgggaacgacatggttgttgtattacgtcttctagaaaggaggagagaagaaaaaaaagacccctaatccactcatcgttccgtccgtttaggagagacgactttaggcaagggcgatttgaacgttgtcacgtgatatgattgtaacccacacctgtgattgttcgcacacgttgtctgtaacacgctccgacgcgtcgcgtgtgtgcgctcatttatctcgtttcgtccaaaagttcattgatcttccaaaagcatcagcatcgatcgtcatgtccttgtcaaagtctttggccgttcttcctcagggtaaggagacgtgttcatcttctgctcacaggtttaatcgatgagctcatgactgacgcgcgtcctgagttaatcaaggggtcattcaatccggtgccgcaaaggatacatctgcctccaatcagttctggcgacttccgaacccaaggactggccttccttctctttatatgccttaccggcgggagtgcgatggaaaacaaggaattcttgaactgcaaaagattagcccagacaaggaacgaagttggttcgtggaggatgaggttattcaaggttgatactatcttcctcctcctctcgtcagacgcaaccctctaatagaattaacttacattcgttgccggtatgattcgctctcacatgtgtatgcttatttgtcataaagacggaaagctcttgttgttcactccgatcgaccctgtgttcctcttactgccggctttagaagccgtaagctcactttgatctgctcccggtataatccttgagctgcctacctctgatggtcgtccgatctttctcctatttgttgttcttgtaaactctggcaagtaaaatagactaccacatcacctcctcgatttcttcttcccgatcaactttttagtactgcctcaacccatccttcgttccttcttgcgcctccgtttactccttcctcaactgatcttaaagggaaacggaagcaagcagatagaggggaagagagtgatgaggctggaaagattgagtgtgaggatgtgatccggcttggggaactagaaggaattgaggatcatctacttaagatttgtgatgttttgggtatatcttatcttcctctcatctactcatctttctttccctccttgtagagcgctaatttttatatgtgtttcgcctttctacttagaattggagccatccaagatgaaagcctatagattatcgactctcaagcttcaagcgtacctatccaagaaagttaacaggctttcagtaaaagagacattcaataggtttccagctcttaaacgaggtctggctagagatggtttaggagacttaacagaacaaggacaggatgattcacagaaagaggagagagatcaactggagctcgtcagacaaggttcgtcatactcagcaaattcttcttttttgtttccttcatcttcttttttttctcatgtggcgcatcgctgacctagtgtctgttcacttgatcttgtctcctttgctccttattaaacagaagctcgccttcttcagacacttcaactcctccgaccgtatctttctccgcaaacctacacctccattctcaaactcttccccacccctcatctcacaatccacttgtccaatctatcttctcacccttccgtcaattctcaatcaacaactgaagaccttgaatctctctttcttgataaagccaacgaaaccgagaaagctctggcggagaagaaaagagctgcaggaccgatcagtcaaggagtaagcaagttgaagaaagtagatacgagaggaatgagtaaaatcagtagctttttcggtaaaaagacgagtgttgctgaaggtgtcgggagggacaagaaagacctggagacttaaacagtcaacggaaggataagtgcatatacatgtgtgacttgaatagtctatgatagctactaggcatgtgaacgatgaacccgaatctctacgtcgtcgagaccattgttaggaagaaaacatgaatcatctcaagaaggaatagcccagaactactttgttccttctacacccgtctgtaaagaggtcccttcctccattgatcaactctagccgccaaacccatcttccagccagcaagtcctcctccgccaagcacgacaagtgcgcaagctacccatccaagcgtgcctagaccttgagacatcgaaggagccggagttgattccaggtcgatagtttcgtcagaggaagaagaggagtcctgtgagtttaatttcgatttattacgatttccgttatcgtcgccgacgagtgatttgggttgtcgaatggaaacgataaagagacaagtggtggaaaagatagaaaccaaagaacaggagaagatttagtacgaaccgacctttttttttctcgttttcgaaaggtggggactttaaagctcctctcgaagaggtacctctttgccagtctcctcgtcaatgatcttctcgatctcgatctataggttattttcaaaaggagtcaggctgatatttaagcagaactaggcatcaacaacgaggactaacttctccagagtcagcgatggtgacagcctcgacaggcttatctcctcggcccttaggcacggcttcgatagctttgacaacgtccataccctcaatgacctttccaaagacaacatgtcttccatccaaccagctctgtaaaaagacgatttttattcgttagaaacctccaagtgcataaaaaggaagcagcgtccaaggacaaggaacgtgtgaacgaacagtgacgacggtgcagatgaagaactgagatccattctgtagaaagcagatcgatatcgaaattagagaccagagaaatagcacgagacattagcgaagacattggatatatacagaaacggacgacttacggtgtctcgtccagcgttagccatagagagcgttccaggtccggtgtgcttgagctctgtaaatcgaagtaatccaggcgttaaaatgaagagctttagggtaattttgataaggaaggggatgagaacacctactgaagttctcgtcgtcgaatttgttaccatagatggactttccaccagttccatcacccttagtgaaatcacctccctggatctactcatttgagatcggaataccaagtccaggctattatcagctcgtgtcgggcccagatcaaacttctactggaaatagtttaccatgaagttattgatcactcggtggaagctagagcccttgtatccgaaacctttctctccagtggccaaggcccggaagttttcctacgcaagtgcaattcgagcgatatcatctgacacgtcaatgactacgcaacgggcataatcataggatcgatttgatgaatgcagatacgtacaacagtcttagggacagtagctccgtagagtcccatagtgatccttcccataggcttccctccatgctcgatgtcaaagaaaacctatgaaccaatgtgttagccgtaagaaaagaaataaactaagcactccaccttgtatgtttacgatgaaaagcgagatgggataaagaaaaggaaatataatatgaacgcaccttgtgagtaatcttgggtcccttgacagcctcagcagtagaagagaagagccagatggaggacaggatgagtccaaaaaggagaacagagatttgcttgaaagaaagcattgtttgtgatggttagagatggaaagagaaaaaacagaaataagaagagtgtaaaatgagagagcggatgaataaaaaggggattaaccctaacaccaatgaatcctatagattgtatcttctttccaattgatcatctacatagctatccacaagtctttctggcagaaaatagtgatgatacctgagcaggcgacaggagttttcaagaagtgaaaaaatcgaaggttaaacaagatgagcgtagaagatgaaaagaagagaggcgcacatcaatactatggatattgtgctatgaagttgtgttcaggatgagcagtaagggaactttgagaggagagagaatgttacatgtcccgttgaatagactttgatccatccattcttctccatctctcttcactctcttcacccctcctcatccccgtcgatcatggcagacttttcaacagctctttcgacctggcgaggtacatgtccttttcgttcatatttacatctcatgtgtgcttagctctttccgatcagaaccatcttgctcattgttttgttttgttttgttcgcttacttcggctcatgtgtacatcatgcatacaaagatatcaaccttaccgacttgcaaaagtccctggacacaaccgccctggaactggttgagaaccagaaggagaatgtagtaggcaggaagaagctcgctgaacagaccagaggtgagtgctcgatcacataacctatttcccatcttcttctaatcttggtgatcgttttgatccgtctgatcactattctcctattcatgctactggatgtctgctctacccttgtctgattttgtaaactaatacactagagttcaaaaagatcccgacggatgccgaaaagctcgagtccatcaagtctttgttaaaagcctaccagtccgagattgaccagctcactagacgatcaaaagtagcggagaacgcctttctaaatgcttacaagttgttggccgaggcaccggatccatatcctctgctcgatgcagccgtcgtgagagccgatcttaatcttctgctatctcgtaacctatgactgacagtgcgccttgtctctcgggatctgggtgagcgggtttcatctcacaggaccaaaccgtaaaagtcgccgaagctcaagtcttggagagcgaactgggaaggttaagggaggagaaccaagaactgaaaaagcaggtcggagagattgctggagctgaagagaagaggaaaaaggctgagaacaaagtagacgccttggaggcgaaggtccgtcatctccttttcttctgagtatttggttgtgtaaagtttggactcacttctatcttgtcttcacaattgatgcttcatgcatcgccattcttgcttataatattgaacggtatagatggaagaactgattcaagaacgggtaactcagaaggagaacgaactaaacgccacgtatgatgaacgtatgagaaactacgaagagcggttcgttttgtgtcctttcttgttgtttcctgcctcttgtctacttttacaacggaaaggtggcatccaaacatattgttgtgctcaaaatgtctctccgactttggtttgagttcatagagaacaagatctgaacaaccaacttcgaacgactaaatcccagctgaccgaccttcgcacaacctcggattcaacccaagcccggctaatcaaggcgtctcaacagcaggataacgaagtagtcggtcggatgagtgagctggacatgcttatgggtgatctggaacgagccaacggacgtgtcggtagcgtggaaagacgaaacgtatgtcaaggttttttcaaaagatcaaccggatggcgcatttaataactttcttctcgcaaattggtctgtcatgtgatcatataggagatcctaagggcagagatcgaaagtgtcaaatctggttctcaatatgccgaacggtctgtcgttttgttatcatcaatctctgactaaccgtacgtactaagcagtcatccatccttgctcgatgaatgtatgccttaaatagggtcaaacagttggagtcccaggtgtctgagcttgaatcagaatccactcgactacttcgagcgctggatctggagaaagactctcgaagctcgtctgaaaagacgttgcgcaagaaaatcgaggaccttaacaaggagatcggtctaaaggtgcgttactctccttcttaagctctccatcttatcaactcggatcagctatcgctgatgccgactcttttcttctcacttccgtctttgatcttgtgataggctgcggagattgaacatcttaggcaacgtgctaaagaatacacagattacgatgagatcaagcgagaattagaaatcatgaaagtgagtcttgtactttgttatctccggcttgttcggagaaccacgtatattgatttcttcctttcttgcaactctataaccagtacgtcgaattcggtgacgtcgacttgagcgaggaccttgagaatcgcaatgaaattcagctgccaaacccaaatgctgctaagaacaacaagatcaaaaaggaaggagagtctttggaagagatgctaatcaggaagaacagaaaagtgttggacgagctgacaaagcttagggcaagtccgctaatttttactctcgatggtggtattcagttttcgattttgtctgaattcacctaagatttctgtctctatatctgtttcaatccaggtgtcccaagaagaatcttcaggagcaaccactgagcttgagcagatgcttcaaaccgttcaggccgagctagagagacaaaagaaactgaacgagcggttggagaatgacctactgcagatcaacaaacccaatggaggagctgtcaagacatcagtgtcggatgcacacagtggatcgaatgaagctggatcggcagttgggggagcaaagagtggagggttagaaggattagagattggtacgggttcggttagtcgcatcttctttcaagatgcgttagcggcttctgcagacacatcaaactgaactgtcctgtggacattttttggacttgtgctgatgcgcaggacaagacgagagcttctcccgttccgttccaatctggaagctctgataattctatcctccctatcgttacgtctcagagagacagatttagggcaaggaacgccgaactggaagaggtttgtcattcatcaacctaactaacgtgttatcaggaaagaaaggggtctgactgtatctcaactctgtctcttcaaatatgattcttctaggagcttcggaaacaattcgagtctatttctgagctcagaaccgagatcaagtctcttcaagcagataacctcaaattgtatgaaaaagttcgatatatgggttcctatcgagaagactcctctgctgtcgccggtccatcaagctactactcaggaaactcgtccagtaatcttaggactggtagtggtggaggattaggaaacttgggcatctcgggtttggcaggagggaggggagatgaaattgggaagtacaaggacaagtacgaggattcgatcaatccgtttgaaagcttcaaaagcagagtatgtaattcttcttggttcatcagtacttaaccctcgtaggcgtccatttccgtcctcatgatgacttacatcatggatcttgaaattcgaaactttgattcggggtcttggcaggaagcgcaaagagcgattcaggcattgaacccaatagaacgtgcagtctttgcactctgtaggggaattatcggaaatcgacgcgcgcggtcaatctttgtcgtaagttttctctatgactctgtttctcttggccttgtctgagctatacagtctgtcgactgactatctactcttcatgctttgatgcgttgaaaacggattgatgtagttatatgcggctttgttgcacctgctggtgattcttagcttatggggttcattggcgagtggcggtggagtagatatcagtgaccctgttcagatgccgcctttgaggaggtgaaaggcgaggatcatactggacttctttcataacccatctctatactttctcgcagtattccctcttgtggcttttggttgacttcgtagacgagttaatccttcttttactcaccgtctcacaaacaaagagaagaacgatgactcgttggtcagctttctttgtcatgtcttctccctccatacctttctccttttatctacatttaccttctattgtacaaagattgaacgaggaacatatgaaataatgtacaatttctacaaacgtcatatcagtgctgggatttatatattgatacagctttcttcccaatcagaggaccgttcgtctgacccagaactcatttttggcgaagcttccttcgactggtctccaagggggaccttgcactatctcaaatgtgttcgggtcaaactctgatttctgggtgttggttccttcaactccagcatcggatccgaaaacaacgagcctccgacccgcctgcctaaccatttccctttgcctcgccctctcttcacctgccttctgagcatctccctctgacacatcagacttcgagggcgaagaaatttgtcgaataggatcaaaaacttcggattcgattaattctgtagagataggcgtagccgatcggtcgaggtgggtcaaccacgcttgatggatcgttcggtcgatcggttttgtgggtttgttagatcgacagcgagccgaacagtacttctggggcgtatcggtagatgactgtgattttgatcggggtgctaccgagcgcacatgaggattcaggacaaagacatgagctgttccatgcttgagaatgaagaatagaagaaggataggaagaaggtgatgcatactgatgactctggcgcaagatcgacagaatacgttcgtcaaaggtgacaagggagggggagcgggtgccgatttattcggtcgcgaatgggtcatcctgatagacagatacgatgtatgcttatactgaaaggttagaggaaggaaaataacttggagtcgattcatcgatcattcgaagagggaattcgagaggaggagaaggcaaataggaagagagtatgacgaggaggatgaaccgatgacccgctcgaaatcttctcacgactaatcttacccttcttctatctatcgtcgaccttctcatccaatcggttcacctctcctcttgtccttaattcttccttcgctagcacctcttcaaggcagcctgaagaacacataggcaagcgagcggacggaacgaaatcaaccgattaaagggatatcagttcactccgatcttgacggactcctttcaaacctcccgttctccagtttctgcttctattctacaggcttctcctccattgatgaacggtggaccatcttttcaaggatctccgtcgacagcgacgacaaagacaatgacctcgcaaacccctgccgcatccaggatgggcgctatccaacaaccctataccaggcggacgcctaaaaggaaggcaaaactagagtcttcggttgtcgaacctgtcgttgtctccgcgctagatttccgggtaccaagctttgatcaacctatgaccggcagcctggggaccggaccggcagtctctcctcttccctcctcccctcatgccactcaatcatccaaggataaaattgcgaacacgaagaacatccaagcgacggctgcttcgtccttcccatcccctccggccgattcgtcgttcgctcatttctcaaagaacccagccgtgattcaggccgaaaccccgaaagcgcctgcgttggacatgaatactgtcaaaacgaaagctcctcgaaatcctcagcctaggacggagcctagagcatttggtcttcaagaagctccaacgttctacccgacgtgggatgaatttaaggaccccatggcgtacgtggcaaagatcgtcagtgaatatggggcggaaaagtatggtattgcgaagatcgtaccgccaaatggttggcagcccccgttcgtattggatacggaggtcagaatttccttttttttcttgcccaggttgtgctgattgatctatagctgtcatcggagctgtttctgatcggttgactctcttttctttgtattttggacttttgtagaggtttcggtaagttgataattctgcatgttacattcaacatattcattcgctaatctatacattgtactttatttctaaatgtggcccttcaacggatgtactcaaagcttcaagacccgtctaatgaggctcaactcaatcgaggccaagagcagagctaaaatcaatttcttcgagcaattgtgggtagcaggagttctctctgtctcaacgttccttgtgtaatagaagagttcaagctgatattggatactgttcctggatggttgtctggaacacttcttctccagagtgatgtttcaccagcaacagggaaaccctcgacttacggttcccgttgtagatcacaaagatgttgacctgtggcttcttcggaaggaggttaatcgattggggggttatgaacaggtatgggcttattgtgttttgctctagatgaattatcactcattggcctcttctctctgttttactgtgaatttatgtcattcaaaaaggtcaccaaaagcagaaattgggcagagattgctcgtgctatgggtacctctcagccttttgcttactcgatccgaaatgtctatgccagaataatccttccgtttgagcagtacgttgctcgagccaaaaatgcccgatcgcctcccaaaccatctgcctccacatccgttccgtcaaacaatctaccaaccttcacctcaacatcaaatgtggttactgaaacgcctttcagtaaagctgggaacggtgacaagctgccacctacaccagttagcaccggagggagacctgtgagaggtgcggcccagaaaaagatgttctcatacgatgaggatggggatagcagtctatcggaaccggattcggatacggatgctgatttgagcagaccggtcacagctcccccattatgtttgtcctctcccagtcatcaagtttggtcttaacgagcttgctgggaagtgagtctttttaagctaacagaaacggtttgtttccgctattatgatttatagccaagctgtcttcgctatctaaaaaagagattcccatcgtgaaaggagaggtaagtcttgtgaagtaccttatcatacaagacccacgaagatgatactgatggacactgtcaacacaactgattcctcgaccagcaatgtgaaatctgccgtagcggagctcatggtacaaaaattcttttatgcgacggatgcgacagaggtccgtggttcactttgaacagttgcacctcgttcttgtgccgaaggactttagctgacgatatgtgtccacggtgtgaactcaggttatcacatctactgcttggatccaccattatccgctgtgcctaagaatgagtcatggttctgttcagtttgcctgatgaacgctggagcagagtttggatttgatgaggtccgttggttcttataccgcctatcgttctcccgaagctgaaaaagcttatttctctgaactcgacatcctacgttcttacgttcgtagggagaagaacattctctttctagcttccaagctagggataccgctttccgaaatcactggtgggcaactcacccccccaagcaaaaaactcaaccgccagtccctctcacctttgctggggccaagccgattctcgacaatggaactgagaaccagcccaatggcgagacacagaagctagggggagtagatgtatcagagcatgacgttgaaatggaattctggcgactagtggagagtcagacagagacagtcgaggtcgaatatggagcggatgtacatgtgatgttgcatggcaggtacgcatcttccccctctttttgtgcagacttgccctctcaactcagaatattgatctaattctcggtaatgttcatttctacgtattcacctccaaatattactagtggcgctccaactaccgaaacacatcctttagagccgtactccgtggatcagtggaatctcaatgtgatgccaattgtaccagactccgttcttcgatgtaaggctcatcaatgtttcataatcggaggtcgttcaaacttacttaccttcgatccacatatatagatatcaaaaccaacatctccggtatgacagtgccctggatctatgtcggatttgtctttagtgctttctgctggcataatgaagatcaccatacctccagtattaattatagtgagcgtttcatatcagcttgtattgtgtcaattactcttctgaatgttatccggtatgaccgggtctagtgcattggggtgagaccaagacgtggtatggtgttccaggagaatacagctccgcattcgaagaggcaatgaagtccgaagcgccagatctatttgaacagcagccttcgctactcttccaactggtgacactgatgaatcctggtcgaatcaacaaagcaggcgtgcctgtgtatgcatgtgatcaaagaccgaatgaatttgtggtcacattcccaagagcataccatgctggcttcaaccacggggtgagctatgcagtttcttctcgtcgtcatgggaagcggtctgacttgttttcttcctttcctttcagctcaattacaatgaggtaggaaattaaagatcacacagattatggttcatcaagttgacactgattttcaagggttttcgatctgtaggcggttaatttcgctcatcccgaatggctagagcatggcttaggctgcgtccaaaactgttagtttctggacaatgtcagtgtttccctcatacttttatttacccgcgattttttcgaatatgtagacaagaagtacaacaaaccacccgttttttcgcacgatgaactcttggtgtcgattgcgactcactcgaaatctatcaagacagcaatatggttcgtcaacctttccagacatcaactttgatcgataggctaattcactccaatgtctcatccattaggctcaaaccacatattgaagagatggttgctcgagaactcaaggctcgaggtctggcccgtattcaactatcgactcttgcatcttgtaaagaagaaatccaatcggaagacttgcctgaggaggaatatcagtgttcttcctgcaaggcttactgctacttggctcaaatcagatgcccctgtacgaaggagattgcctgtcttgaccatgccacggaactttgtcaatgcgatctgaacaaaaagtcattgcgattgaggttcacggacgatgcattagtggatatggaaaagcagatttcagatcgagcagctattcccgaaggtacgacttatcttttttagtgtgtttttttccaccgaggttcatcatatatccatctggtttgcgtatcacacgctaattgggatttatgatttggtctgctgtcaaactgttttcttaagtgtggaaggccaagctagtcagcgcagtctttgagtccaagtgaccgtctcttcgtcagcttcggacattggtagctgagggcaagcagatcagccatactctccctgatctggctcctctggaagtgtttgtagagcgagcaaacgagatggttgttgaagcttcttcctttacggttcgtaaactacaaagccgaaagccttcaagaaagagccggtccgttggtattgccgccgaagaagatctaacagctggagaggaattcacgtcgaaacctggtatcgacgctgtagttgaccttctgtctcaagtggagactcttggatttgaagcgcctgagatcaccgctttggagaatttcttagctactgcagtcggattccagtaccgtgcgacgaattccctgtcaattccggacgaacagcaatcaataacggactgcgaggctctattcaattctggacttgctcttggtctcaatttaccagaacttcaggcctattcctgcttggttcatcgacttcgttgggttagagatctggaagaagtcgatgaaactacgttagagatgaaggacatcgacacattcatagagagagcgcaagcctatcaggttcggtcggatcatccattcgtgctcgacttacaggcgaaaaaggtgtcttctcattcttgggcaggagacgcggatcaaattcttggatcaacatcagccgatatggctgatctagaggcattgttggcgagaagccgatcggtcgcggtggatgcagatcgattacaccgtcttcagctattacgatccagggtaatggaggctgagcgtaatgtgcgctcgatgttagactctctggcttcttccagagatcgaatttctgttactcgggatgctcaacggctcataaaccgatttgaagctaaagggagaagtcctattccagtttccgggatggaggaactcaggaatgaagtctcggcctacagtcaattcttcgacgaggtcaacactgtcataaaacccgaattgaacgacaagtctctgatggagcagcttcacgcacttctagtcaacgtcaatactcgaacagacccggcagacgatcttcctctcagtctgcccacttctgtttccttggtcaccaacaccacggaagatgcaagcatgttcgctccctttgcatgcgtgtgtcggctgccacagggaccagacatgatcagttgcacgcgctgtgccgttgcatatcatagtgcttgtgtcgaatcaatccaagctgatgcagccaaagaaccttatttgtgtctcgtctgtgagccatacaaagttgatctgagtaaatccgccagactgatcttggcggatctatccaaacttgttcaaccagagttttttactttccgacatccgcccccagagttcgaaatgctctctaccatcgttaataagacaacacgtttcgccgattttcttacggctaagctccgatcaataagccctcggacgaccagcaacgtcgaagaagttcttcttttgcgtcattttctcaggaaagttgaagggttatgggtggacattcagacttcatatactggtgacaagccggtcagcctacgcccagccatcattgcgacccttaccgctctagagaaaaatgagccggctgcggttgtcaatccggcttcaacttcgggtctggtctcagctgtctttcaagaaaagaagcgagtacggaacagaaagccaaagtgggagatcttgcatgaaacccctccccatgatcaaggttgtatatgcaggctatcaaaagaagagacgatcgttacttgctcgaacgctaggtgtaagtcgagtggtccgcctgttgattgttcgtacttcactgatattggctttatccttctaggcgcccgaggatatcacccgtcttgtgctttcattaagccggctgatttccctctgccaaagttcaagtgtccattatgctgcattcaaactgggacccggtacaaatacgctatttgtcttctacagatgaaaggtatggtcttcatttacgtaaatattttctaacatacattagtgctgatttgctttgatgatatgatttgcgtttgctgcagagcatgagggcactcgtcagttcgtgaatgtcaaagcgacactcaacgcactcgacaccctcatttttcttgatttggaaatacttgaaggccgaccgtacatcgtttatatcgcgaagacattccatcctggatttagatctgaaattgaagaagggacggaacctccgccagtcaaacgaaagaaaccaatggtagagagtttgggttctgttaccaattcgccagttggggaggcccctcctacacgatctgttcctccaccaacgctacctcagatagtgcctccgcccttgtcactctcctcatcttcgtttgcaacaaccactcctacatatataccaccgccattctcaccttcctgctttcagcctccacctccgcctccgccaccatcataccctcctagctactatccgtctcatccattctctagtcagtcttacctaacgtaccaagcgctaccacccccttcgtcggtaccaccaaggttctattcgagtcattcacagtattacccaccgccaccaccagctctttcgtcttcttcattgtcctcttcttctgaattgagtcatttgcttaatccgattcaagagcctctgccctcaccttcgatcttgcttccgcccacacccgtacctacgtctttagtgacgcctgcacttgattcgatacctataccaacaaatctaccagctccttcagagcttttttcaaataggtatcagccaacggggcattccatcaagaacagttcgtctgattaccaggagccggactctctgccgcttatgaagaaagcggagacggagacgatggtagctggaccaacggtaacggccacgacgacggcagtggcgacgttgccgactgcaatgatgtcaacgccagctgtggaagtgacggcggcagcagaagaggttgcatttccaccagtgtcgccagcaacggagatgaaaacatcagaatcattcaatgatacggcaaagtcctcgagtgaaaccattctgaacggatctaatccttctcgagcttaagagtatgtatagccttgggctttacagggatgttcacgtttcatataccttcagtggatatgtgtctacttcatcatttccctttaggagtctacagctttgattgttccctttcttttgtctttctatcgtgtctagcctttgcctccgatacaggtttcttttgcctgatcgtccttcgatttacctttcgtctctccttcctccttcttttctttctttgtattctatctttagcttgtttctcgtcttggcttgctttctcgatggattcgtttcttttttctggatgcgctttttataagacattgcggggtgttcgagtgaggatttccacgatgattatgtcgtcgtccttctcccttccggtccgttgacgatctatctaatgagtacagagaaattgagataagaggagagctatgggtgtacaactgttcttttcttctacgaaagaaagaggagataaagaggtatgctggtgtttatcagatctacaaaattgactctatatgggtgacacggtggaagggaaagggagaaggaacgaggcgctggggaaaacggaagaaggaaaggccaagggttgtcagatttactcgacgtaaggctcgatggagatccttttttctccagagattttccaaatcacatgtctctctctgcatcaccaaagaggagttaacgacgcaatcaattagtttcccgatttttttaataggggtagaaggaaggacacacagtgtgtacatctcgtacgattgtgccgctagacgcatagctttgatatgctcgggtctcgaattagcggctctggcatgtgctcgactcttctcacagtaaacaatgtgtacacagagatcagcctggactgttaatttcttttctaagcacaaaacgggggcaatttagatcggtctcacctcccagatacaagttgccaaattgacgccggtgattatatccggcactccgtaccagtacatcaatagcttcaaatacccacacagcgtccaaggcaagttttctgatcaacctcttgagtgcgcgggacaagacaagggtaaagaagggccgacttacacctccccctttcttggcttcttcatgtgcgagtgaatctgctgtgtatagtgcttcgtcgttgatgaccaacctgtttcgttttgatctgaacgccacgcagtacctatcttgcccggtgacggaggtaagtgtctttgatttgattttgttatggagcaaaactcaaacggacaaaccattctccttcgatatcttcgtcgagctgaatgtcttcccagttgaacgcatctttataagacacctctgcgtatttcccactcaacggtctgaatgctctcagggcctcttgaagcttgaaggattgttcagagagcgggacttctggtaccggagggatatatctttctggctgacgattcactccgttgggtttagtacttggaatgggagatatatgaagagattgagcatagcggtgtgatatggacgaagtagagtggtgtggttgagcgacgagcatggtcaattgtccaacaccgtatatttgtggggaagtcaatcgttaaagcagttggctgtttgtgttttctctgtagatatataaaggttagcaaacggatatttcgtgatttagagtcattctttgccaacctgtccccgttcccgttcctccttatgctatcagaggaacacataagcatcagccaggagcgcaagagacaagcgattcccaccctgttttctcggtggtggctgaaagaaaacagtaccaaaagatgatgattctggcgtcatctcgcgtgtgtaccaaggggcacgtgtttcactaacgtcacgtgtttgcatttcaatcctatctatgtatggtgtaaatcaaaaataaatcatctggacttgaaattcgcccggctccagagatttcgtccaaaatctttccaaaatctcaccgtcatcagcaacgtgagcagcccaagaggacgatggtcgacatcacccaggacgatgaacatgatttgctatccattcaacctcctccaccgtcgaatcaagacgtagatgatgacgatgatgcaggcaacaatgaccatcataccgatgaaagtcgtcaccacgacctctctcaccaccacgatgtcactctagatgatgctcactctcgacaaaaccaggctccagaccaagacctagaccaaaaccaaaaccaccttatccatgcgtctctagatattccagcaggaccatattcactctctgagctaccccaagagcaggaatcacatctgccgcttccttctcctccagaccatgaccgaatcgaaaacgggaccggctcggatcgcattcaatacgttcatctgaccccttcgtcttcctcgtcctcttctcccgcgctgaatcatccatccggtcaactcgaacagcatcaccgtcaactgtcggaattttcatcatatcagagtccggagcccagctctcgatcccgacagccttctcaacggatagctcaccatcagtctcaacagacacatcagtccagacagagcgcaggtcccgatgctctggtgccgaagagaaaatacaaagcccgttgcaagtggtccgcgcaagataaggggacgctggttcgagaactagtcagacaaaaggacatgggtaatcaactaggtagtggatttctctcggaatcctgggtgtctgtggcgaatctgttggctgggagtgaggacaagagcggaggggacccgaagggacctgacgaatgtaagagcgcgttttctagggtacgttgtctatccgaacaatttcaacaagactttctgcttcggtcctgatcatattgcacgatcgctgacgcttgaagaacgcttcgcttcggtcctgtctttgttattgatcgtatagctgaagagggaatttataaaggtcagacagcttaaacgttcgttcgcacaatggaacgacgaggaccagcgtccagaggccgaaccagccactatcaaaacatttttggcggttcgtgctttgcggtttttcatttgtctcgatctcgcaaagacacatcaacaagtgtttactctctctattttgttctgttgtccctttgagtcaatttaggctcatccagttgtacgtgatatgtttctctcgcctggactgaagccctttgatgtgtcatctaacacatttttcttaaacagtacgcgccctatatcacaggttggccttttttcaactcgatggaacacatcaacatgggtgtcactacgctagatgcttctatcgccaagccattagcaacaaattctatcaactattctggagcagagatggacaaagcagaagagtcggatggagagagtgttactagcgatgtttgccctctttattttatctgctttgcttcgtgctctgcgcttgttctgctcgcgtgtgatattggctgaaagggtcgaccttttcattatgtaggtgtcctcatctcggctgacggaacgaagaaaacgaacagcctccaacgccgaacttgacctcattgactcaacctccaccgttggcggcatatctaatcacaccgctattaatcctgagggcaactcaaatgctaacggtaaacagctgacgggagggccaggatcatccaaacggagaaacacggtggctgtggaggatggagaggttgggaaggagagtccatcgattgtccgacatcgggctagagaactcttggtacgtctcttccgttttgttctgtttacatattcgttcttgaaattaacttcttgagcggaaataacattaaattctcagtggaaagatgtgaaagaagaaggatggtcattgaccgaacaggatatcatcaacgttctcggtcgattcgatgttcgcccttccctctttcctttttagacatgtttccagtcgcctagttgaaccgtgaatctctaacgatgtctttcctttggttaaaaatcaggaaaacgtgacgtacgcagaaacgtatgctgatatcccttactttacactgcgactcctctaccttcagtctatcatattccccaaattgatttgatttcaggagtcgggtcctccttgagggaggtttctttccccttgttattccttcttcgtacccttatggctatcgtttcttgagatgtatcttctagcttaatcctctcggatctttgttgtttcttcctttcgatttcttctttccatatgtccgttcgtcaagttctcttgactatccagttttcggtctgtctttctctgtatgtctacgtaatctacaaataccctcagttctctttgcccattgtacgcacacaaaataagggggaaaggaaatgtagacatattcgagcaactttcttcatttataaaacgctgatgcgcgcgtgtgtgtgttcttgtacgctataagatttctttccctttcgtttaactttcgaaccatacggtgagatagagtatgaacctcagagctctgtccgtctgttcttgatatccaaaagctcgacctgtcattcgaacgagaaaccaagacgagtcaactgacaagattccttgtttccctcttttttaagaaataacgaaagggaaatggaagtgaacgaacctcaaagacaagagctgcgttcccagggatgacacctccggcaccccgggcaccatatcccatatcagcagggatgatgagtttcctcttctcaccgatgcacatgtcgagtagaccttgatcccaacctaggttgcgagatttccaaagtattcccccgtcgggtttcgatgtgaacgacaaacaagacacgggtcagacctgaattctcttctctagtcccgatacagaatgtcaaagaatgtgagaaagaaagaaggatgagaaagaaaggaaacgaacccttgatgacttgaccggcgccgagtgtgaaatcaaaaggttggttcctatcaagtgatgaatcaaacttctttccaccgtcgtgtagcgttccggtctgattgtcagatatggattcgagacgcaagattcgagatgccagtcgtttccaagcgttccgaaaaggagatttaagaaaaaaataaaattcaaaaaatcagcggagttcgtccttgaatgatcttaatcaagaaagatgggagaacgaacgtagtgcattgatagcttatcgccttttcgagatttcaaagagcacgactcgggtttgaacttgactcctactcaacacaaaccagacccggcccaacgatgcacacgcacacgcacaaaaaacggatcaagagaatcaatcaagtatgatatcagtagtccgtctgtgatcatcaagtgctcgaaaaacaaagacgggactctaagctgaaaggtgatatatttcaaaagattgttcataccgatctgcaactttttgatcggaccctcaggagcggcagcggcggcggcatggtcatgatcaccatgtccggcgtgggctacgacaaatatggccgagagaaggccgacgatggctgttgaaaagaatctcatgatgaacgatgtatcggttgtgtcgagacgggtgtgagatggagcgaagtgttttaagatgagtcgagttttgagcgaaaagagttggcctgttttggcgtttcatactatcttacgtaaacattccagcacggccccttttcgtgcgcgagcgaggaccagagtgagcaagacgtcctctttgcgcactacgattctagcacaggatcaaaagaaaactgtaacagagggtcatcccatttctagatctcactgaccagagcgaggtgaacgaggaaaagtaagaagaaaaggtttaagtaaaggtagagagatatgtgaaagatggtttataacaaaagatggtcgaataaataagcaaagaaaagagagaagaaaaaaacgagaaagccaagtttgcatcaagcaaggctcactcagagagattcaaaccaagatgagatcctgctcatcctgtttctgactaaagcagaagattaagaggtaggagactagcgagcaatccacactcgtcagcacgcgaaaagagaaaagaaaaagaaaaagatggtgggaaaattaacaaggaaagattgagaggcaaaaaaactgcagatattctttccaagggtggagctcaagaccgccgaggcccacggccaccagggttcatggacgacttattcaggcatggtttaagagtgatacttcttgacggcggtcagataagcctgtccactttcggtgagcgcaccgtttgaccaggcgggccagacggtgccaagaccgtcaccgttgctcatggcgtaaccgatgactcggctgtcggcttcaaagatgtcaacgatgtcggcgatgaaggtgttgatagcagtctgatcggtgcagggaacaaagctagaagagtcatcgacacaggcaaactcgttgaccatcatcggtttcccgtacttgttgtaaaagtaatcgagatcggccttgacgccggccatggagttcttgttgatgtgaacgctggtaaagtcccagtcgacctcgatcaagttcttgaacggcgtaagccaagtctcgtcgagttgcttgcacatcgaaggcgaaccaagaacagaaccctttgctttgagtggcccgacgagctggttccaaaggagcgctccagtgatctccgatagcccagacgagccacttcctgcggcacaatcgggctcctcaaatccaaagacgaatttcggagtgtaggtgagcgctttgaaagcggccagccgagaggcatcggtcgcgtcgactgttcctcctccccaaagcatgttgaccgcgatcggagttccggtatgtccggacgggttggcggacctatgggtagatgggcgtgtgtaagagaagacatatcgaatatcaataagaaatgagcgagaagagaggactaaacagcgtgacgaaaaaggaagagaggagacgtaccagtcgtaccaccatccgatgtatggagacatgatatcataggtgtctccagcagagattccggctttgttaccgttgggaatccaggcagagtacgtgctggtcgaggtggccgaagcgacggcgctagaagcggtggaagaagccttgaccgaggaggataaggtggaagagaccttgaccgaggaggaagaggaggcggcggcattggaggtagtggtggctgcggcggcctgaacgatctgggcagtcgaggtggaaacaacagaagaagacggggaagatgagtaagatgatgcctttgaggtggcgacggtggcagcagtagtggttgtagcgaccggcttggaagagctagcagtgtagacagccgtggaggaggaagaagaagaagaagaagaagaagaagaagaaagaacgctggaggaagaagactttgctttgcaagctccggtcgttcgcttcctcatctggacggatccagggagctgtctgccatgaatatcgaacagagggctggctgccgctcgcttattgttcagagctctgttgtggtttctgttaccggctgttccatggttggctgccaggccaaaggaagaaagcacgagaatagctgctgcggccgtgtttgtgaagagcatggttgagtgaacagagatggggatacgaagagtacgaagcaagaacggatgggtggtatgacgatcaggtataagaaaccaagagggtgggagagtctttaaagaacgtgtggacgttgacttgcaactgaggctcaacggagaaaaaggggacgaaaacgaagacgaaggagaacgagggatgtggatgtatggaagtgaatgagtgtcgacgatagaaacgaggcgaacgagatttcaagaaagcaaatcgaagacgaaaacggaaaatgagggttgacgatgagaaggaagaaaagaaaaacaaaaggaaattagccggcaggtaaaaaaaatcctgttcgcctcggtggccccggccggatcaactttggttcctgcgttcggctgccatcgatctctgtccatccggttcttgcttctcacacagcgtctcacatgtgttctcattcctgttctcatctgtgttctcgcacacccactcacatacacattcacatacacatacacatacccatctctcccccagcacttcctccttcaacatcgacagacaacggcaacaacaacaacaacaacgacgacaacggcagtcatccccactgggctgcagtctgcgcgcacgcgcgcggggtcgaccctggctccggatccgggcgaccctcggtgtgacagaggacgaggggcgagagcacgggcgtgggcttgggcgtgggcgtgggtgcgagcctgggcctgggcctaggccttgaagggcgatcgggggtgttacgtaagatttcattaaggggaaggaagtgtctcagggttcgcgtcgtgtcgtgtcgtgtcgcgtcacgtaacgcgtgacgcgcaaagacgcgtcattactttccacgcgccacgcgtcggtcaacagatcggttgatctctccctcgcgttctcattaacgatcctaacgtttgcgctctcgttcactcgtcctcgacacatcacacccaatcactggcccttagtatgagtgaagaaaagacaaagcagacgctcgcaaagctctttgggcagcatatcctcactgacaatgctctccaagcagaatgcatgtatctttttctttttctcaattcttgactggtgttccgtctggtaccattccgctcactcactcctactgactctctttctcactctctttctcacaggtctgtccattctccgcctatatgcccttccacccgatgaactgtttttcaaatgggaagccttcgtactcaatcacctaaagccctcaaagtctggtgccaacccggtgttcacgttggagaacgcaaaggaacttcataaagaaatccagagagaagcccttgccaagagatccatccccggggctggaaggacacccataggtacccatcaggctggatcaatggctcataaacctgccaatggctctgtcaagagacagtctggtatttcatctggtctggagttgtgagtctcatgtgcatggtcgggatgatcgatgcggtttgcgggacttgactgacgtttgatctcaactctatcttcacctttccctttttgtcgttccttcttcctcaaacccatactctagcctcgacttcaaccctgccactccttctgccaagaaacctcggccatcatcgtctttgtcagcttctaaccctgctcgccaacctaaacaggagccggcatcctccccgttctcacttcctcctaccaacgcaacacccagactggaagccctcgccaggctcaacccatcaatcaagacagaacaaattggaacgccagagaaagaaggatcaaactctgtgttttctagcccatcggctttgtaagtgacaccatcaagcctcgtgtcatccggagaattctggcatagccgctctttctataactatctccttgttgtatccgttccatccttacagaactccggccggatcgaaccagtttcactccaggacgaacgctctctctactaccgacactctgaacgcacatcttgaaccagcccccattccggccatcccgctctcagcaacgtctgtcaaaggcagaatcacgttcagtgccggggccgacccaaaggactatgcttgtaggctctctttctttcttcatttccaattttttgctatttggtctgtttctttcctattttcttttttcttgactgttcactaacaaaaaaaaaccatactctttagatcgatacatgtttgaaaaagtttctgagcgaagcgaaggtatgactttcatctttactttctacccccttgtttcctcctcgctcaccccaatccttacgacccttccttttgaaagtcctcgactcgagaatcaacgaccttgctactcacctcctcagcgcatttccttctcttcccgaaccagccgacccatcagtcccgacatccacccaaattttcaccgtcggtcaaatcacaatcgatccggaacaaaccacttcgaaactcaatgaccattccctcgtccttcaaacttcaagaatcgtaggcgctggtggaaggatacccatcagattcactgagggatgtaaagttagaggaggaccagaaggtgtcggttctgtcgggctgttcagtggtggcgtctggggtttcatgggaagaaacggaagtggacgggagttttgggtagacgaagtgttgatcgttagtctcccttggctttttttttcttcgtttgcgcgcatatcgttgaaaccaaacatggcctcaccctgttttaatcttccttttctgttctcgctcgtcaaaaagcccccgcctccgccgttctcgtcaacgcccgcctcagaaatcctcgagatgcaacacggtccaaagatgggttctcagccggtctctgtctttgctgcctctggaccgttcacattagacgctgatttagagtatgagcctcttgaagcgctggtcgaagaggtcaagcgttgcaggccggattgcatcattctcgttcgtgctttacttttccctttcgggcctgcttcgcgcatacactccctttgactcatttaacccctctttcaattatagatgggcccatttctctcctcagcccatccttttgtcaaatcaggaaacctgactctatcacctaccgagatatttcaatcaaagatctcttcgagactgaaggatattttggataccgttgttggcagtcagatcgtcttggtacctggagtgagagacttgatcactgatcaggtctgtttcccacaaggaatgttggacagagatgtcgtcttgccgtccaaggtgtgtcttctccagcagagtaaacttgatatattgaccttcttcgtctgtctcttttttttttcttctttttttttttcttacccaaactttttctttctttctgttttctttcatcatccggcacctatcctgccttagagggtcagactacttccgaatccatgcctgatcaacatcaacgaggtcttcatagggatctcctctgttgatacactcttccatctaagaaaagaaacgttcttcaagcaagcaaaggaagccatctcgaccgagacgagtggtggtggagggataggagatttgatggcgggtgtctgcaggagtctcttacatcagcgatcgttcgtcctattttgcatccttccccctttttcccttcccttccttcagccctcttcttgagaatcatcgggcttgctaaccaagatgaaggttcctctctcccctatatgtgtctgtccttcacattcgcccaaaacagattttatccgttatatccagtcccgatcgaagcgagcgcagatgtgaacctcgatctgacacactatgatctcctaaagatggagacctgtcctgatgttttgctacttccttccaacctcggcaaattcgctaaagtctgtccctcttttccctcgtctttctttaccttcttcttgttcttgatggcttgtctctccgctgtcgatcgaacgtgatcctgatctaccctcgttatggctctatctattcgtcactgaacagatcgtggattctgtgatcgtcgtcaacccaggaagactctcccaacgatcgtccggagggacgttctctaaattcgtcatccatccgatcgacaaagagtctctcattagttctgctcgttcagcagccggcgcacaagccggaggtggtggtcttggcgaggaaggggatgtggagcatgaggcctttggaagaattagagttgacatcgtcaggatctagacatttcttcatgaaggggtttcttttcatttctttctttcctttcagaggagggtcatacttcgaattcgctttgacttggtttgatgcaactgagagaactagagagggaaaccatttgattttgacctcatcgtcacacattgtcaagaaaaggcgctgttctaaaggaacagaaagaaagcaaggggaaataagatcaggtcgtcttccgttcctctggatgaacccttttcacagctccgctcggccaaccggactttagagtcaacacagaacccaggagtgagagatccctaacaggttcttataaagcagctttggtacttccaccctcatcaccaggagaggcagcagcggcccaatcgatgacccattctttccctagtccttgttgaggtccaacttcgatcccactacctagttgcattccttcttcttccggtgcggcaaaactattcacgttcgtacatgtagtagttcgtagggggaaagacaaaagacaaagacaaagagagagaggtgttattggcaaatgaatatgcgcgcatcaggagagttgaaataagaatggactgagtagcagggacgttaccaggctcttagagggcaaacggaaatatagcctagtttgcagatgaacacacaccacatcaaaaattaaaacaaaattgagaaaatagacaggggaatctagacaatctcttaagaaaactaattccaaagacaaaccttgatcgatcgcccaggtatcagttcctacgggtacggtggacgccaatgggttaatcaaaggatgcatatcaggtttgaagtgaaacacaagttgttcatccgctggaggattcgtcgggtccactggttccttagttcccgcgctaggcaacggtttgaatagactagcatctggtgagtccgaacgaagtcgatagatagatattaaacgttgtgtcagtttggtgtggtccgcgtagaattcaggcttctgacacgaacagttgtttctccagactcttgtgaagaacactcttggatccttcaacttctcctccactaatggcaggtttacactgtagaggtcgatctcttcttttctgctagcccagccgttagtatctaccccccaatcttcccagaggcgacggatgatctccacactagcgatattggccagtcggagagactcaggagtgaacgttcgattcatgatcccgtacgacagcgcgatcgaccgtgtccgagacagggacccagaaagagcagctccgatcgtcccggaagaaagagaaaaggcagaggaagagttccgaccctgcatgtcgcatcaagctcagatgagcttacactgacgcagctcttgtatagttgcgaggtcacgtggaacatagaacactcacaaagttgggccctgacggatcgattgagttatacatgtataaattcagcaccgagtcctgagctgtttgtaaacgggacagctcgaagagcgagatccaagcagttcgaacttaccagagatgaccagatcgatctcgccggggtataggttgaaaagcgagatgttggtgcatgtagccggtgtctagcggcacgaacaaacagagtcgggtcgatcaagcgagtgatcaaatgactattggttagatctgtcttacggaatgctagccataggctccaatcgtatcaaacaggtactgactccatccaacagaatccactcgcctacttcgccttccttcagaggtcgccgaaaaggggttttctcgccctatatacttcaagaagaccggttagcagctgtctttgtttgtctttagaaacaaacctcgaagctatgaagagacccaagcagacaactaaccgctccttcaggttcagtagggtagtagtagttggctgcgatgttatcttggatctaaagttatcagagatgcatgtttcagccatggcgcaccggcgacaagggttattcgcttggcacaagatgcctagagtcagagaagggcaagagacgatccacaaacctggtaggcctttccgatccacgacttctgactagaaggcacgactaccttgacatcccatcccaaggtcttctcaagcgccctggcaaatgaaaagatgtttggtgactccttggtagacggagggccatcatcactgagatcaagagtatccgtcggtagccgaagtgatggttagagaagaggagatattctagaggcgcagaaccgaatgaaggaacgcttacttcgtgagtagtactctcagtcttttagtactcatgacttctctttgttcttctcgtgcgttggagagaaggaagaaagagagaaagagagaaaaagagaaagagagaaagaaagaaagaaagaaaggaagtggaccgggggtgagaaggaagctgaaccggaggcaatgaagatgatgtcgttttgctgtgctcgtgcgtgatctccaacgccacataatcgccaaccccacttaccccatcgttatcagtccattgcatctcgaacaacatacatccacaacacatatttgctagaacacacacgcacacacctacacatacacacatatagacgtacatacactatgaacaaacatccacaagcaaatcagacaggacctaggttgatacttccattggcaaagcactcacttggaccgttcgtcctgggtaggttcctcagtcagattcagtcagaaagctagtaaccaacactgatctatgcgattcacaacaaaggatcaaccctattttcgacgctggattttctcagaacatccgccggtagacaatcgtatccttgggtccatatcaagtacgatactaaggtatatgctctcctgcgtcttcgttgaaaacggaaaaccgagttcgctgatgtacagacttcttgttgacaggctgtgtcaaccacaccaatcctggttgtcctacttccttcgatccacctcgtattcacttcccctgaacaagtactctgccaaatccatatactctctctgcctcttcctacactaagcctaacatatcatccgtcctcatccactcaatccgatccaatatcgctatgtacacctgatcgcccactcacattcggaaccacctcggcagttttcggaccaacgttcaacgggagtccatcggagaccaacggagcaaaatcgccttgttcaactagtggtagaggagagggagaggtcaaagaggtttggtatcctgggctaggatttagagggaaagagcctggcgagggagaagaagatattgaggggaaaggatggagggaagagcgagtgaggagtattcatctgtgtgagagagaggattggcggataggtttgagtacgtttgaagattcagactcggaaagagtatggaaaaggttgaaattgaagaccaagaaagaccgagtcgaactagagaaggtgacgattgatgtaagttcccatcacctttcttgtacgtctcagctctgttcaggcatgttgatcgagcttcgcgctcgcatgtctttcataggcccataatagatctgccatactctcattccttccactcacaattgggccattacagatcaaattgaacgaaacaacctcaacagatcttctggtcgagcttggtccaccgctgcggagtttttggaaggaagactctcgtctgaggattcattatttgggagactcggaacagagcgaagatgaggatggatttgatggccagggttgctgtgtgtttttccttttttttatttatcagaagatagagtggttcgtgagtgtgctcgctaaactggccgtttgtctctttccgaacttagatttctggaactatcttcagtatggaattgtaagcaacaccctgcgctccattctctttggccttctcagcgttaacattcaagtaaattcaactctcccttctcttcgtattcaatcaggacttccttctatctccctctcatatggtgatcaaaatgatcttccactcgaatcttgtaagatcctatacttcaacttcctcgttcgaatcgacttcttatgtcctctcgcgcattcgaccgtactcgttgctaaccctaattcgtttcatttatacagcctggctcggtaacttttggccgcttcgagcgttgtccctggaatttttcctcgagcgactcttcagtattggatgtgactcgtagcgtgagcaattttgtttcatctaacagtgcgcgcacgtcaggctttattcactcaaccctcctacttttttcttgtacctttggttgctaggcggccgtcctactagaaacgatgtcctcttcgctagaatctagagacccagaacaccacggtactaccgctgaagacagccatacgttcttcgggaaggaaacgttaggtttagggatggaacttgatcgggcaggtgaaggctggggacaaggtgttcttttggaagctagcagtatgtttcctcttgacaagcaatgtgacacaggcgtggcttgaaaggctgaccagtctttgagggtttacctctttgttccatgttcgataagcactggttgctgcatcatcctacatcgtgtttgaagttctggagtctggatttgtcgaaagcgtcatcatgtcctgagggcaacctattctcatatcttcctcttctttctttcttttcttctttctatctatctctgacacatctcatcgttcacttgtatcaacaaacttattgcttgttcacttgcctgctttactgattgaccaacgttgtaagaagaatgcatatttcataacctataaacacataacatacaaccccatattgtattccatcgcatttttataaagggcttctcatctctcatgctttaccgtcctatccggtcatatttatgcctctgctctttctaccgttgttctcttggagtgtctcatgcatgtattgcactaagtgaaaccaaattattcataacagaatctatgtacattgaaggaagaaaaaaacgagacgagcgtgatagataaatgagacgagacgagcgagcgggcgggcgagtaagcagataagaaaggaaagaaaagcctccagggcagatacacttgaacaagaaatagaacaaacataatagggatgtataataaaagacgaactcgagcaaacgagaggacgtatgtgtttagtgtaagtggattcgagaaagagaagacaatcgagaagataagagaaaaaaaaatacataagtcgaaatcaaaatcagaagaagaagtccggcttagaaaagagatcgagcgtccgtacttcatcacaaagaataaaggccttcagatatcacctccttttagcttccttcaaaccgcggtatgtttgacgttcaagaagaggaagaagagaagaagtagtagttccagttgtatgtctttacttgggacccttggaatgtatacgaagcaggagacacggaagctgtgacggttccgtcgcgtgtcatcgtcgcgctcattccagatctattttcgataaaggaaagaaggatggaccaaggttagatatagaaacccgttcgaatggcgagaatgaaaaaaggggaacgaacccagattggagagacgcatcgagatagttgattcctgcttggacgtcatgagttgatgagagactcccagacgtgagtgtcactgagcctgctcccgatgcaaagacgagtgcaaagaatttatcctcagtctgacaagttcatttgaataaataaaaaagaagaacgacgacagaaagaatcagtaagtttgtgatctcttttcagtaatcagcgatcagaatcgagattctcacccattggtaaccatccgcgggcccattctgacctccggtcggtcgtccacaatcatcagctgatgcgaccgcactgttcgaatgaggtcgcgccgaaagatggataacatcctgttcgatatcagggtacgagcccgatcggtacgcttcagcaaagtactgattgacctcgagcaaagtcgtgtggttcagaccgtcgacccagctttgagagtttggctgagctccctggataggtccaagataactagattcgccataatcgttccaagtcagagcttcaacaagttggacttggtctcgcttctcgacgagaatctcccatcgtttggcgaacaagaacccgtcagaaagatagatccaattcttgttccagctattgggtccgtaatgggtgaaaaagacaggagataccgaggccatgtaaaccttatcgtcgagtgcggatacgtatgcttcgtcatcgacaaaggtgatgttctcgttcccagtaggccaagctccgttccagtttaggtgaccatccaggacgtcatttccagtgagcgtggctgggtcaacaaacacactaggaaggaaaaacatatccaaccctgtgctcgtcttgaacggagtcttgacttgatcggtgaacccggcagtccagtcagagtctccaaatgtacatgtcgatccagcgaacgtagaaacaattggcttcccgtcataggtcgcttggtttgggtgagaagcgtacgtagtggcgagagagaggatagcttgggcgtctgaagcggatgcgcagggaaagacggacatgtcaaacgagatgaagatcttgaaagaagacccatacttctcggcggctgcataagctgaggcgagttgtgttacttgctataagtaggatcaaagatgaagaggtttgtcgtgagacgcatcattcacccagtagggagaggaaaccaaacgaggagaacgaacccatgagtcggtacccatgttggcggcgaagccatcgaacccgctctccttggcgagtttgatgtcgtcgtaccacatatcttcggtataaggatatgtgtttcctagcatatgatgactggggagataacgcgtaaggtgaaaatgcaagatttgatagaacgtcgcgtaagtaaacagagggcaaggccaagacgaaagagaaaaagaaaatggaaaagactgacacgtaaacagctctgtcggtagggccagccgtggcagaggatgaggacgtggtcgtagcagtggcagctgccgaggcagacacaacagcagaggaggtcgaactaggctgaacagtaggggcaacggaggtcgcagatgcgatggatgtcgcggatgccgcgacgacggaggatgtggtggacgggttgaggttgacgcccacgcttgcatggacaccccaatggttcttcctaccgacaatagatttgacgtgtccttggccaccgacccgtcgaccaggcagatgtgatctcgacctccggagtggtttgtgatgttcggcagaaacgtcggaggagagcaacagaagcgcgagaagggaggacgcgatccaggataggttgggagtcattgtaaggttggtcggttgtttggatgttctacgatacggctacctgagcgaaaagagtgagagcaaacccaagaaagaaggtgaaacagactaccagagtcctgaagagaggcaaagagaaggtcgacgaggaatgaaagagtgaaggaatggaggaatggagataaagaagacaaggaaaggaaagaaaaacaagaaaaatgaaaacatacgggccctttaagtaatcaaggggagggaacaatttggaaacaagcgggaacatccttcccgttaatcctcttacttttcctagatcggtgcatgttggtcaagcgggaagccttgttagcatgcgataaggatgtgtcggtctgtcagttggttgttcagtcatttggtcggctattcagccagccaatcagttagtcagtcagtcgatagatcaatgaagtcggaggatagatgatccagaggatgcaaggacataacgaaagaatcagagagccagtgtaaacagcattgtaaccatcctcatcaaccgaccaccttcacatatgtcggccaacctaccttaccgtatactcgttggtaaagatagatgcaccgtccggttcgaaggactcgtccagggaactgataagccctggctcggtgtcgaatgggatgatccgagtagagggaaacatgatggcgagaaggatggtgtaagatatttcacctgtcggtaggtccggtctccatcttgctctccgtgtttggacaccttgaactgatggcaggctgataggataccagctgccgggtcattcattcgacccacatctgtgaagatcattcgtcctactcctttcttgggaaccttgaaaacccgctaccgaccacccccggttgcaatgaattcggtggattcagatgtctccccggttgaaggtgtcttcctgggcgggtcaaatatcttggtggaagctcccaacctggacaagatccggcggagattaatgaacttggttgcgctcagaaccattggagtagatgaagaagccgttgctggactaggacctggtgaggaggacgagatgaggtcgatgggcacatggggtatgctttctctgatctctttcttcgtgtcactttctctatgcatcgactaatcgaccaatctacccttctatcattggctgtgttcgtagaatcaaagacacttaacctggcacacactctattctcaaactggaccgaggtagctcaaattgtcaatgtactttgtcgtctagaaactctaaacctcaagtaagatccctttcttatcaccgacttccatccgcctcggtacaaacaagcagttgctcaccacgcgcattcacttatcaatcagtgccaaccggttagctactcttcgggaacctgtttcgctcccgtgctttgggcaacttaaatgtctaatgctgaataataccttgatcacatgggaagaggtcagttgcgccaataaacactttatgggcgacgagacagaatctggagtctcttctttctttcctattcatactacatgttttggatttatctatcatgcaaaactaggtacttttcatagagccttcgcttccaaacttgacatcacttgagttgtcctcgaaccgaatcgaaaagatatgtttcccggacgggaaggagcgggagatatttcctcggttagaagaacttcgtttggagtggaacgagtttacttcttgggacaatctgaacgggcttgttacattgagatcgtaagcacagtctgtcctcttttcgttgaacataactatcgcgcatctggagccgcgcgactttcctggagaggaatgaatagtgttgacgggatggtcctcctattgtcctggtacagacttcgccttctctcgctatcagccaacaggttgcccgccttggactcgagcgtccggtcccttcctccttggttaaagttcctcaatctagcgaacaatgttgtcgccggttggaaaagtatagatgtgctgggtgaaaaggcttttgaactggaaggcattgtactacgagggaacccactgttcacatgtctgtctctgtttcttcttttgctctgccccattttcttctcgctcggctgactcaatggacactcatgaacatgaactgtctggcgcatgcagctgtccatcaaggcatgctaagagcaggggtcattgctaggttgggatccttaaggctgatcgatggaagtgacgtaagtaccaatgaggtgtttgatcatttctctggatgttatatacctggaagctagctttccctctttatttttttctatggatattgatcgactggctatcatgatctctttcttcagatccttgattcagagaggaaagatacggagatgtactatctttctcggaatccgagttttccagaaaatactcctggacgatccagatgggattcactcgttgccagtatgtttctcctcttctctttggttgaactactcctgttgtacggcttttgacgttagaagaggtcaactgattggaacatatcgttctactgtcttccagaatacggcgtatcagagaacccgactggctcgatgtcaacaaaacctccgaatgcttccacgcttggtgacaaactcatcagtgagtcagccatactgttcttcttgcaccctgaataacacactcagacaagctacatcatcttcgaaactcaacctagacatcaatctcatccactcatcactgtcttcaccgacaatccttcgagtattaccgagcatgaccctcaagatatgcaaactcaagatatcccgactcaccggcctcaaaccggccgagttccagatcgtatacctgggaacggatgacgaaatcgcagagcatgtggaggacatatggtcggatgagaagaagacgctgggcgagctcggcgccgagcgcggtggaagaattcgaattgatgtgtgttgatgatctaaaagtcacgtgcgccggataaaggctttacccgatggtctcctcgacgactgcgcattttcaagcgccgggtgaaagaaaaaaacgaaaagggaaaaaagattccaacccactcttcatcgaccatcaaccactcactcgttctatctcatagcttgcatactctttctgggtagagaacagaactctaggcttcacatcggaaggttgaccttgcgaaagatctctatctcctcctttgtccaatctaattgcatcaccatggcttccagccctcagggttagttctctctttggtctgttcaacatgcatctttttatttctattttcttttatcttcttctgctttgtttctctcttgtttcttcctgttcccttgcaatggtagatggacatgagtcttcaatcctaacgacgcgggtgtttaatgggatgggagcagctgggcgacgaatgagctgacagggatggacagcaagccagctcaagctcgcatgggtgatcgagcatacgtgtgtttgaaatttagaatactcagcctaacgcgtcaccggcctcttttttccttgttctcgttctctcccacgacttggcactcatccaatactctatgttgtcttgcctctcctcgttctcaacttgtatacaccgtagaccaaaagtcctcaggcttgttccaatcggcatccaaaagctcaaagtctgacacccggtccgccgcgtcaggacaagcagaggacgttcggctagccccggtcggtcctacggtccatggtatctcggccggagcttcgcaactagggggagctgcccattcgatgacatcggaggattcttacatgggagccttcggaagaaattcaaacggaaagccttgtgagctgtcttattctgttttggttcttcgcctccgtctctatgagtggtctgcattcgagatcaggtagcaggttcactgacacttagttcggcttaatagcttcaccccatgcaccattctctactgcacccgtgtcaaacaaatacccatcgcgtccacctcattttgcctttccccagcctggctctcctacaggcttctcctcatctgcagctccgggcgcgcacctgctaggcaaccctcctcggtcatctggataccctcatcaactcccacacaacaccggtttctcctttggaataggaactagctcaatcaaccctcctcgggacccaggattgttccaacagacgagctctcagcactcattctctatacctccttcttcaaaggaacccatgtcgagacttctaggattcaacgcaggaaatacttctgctcactccgcgacaaagtcatctggctcctctattcctagcccacgctcgtcagaacagcctatttctccaagcaaggacgataccaacaatggtgccagcaatcacgttcaacgatcttctgttggaccctcatggtctggtcagtccagacgatctcccatactaggagacgccgaccgtgagactcgggagaaggaacacaaagaaaaagagaaggtcactcgatcacacatcgaagtactgaaccgaccagcataccgatcgaccccttcgtcttctccgcccatacacgcgaacaatccgaaagatgccttgctacttcccactgggtcgtcacaacacccgcctgcgtcgtcgcgatcttcagcaacgctagcctcttctgcacggcctcagtctggagaagatagacgggaagttatccgactgaacgccggttcagaatcaaatcctattcaggcagcgggccagcccatcctggagagaagagagcctaggccgtatgggttttcgtttcacaacccatctgccgtcagcccggttggtccattgccaggtgttggcagttcatcgggccacaagcgttcggaagggatcaagtcggcttccggatcgcctgtccgggctggttatgcttctcattctgggatgacttctctaccatccccggcaatgccagctgtggttcccgttccggcttcccggaaatatggtctcgtgcacgcgacttcttctctccctcctgtgccgtcgtccggcggaacaaactctcatagtcaatcaggtcaacagcaccgccattcctctgggactggaggcatgaaagtcattgagcctatggatatctcctcagggtcgtcaaacctttctcagcagtctgctcactcgcattcccatcaacatacccatcatccgcattcacatcctctccttcttccgcctcaacatcagtaccagcatcagcatcagcatcagcatcaaccaatggtttcgtctactctgctccctccaccaccaccaccgccgccggcacctcctccatctatgatcctttcgaattctaacagttctactagcgcatcctctcgtaaatcgaaatctcatcgatacaccgttcctccgtcaattccttcatccaccacgacatcttccctcctccgtccagaatttaacccgactctgctctctagcgcacctaatccaactgttcgatctccattcctcatctcacttcccagagaagtaccgtatctcggcaagttcgtttacggaggacaagggtggatcttgccttgtgaggtcggggaaaaagctcatgagttgatgcgtgtgcctgcgggcgggggttcggctagatccgctcggggtggatcaggaggaggaggtagagtcgaagtcatcattccgagcggattcctcggaacgggttggacgttaaagtccaagatgggcggtggcggaagctctgtcgacaagccatccatctttggaactgatggttggaacgcgctggtcgattcgatcgggagagaaagaagtttgtggggaacagaagtttatacggacgattcggatctcgtcgctctgcttgtccatgccggttggattgtacctgcatctgagagtgacaatgtgaacgataaacccgatggagctcgagtcagaacagaagcagaagcagaggtggaggcagaagggcgggaaggagataggttgggtggcaacgggaacggccgtagcagtgatagtgatttatggagagagagcggagcgctaagagtgacgttgagggtggtcggtcgattgattaggtatatcggaaccgaacgaaatggcgtgaagagtagaggttgggggaacggacatgatggtggaagtttggtcgtagagggtgtaactagggttgaggtttgtctttttcttcttcctatttcccttttcctttatcgttctggaatttcttcgtgttactgatctttctatttttctatttttcatacgcgactacagcgaacgaaccggacaagctctctctcccgacgcacaaaaaaggctcgaatgacacaagcgatccaactccggaccgaatctataaaggaagacaattctgcggtcataaatattcatgtatggggtggagctgggtaggtcttttttttcccatcttttagtcatatacgcattccgctcatcgatatagtttatctcgatcgtctctcttacagattcaagtattctcaagcagggatccaatcttcattcaataatgcgttatacaacgcgttcgcttctctctctcttccgacagaaaacgggccgttaggcgaggttcccgatgggtttgatacagggttcagaactcaggatttatatctggaaaaccctgatgagcggtacgtcgtctgggcgcatcttttgtctatcatcggccatgagtcaattggatttgtctgatcagcttttcattcgtttccgttctcctcgaatgctcgaacttaggtatcgcctaactctctccacctcgatcgagagcgatctatcaaccgggacaaacagcccccgattctcgatatacgtccttccgaaacggtcttctaccacataccctttccttcgcccgctggattcatatgtatccccgatgcaggaacagacagcccaaaaggatacacacatggcaacggagggagaaggcaaacaggaggaacttttaggagaatcaaccgtcggcccttccgatcttgaatgggtcgagatgggcttggtcgttcgtgactcatcctccgtctcatcttcttcttttaccgctggcgctactcttggcgaatctgcgaacaaaatcggaattgaaggccaaatcggagatggagaaggaaaagaaggacaaggcgccggtcaagttagaacaggttggttctgcaagatcgagtcttactggtgggcccctcgattgtcggaccggacagaatgaagagagagagagaatcttctttcttccaatctgggttcagaccgaacgtcgctctagaaccctcttctcttttttccttcttgatgctccaaatagttataaagagttggatggaaagccaaaaagaagtaatataaataatgattaaagatctattcgatcttgcctttctctatttgctttgcccttgacttgttcttggtcacaatcttaacgaaacgtagaacgacatgaactggctcttttagagaaaagaaagcatacatagccatgagagttcctttgggtttcaaaccgaacccgtaaaagagggcaagaaaaagaaacagaattatggttcatcgaaactaggttgttcgaacccatcgaatcctaattcgatccgattgagatttccgacccaggcatgggaattgaaagagaacgaatcccccataagcaaggatacaagagaatcagaatacaacaagcagggtttgaagaaaggagacagaaggaagagaagaaacagacctgataatcgacgttcttgacatgcttgaacaaggtccatcctatgcatgtacgagcacgcattccgtagcctattcgagcacaattcgaacatgacacagaggtgagaagggaaagaacggttaaacttgcgctcgtactttccgaagcaaaagaagaaaaaacagtagagacaggactagagagaaaaacaagcaaaaagaacgtacgtgtcccagagaacatcacttcctattccctttcctttgactccatcgatatccgagttaggatcttccatcgattccacgtgttgaagtctcagagcggagagaacatgttcggctgcttcggagtatctctatttccgtgtcgtttggttgtttttggtggtgacaatccgaataatcagatatctatgcagagctaggggaggcgaatcgaaaagcaacaaggaagaagagacgtactttgaggttgatgcatgatattcctaggttaaacctgcaaggtgatttgaaccagccagaacgtttcgtagaaaggccttctggatcagcgtctcgagataccatacaggaaatgagaggagtctagagcagatcaaggaggagagaacgctacctggctctaataaatccaggccgtaaccctaaggcagcccaatacaattcgtaggcctcttgagctttcccatcactgagagaaaagaggaggacgagatgttcgaaccggtatcagaacggatcgagttagctcacatttttcaggtttgattcataaatgggatcaatctcagagggagggcaaggagacttactttgcgagggttgcgcctagacggttgtacaattgccagtccttgtggagcatcaaccaaacggcaagtcaatcattggcctgttgacttgtttttcagggaactaacgaaatgagagaagaaggaaaggataaacccacattaggcttcacggagagagctgtcctgaaacagtcttgggcgcgttgatactcctttggtttgggtgataggaagaagaggaagatgagcaattgcctcatggaaggaagatgaaagtgaaaggcacaaggtgcaagtatactcaccgctgtcgagctgaacaacactccgagtgcaacctgaacctctggatcgatttgactttgattccccaatctagccatggtgatcaatcgatctaccaactctgaatgtctcttcgcgatcctttccgccgcttctgctcccctttgttcagccttttctctctctcttcctagatcggcatccgtctgatgaagagagcctccgagtcgaagtggttcataggcaggcacagcgttcgcatagacgttcacccaatcttccagagtactcaacgcagcgaggcggtcattatcgttcgtcaacgagaccgccaaagagaggtatgcctccgggatagatgggtcgagtgagatagatttcttgagggcgagaattgcttgtgactctcgctgatttttagaaaacaagaagattcgttagaagaccgattatcgggctcgagaaagatctgaagagattggcaaaagagcacaagagagaaggacggacctcgttttcttgctgcttgacccctagttcgaaccatgccctcccattcttcgggtcgttcagaaccctagcctccatctctaacacgcctttccatccttcttgatggtcgctctcgagcagagcttgctgctctgctctccatccgtctctcagccaagggtttccgttttgaaatatatactgttcctgcctatcgaaatcggcatcaccgagtgtatccgatccttggaggagccggttgatttcttcttcccttgcacttgattgagcaccggggacgttgatgtgcataggtccgttaaagaacttgaaagcttcgtcttcatcctcctcctcccatagagagttagaacccaaaacctcggtagccgatttaagttccggttcggtcagtgctgtgtaggcactttcttcttcgggtcggcctgattgtgtggctaaggtcgaaggcatattggagatcagatgttcttgtcgattgaattgggcgtcccaatcgtcaaccgtccgggcggaagcggtggcggtggcggcatcgacgctaaatggttgtctattcaagagagacccgccggtcatcgtctgaggatcgaacgctcctgactgaaatccgagatggccaaagccgtttggttgagtgtaaaataactcggagctatcggcggtggtggcggccgcagggctatcaacaacatgcatccgttctttgccttttcctcgttgagcagaagcgaacgattgggcccagccttcctcgccttcccttccgagttcaaccacatgctctccttgaacatccttcgtcccagcggcaaactgttccatcagacccatgaaggcagagtttgccattctgtttgctaccggatctgccgacgtccggtcgacccgctgaagcagcaggtccgccgtctcggcaagagaggacgacatgaggttttctctctcggccggagattgaatagatggagcagagtagtctgagctgatttgagccgggtgtgaaacaaccggatgagggatatgatggtgatgcattggcacagacggtgcataagaatggaaggcgggctgtgtggggaggaatggagggtctgttggtatcagaggaatgtttcgtaacatctttaatcagttgaatcatcaactatcaactattgatctttgggcaagaagacatgaagcacacgtacgatatgtcggacctgtcaaatgatgggtctggcttgaagggcctgcaagagcgaatgcttgctgtggagcccggctattttcaaatctaaggagaccgttggttgtatctggatgagaagagaagcaaaatgagacttccacttgatctgaggtcgagagggatgggttgaagagaagcaagcgacttactggatattggtggacgagcatttgcagtgattcgagctcgctcaaatgcctcctgaagctctgcgtctccgcgacttggttgtatgaactgaaggtgagcttgttgcgggctgtactcggaagcccatctggaatctgattggacgtggttgagaggtctgacttgattttgttgatgctgatgggtcgacgggccaggagatggggcgatggttcggaacgaagctgcaggctaggaggtaggaggtaagaggcaagaccgaaggatgacagatgggttcagcttgagagtgtctgagacaggatggagtatggtctgagcaagagcatcgagacgaagacacacctgtctggaaggacctgctctggagctgccatatatgtcctgtggtgagatatgaggttcagtagtgctaacggcaaaggagatggtaagagaggaacaggatagcctaccgattgaggtcctctgtcttgatgaaatgttgacgataatttgttcaatggattgttgactcccttgtctcctccggacagcatggcagggaaggacattttgtgtgtgtggcagtagtagcggtagtgtcagaggtgatggtggtgatggtggtagtagtagtagcagtagtagtatgagcagcagcagaagtagtactggcgagagcgcgagtgcgagaagtaaaagtaaaggaacgagcgagatgatcgttcgcgtaggaaacagacaaccgccggcagaccggctattgtggattgccgtgggcaagagctgtgcttggctgtatgcagcacgtgatacttcgccctccaacggccgcgaccggggtccctctgtggcacaagcccgtccgaggccgggctggcgtttgctggtacctgaaaatagagttcacatgttcctgacgtactaaatactgacgatctgtttatgaaatctaaatttagatacgaagatgactgtccgccctacgtgggtgcgtgtcatcttccaaggacttctattaccaacacatcccaatcgctccctccggcctccgttcatacgaagaagaagacgctaaggtgatggtcataccactttcagccgttactcacttcacacagacccaacttgtgctcacactacacacccctatcgttatagagactacacacggtcggcccatgctaaccagatgaactataagcctcgtgttcaagtctttggatacgtgggttcagcctaaaaagtatttgatccatcatcctggccatctggtacaccgtccctccgactaaaaaccgtcttgtccacgttgggtctggcatattgatcttggccaaactcgctcatatcttgttccatccgatcacccccacatggtccattgggtccccactttaatggatcgagagagatgacccttataaagtacatactcttttctgcttctgcctcttttcatttccccatcttcttgctctacaactctttctcacattcagcatacttctattttctctcttatctctgtccttgtatctattcctacccatcatgatctctgacaccgtcatcgccattcttgccgtcgccctcgtcggctcgaccgtacaagcagctcctgtcgatgcgaccgcgacctcaacctcaggtattatcgcggtcccaatctcaaagagcgctgctcagcttgctcgagaggccgacccggtcgtatctctcgactggctcaagaagaccaaagctcaggctcaatagtcagtgttttcattgccactctttgagtgtaatcttggtctcgatttgcgctgtgcggacatggttctgactaggcatgtgcgtgtatgtgcgtttcgacatatagtaagcacaagcaggccaacgcccggcttcactccaagcgagccaccggagcatccgttttgaccgatcagggaagtgagtctctctggactggacctatcaccatcggtggacaatccttgtgcgtttccgtcatcaagtcttttttttcttcttggtagtatcgggatttaggcgctaacgtacgtttggtaatcgtattcgggttccttctcttcctctagtactgtcgactgggataccggttcatctgatttatggcaagtccgacatcattctattctatctatacaacacgctctcaacctgcttcatttcacgtacttctcttcaatagggttccttcttcggcctgctcaagcgctgcctgtaacgcacaccacaagtataccttgacctccactggaaagaaggtaatgatgctcgctcagtcttcgaagacctctcgcccaaaagctaacctgtcaaggattggaaatatatagcaatccggcacgttctcgatctcctacggagacggctcgagcgcttccggtccagtctacaaggacaacgtcgtggcttccggactccaggcgacatcccaggtgttcggggccgtcacctcagagtctagctctgtgagtgttttcctttattttgtcctactcgtcgagcaaaagggcccaggatgtgttctgatcatgtgtattcgttcacctcccttgtttcatagttctcgtctgatccatctgatggaatcagcggtctcggctggcctgcgctcgcccagttgtccggaacatcatatttctgtacgtagtggaaagctcttgtttctgtgtctatttgttttggtctttttctaactctggtttggatttctctctttttcttcatcatcaagggtctctgatcaaccagggtacggtaacctccccagtgttctctttcaggctcgccaccacaaactctgagctctgtacgttactttctctttcttgcatctcactcaatttgattcatgctggtgctaacctaaagtttccttttgttttcctcttccgaaaagacttgggcggaattaactcggcccactacactggtgcgatcacctacacgcctgtcactcagaaggcctactggacgatcgcccttggtggagtctccggtatgtctgctcgctcgtgtttaatttctatcagcaactctcaagttttgaactgcaattcacccgattgatctcttttctgtattttcgtcggtttcagtcaacggcgctgccattaacccctccgtttcgagcgctatcattgataccggtcagtcgttttcctagttgtatgctgactaggactttgagctgctcttctcatcctcttttcttttacacacacactgcccggtttgtaggaactaccttggtgtatggtcccactgcgggagtcgctgcgctgtacgcaaagattccgggatcggcttcgatggctgatacctatggatccgactatcaaggttactacaccttcccttgtaagttcctttccttcctcgctctccctctttttttttccttttccgttttttttgggctcctcctttctagtcgcgccaggttcactgacaccgagaccctctctcgcggcgacgacgacttttctaaattaattaactttgattgaaaaaatcgaatataggctcggccgttccaacggtagccttgacgttcggaggatcgtccttctccgtccctacttctgcgttcaacctaggaacagtctcatccgggtcgaagcagtgtgtaggtggaatcgtaggccagggtgatggatcctggttggtcggtgatgtcttcttgcagggcgtatagtgagcttcctttccttttcttccttcttctcctccagttgtccctcgtgtttgtttgtttgtttgttttttcgtcgagctgatgaatgttctttcgtccgggacacctttttcttcttcgtttcgtaaaagctcaatctacgatgttggaaacgccagagtcggattcgccaagaccgtctaaaagaaacgcaaggcttttcctctcatcttctcttctctttataattcagacggcaaggcggagggagcatctagttctatatcagcatggtaggggacgggcagtattgtactctaggcagggatataaaaagatagaacgaatggatggataaaaggaaggaatctaaagaaaaacagacatgccaagaggatgaaccgagctgagcttagataaaaggttccctcgatcttctgtttcgaatagtttgacttgatctatcaatataccccgttcatcgtctctgtttgcttgttttgaaaagaacgagagaaagagatccaaaagatgagcgatagagcatgactggtttttgtatatagaaagatgcctgctggatcaagtccttcctctctgagctgagaaggaaagaaaggaaagaaaagaaactgttcgatttagttgatctggtgcactatagagtcagcccttcgatcaatcagccagatcagtaggtcggtcagtccatcaatccttctgttctcaaaacaagcttctttcgtgtttctctcaactttccttgcgtacgaacatttgcctttctcaacatcagacgagaaaacttgtgtgcgtcggcgaggcagccaaagaagatgatgagaaaaatagcatgcaattccgtccctctttttatgcgtcccaaccagcgttggcggcggcaggagcctgagcctggggctcatcagcggaccaggaagcagcaggagcgtcggcggcccagtcggtgttctggtcagcggaccagtcgacgtctagagaaggagaagaaaaaaaacagagacagcttgtgagaaaaagaaatcccctaatggccaatacacagattaaacaatagagaaactagaaacggatgacttactctcaccagcgggggcggaagcgatggcgggaagggaagcatcccactcaggggcctcaggagcggcctcggcggatccctcggcggcagcggccttggcggcggcagcgtcggcagcctccttctcgacctcttcggggtctcggtagaagaacatgtcgggcatgatggcccagggctcggttcgggagacggatcctcggagtcggaggacctctcgggcaaggaaccaccacataagaccgatggagtgcttggacttgttgttggtggggatggcgatgtcaacaaacttgaggggagcgtcagtgtcgcaaagagcgatgacgggaatgttgacgaaagcggactctcggatggcctggtgatcgactcgggggtcggtcacaacgatgattcggggctccttgaacgatcgggtgatgtagttggtgctgaggagaaaggagaatgaatgtaaaaaattctgtcagctgttgtttttctgactgcaaccaaggacagacttcgagtacatagatactcacaagtttccgggggtgaatcgtccagcgatggcctgggcaccggtctgggaagcgaacttgaggacagctcggtgaccgtagggtcgggcggagatcacgcagatgtcgttagggttctcgatcgaggcgagaactcgggcggcaaggacgagcttctcccaagtctttccgacgttgatgaggttgatacctagatgtcgatgaggacgaacgaagaaaacaagacaaagaacgatttagggggtctgacattcttcatgcaacagtccccgtgttctcgttggtggcacaacccccttttggacgttttcttccccaccaccttttcctacgccgtcacacaccgtcgaaaaggggcaggggagaagagactgatgggtgggaagagaaaaaggacaaagaacacaggaactaaccgtcagctcgtcgcttccagacgtaaggctccatagccttctcgcagttcttggacccaatgtggcactgggcggcaagaaggagctgaatatcgtcctcggtggcgttaagcacggaggggaggggaacggcggccatattgaaggaagattggggctggagttgagtgtgttgagggaggggattcagagaaaaatgcgagggtagtggttggatgtaagaaaccgaaaaagacacagaaaatcaaaaatgtcagtttttgtctcgtggaaaatcgatggaaacactgtgtgggtggttgttggtatcggggaatcggttcaaatcaaaggtattcctgagcatatggcctcgtcctgctcctcctaatccttattcttcaggatgaatgaggagaaagtgaagggaaaggataaggcgtctattccatccgggataaagattttagcctgccaaagaccttttgacacgcgatttgtgaccaatcttctttcttttcgaagacaccctggcagaacacctcgaccatcttcactatggaacgtccgcagacctgatcgtttccatccgtttcttgttcggccggaaaggctccctttccattgtcctagcaagaaaagatcgaggtcctatatcttttttttatcccattttgtcgttcatggcctttttttttgatgtccgtacagtctcgatgtatagtaaatttggcgatcggggaaggaactgatatgtcgaagtgatagcgatatctggctgtcgtctttctctcgtgtcctcattccctacgacctagtctcttctcccagagagcaggaaaaatttctaacgatcctaagacccaaccttccaacgtttctctgcacctctcaacaaaaggcgagaaaaaccacaaaaacaagaatccatcgtaccggcaagaagcgatctgacgactacgagcgaatcgaacctcggcagggaagggatacgttcaaaagaaacggtctttcaatgaaagatttcttaccttgaacacaactaatcttgagtgcaaacgcagaaactagacctttttcgatgaagtgactagaatatgccggcagagcagacccctcgcgcgccggagccctagtctgacttttgtcaggaacatgacttttgaatcaaattacgtaatcgcgttgataaatgaatgaataattgattgttcggccaaaccatgattacgatgagatgttatattttacaatttatggctttggccactacaaagcaaacgcaaccgatggcagtcgatacatggcccttttggacttgggtatcctcagaccacgaaccacagatcaccaaggttcccatgtatcatgggtttagtttctgccagcctcaatgccagcctcagcagtcttaacatcactagcgacggcgtcaaaccctgacacccttgcctcctggttctcctcccggtgaagggctaggtgcagcgtgttgcgcgacgcgttcacatctctgttctatcaagtctgagagtaagcatcaaagagacagaaagacagaaagacaaaggaacagcgaggcaccgtcagcttcctcgctctgtctgtgaactcagagactccctctctcatggtggctgaagatgctttgagagaacgtcatcaggacaggatgtcgatcgcttgtgtgcctgctcgagttctgccctgaattcaaccggctgtgcctgcgaacctccctttgacggctaaacacctgtcgatgctaatctctcatctatgagatcgtccttgatacaatgttacctttcctttgtcttcatcttcttcatcacatctgcaagcgcacatgatcacatcgtatagaatgtcccacactcgaaacaaagcacaagtccctccgagtgacgtgtgtttctttatgaggtctagtacacttgaggtatcaatccagtcgggcagtgtcgatagacagttttcgactctaactcagagcgtcgagatcagcagccagtaatcgactttcatggttgtcgagtatgtatcatcccatgcgcattcataggatgatcgtagccacctgcgacacactgtcacccaaagacgtaccaacaacacaccgatcacagtcatcactatcagtcctgatcgaatgactcgtcgggaggacgagatcgacaagattctggctttcttttctcagcatgacatttcctggtggtccttcggcatccaagacaaggatcaaccc

SEQ ID NO: 2878 - DNA, 11414 bp, Xanthophyllomyces dendrorhous
cttgtggtggctcctcctctgtatcatcttctctttcttctccctcttcttcctctcggacagaaggagacagccgctcccagagctgatgggagagggcagcgcgctgagaacgaacagatggatcagatatgtcagtcattgctgcagcctttcttcagatatctcctcagatgactcgtcttccttacctgactgatactgatccggctctggatcgtttctccgacgtttgtctccagccaccaagagatgagccgagaagcccggcgcggcatgttcaggacgacatggttctggcaggccgtggtccacgacctggctttggcgccgatcatgaagcctagaaatctatgacaacagcaaatgaatcagtccctgttcgcagccagatacattactgccatggtcaaagagatcactcactttgagtctgttaactggtgctcagcagggaaagagacgtcgcggaggtcgttgagctcttgactctgtgttggcgctccttggtgcaaatttcctccacgcgtgttgaaaccaacgtccctgaaaataaagccgtattgtattggggagattcggtatctcccctccatccgcgcagaccttcgacatgtggatattgagaaggcgagacgcgtcaaatgttatctttcctagccgggcaacggccgactcgatcgggccagccagtggctcaaaggcgagtaaagaaccaaagcctatctttactgtccctgacaccatagggaccgctgacttggcgtggatttccaccctctgacgagggatgtaaaacgggtataggtggttagatcgccttgagtgcccaacctgacagcaggctgagcacgtggcagtagtagtagtgggagtagtagtggtagccgcaagggaagactttgccgaggcctgagccgtcctcttgcgcttcatgtcgaacacaagaggagcggcactcctcaagacaactgatgagtgttctgatatcaagagatgttctgatatggaagagcgctctgatcgtctggagttcgttgtgtcttataagctgttgggattgatgtctgcttgtttgcagaaaatctcctttgcccggtttcccctttgatcagtttgactggctgtcggtcatgatgaacgacctggtgaacgctctgccgtccacagacaaagagacaaagagaaaaggacatgagcagacaaggagatcatcagacaaagcaacagatagccaagttatcaagtgttgctgaacagctgaagaaaagaaggagtctatataggcatggtgggtgtaaccatggtgttacacgtctgtaaccaaggactcacagatcctgcgccacaactcatagtcacacagcgcatgtgctcctaacacatccagtgatctgttcttgattgtggctcatctgtgcgctcgagagatctcatatgggagatcatccttcgtaccatattacctttcctttgtcttcttccccatctatgaatatctcaactgctgagacaaacactattgagcagaatccatggattagaagaatctcatctcaaaccctcaactgctggtcaatgatgtgcgcgtatttcgtgtcgaccagtcagtgcaaccttatgacacagcgcctttacgatgagcataagacttgtaccaactgaggtagccagtccgaccgaaggagaggagagtttagtgagccaggcatcccagtatgtgttaagctaagcctatacacgtcagagatcgagaactatcgcaagaccgctggctggctcgactacttggatgatcatgttgtatatctgacaccgggcgtctagatggacaccgctgagatcagctgcgcgtggctcgatcaagcatgtcttccctgtctctttgtctgtctgtcgttttgtctgataatcttcttggctgctcatgactgtctctatgtcgcgctactcctttgtctgtttgatacttgctctcagacttggtgggacagagatgtgaacgcgtcacgcaacatgctgcaccttgcccttcaccaggaggagaacaagggggcgagaatgccgggctttgacgccgtcgctagtgagactgacgttgagactgccatgactgctaagactgaggctgaggctggcacagactaaacccgtgacccatgggaaccttggtggtctgtggtctgagggcacccaagtccaaaagggccatgcatcgaccaccatcggctgaggtcactctcaccatgctttttacatataatagaaaccagatcgagaaactgtgatgtacggcctccttcttccacctccctttcgttcgttgagcgccttcacaagacgcaaaaagacagccacaaccgcccatgaatgcctgaaagacaagagagaagaagagacctcatgtcctccatgggtcgtccatgtcttggactaggtcaatgacgtgagctccgacgatttcctcgctcgtcggtgtttgtcctcctaccggtgccggtgttgtcgatgcagatgtagcggtagatactgctcctacatcggcggccgacttgaatgagcccagagatgattcagaaccagatctcgaccttggtttcgagctagatctgattgccgagcccgaagccgaatcaacatcatgttccgaacgactcggtatgttcaccacatggaccgtctgcgctgaaagatctggatcgatgctttgctcaacgtcgtcgtcgtcgtcatcaccgctttgattgccgttgtggttgcgttggctcaaatcggaattgacgttcgcgtcagacaatggagagggcggccggtgaagagaatatatggagctcgtgctcgatctgtctggggatggcgtcctgcttcgagtggctgctgtgtttggaagagctgagacagaagaggtcgatgcggatgaacgtttagcacgtgatctgctgtctgtttagatacgtttcattttgtattgaattcgatcacaacatcagacttgtgcgaacacaacggacaagaaagagagatttaaataaataaataaatgaaaaagacaaaccttgctgttcttccaaccgattgacgaggtctctcagccgctcacagtcctcctcgacaagcctcaaagcctctttcagcatgaccttttgttctttctcgtccctcacctcatcctccatcgcaagccgggagtttcgttcgtcggcgaccatcttatttgcctcttcgaacaacgcctgggacaggttctcgagttcctcctccaacgccgcctttgatgactttaactcggcgagctccgtccgaaggctaacgagctgggtccgctcggccgtcaacgtctgtcggagcgcgtccatctgagaggtcgtgccggcttggctgtcaccggcggcagacagtgacactgttgatgctccaggagagagtgggaggttgccgaagccgagtccaagattaggggtggacgagttgaaggaacgagaagaacctgcatggggaggacgggcggcgagtctactcggactcccactgtcgccagaggaaccttccgtccggggtgtttgttcttctgccggcgcgggcgcatatccatccggacggttgtccgtctgattgagagcggtcgaggaggcagctggggaaaagccaagtcgtttggactgtcggttgaaccagcctccgctgcttggcgcgttggctgttgttgtcgtcggcgtcgtccgtgcttctgaagggaaagccatcgagttgggagatgagagctcggttgaccaacgatcagcagccgccgagggcaccggcgaggaccgggcggaggcggacgagttgttgagcgaatgggatttaggtggcgccgaccggcggttcgtctgggcgacgatagcatgactatgcggtcggtcgagtgcgcgtttcgatcagtacacgcatcatgtcaagttggaaagggagtaagcaagagaagaaagactgaaaagaaggagcacactcacccaaattctcctccgcgccgcatagcttcctccatcatttccatgttagattccacgagaaacagattggagcctaaacatatataggatatggcggatcccagttagaattgaatcacaaacattgatagcatcaacacaggacgtacgggctactttaagctgatggtccgtgtcgagttgtttcgccaaagaggcatgtagtcgagctgtctgcggacagtaagacaacagcggagggttcattgtaggttcagtggaggttttcttttcacgaacgcagacgagacggatccttggatgtatgcttcttcaaaaggaaaccctaaagaaatccaagacaaagagaggagggggaaagaatgaatgaaaacgagggaaacaaggaacagaagcgatctcaccaggccgtctacatgctcgaccagcgcgccaagagcatggctgatctcttgtttgttgtatgtatgtgaggtcggaggagacactgtgttgtcttgaagggaggataagagcaatcggaaaggggccagatcgaacgacagggacgatgccctgttgcgtctgacgaatgaggtcagtggttctcgcgataactcttggggtagttcctgtagtggttgtgatgatgatattgtcgatgatgctgttgttgatgttgtcaatggtgttgctgtctttgttgacgatgatgacacagagaggtcggccatgacttctgcagagagcgacgaggaagaagccgaggtggtgaaaatgatgggcggatcaggaggtgtcatgagtgcatctgaatggctagagagagatagagagagccaagagaagatccaaaagccaggaaaagatcaagaagaagaagaagagtgaatgcgagtaagagaagaagaggaacagcaagacaagaggggacgagaagaaagatgaaatgaaagacaacgcgtgttgtataaagtagatggagtgtggggggaatctgggtgggcgtcggatggtggttacacggtggttacgttaagcacacggctacgtcatcatatcggaaaattaggctgagggccagtgaggaccacagcacagactgatagatcggagcggtgacaaaggagtatagagatgagagcacagcagaggggggtttgtgtgtgtgtgtgtgtgtgtgtgtgtgtatttccacgacagacttgaaaacagatggagccacggaagatgattaggagcagagataggtacatattatagtgaggaggtcaatcggccacggtttgaagagataaacagaccatggaacaagacagcactgtagacattaagacgcacagcgcaacagaagagccagtaggcgatagaacagacgaagtgacgatattttattggtgtatgtacgagagaaggacggtagggtaaacgcagtggagagagtatagtatagtatagtgcgataatgtacagtacagtgtacagtacagtgtacagtacagcacagtacagtaagagttcgacagattatagtctatacagaagactacatagtatcatgtggacaacagtgacacctgatagaaacagatagtaaagtacacactcagtacacaatccaacacgctctaacacacatatcccatacaaagtgatagagtcatttcccacaacggaaagccgacagaggagtcgtgggccagaaacagacgatccagttagggttaccgagatttaggccgcggtcacattagcaagcatccatccgaccgggctcgacgcgagaggctagaacgttcggccgtgggcatccgatgcgaccaaaaagcgcagcagccaaaccttacctgcgctaccgaccgcgcgcttggtcggtcttttttaacgactttttttcccaatcttttccctctctgttctctgcctctcgaccctgccctggtgcctctgtcccaggctcgtgcctgtgctctttgtcatccccctggttctctttgtcatcctctcgttcctgtcgtctcttttcgccctgagttcttctcttccaccctccttccttccttctttctttttttgcaaacgaccatcccatccgacattcaatactcagaggaccacaactacggcaaacttcagccttccaacgcgtcttctctccctttctcttcctccttttcctttcccttcccgttctagctcacagctcgcctaaggcctttgcccaatccttcttggcactgtactttcgcttcttctcccttctattcgtccccatcggctcctccaacccacggcattttcttcttctttccatccgatgcttccagccaacctacagggactgaactcccttttcagcccatctccctcctcggagcccatcctttcggacgcagaccttgcctcgaccttggcactgtggacaaacatcgacttttcatacgacgacggtggaatcggtctcaattctggtctcaagttgctcgaggaagatcgggctagagaggctagggaacaggcagccgccgcggctgccggcaactttgaccattcttctattgccagaaccagggatgacaagcagttctacccgtcgcctggatcgactcggcaacagcagcagcacactcccagctctctaggtgatgactttgacatccttcccaacggtcctctttccacccaggcatccaccccggcctcgttcccggtcgacggaaaccagcctaccccggtcgacccgttcgatccctttggcttccactcaactctctttgctctcgcacagaccgatccggccgagctccagcttaggtttgccaatgaggtccccccgaacttccatgcaccctcctcggtcgcgtcgacccccaggaacgtggctcctgcccccccggccgacaagccgacaccagcaaagacgctcaagcgaaacgcttcccaggctgaattgcccacatcccgagcgagctctgttgtcgctcccaagaccgaacaggatgaagagatctctcacgaggacgagttagtttggctttttcttgtttcctcctagattgtcccgatctgatccctgatctttgccattgttctttctgtctttccttagcaaacgacgacgaaacacggccgcttccgccaggttccgagccaagaagaaggagcgagagcaggctctggaaaagtcgtccagttagttcatccatccatccatctcgttcgggcttctcctggcatacactcggtttcttactttcttttccttttcattcgcagaggaactccagaaccgatacgctcttctggagaaagaagtcgagtctctccgacgagagaacgtctggctcaagggacttgtcgtcggtggtggaaacggtacggttcctgtgttaggatccggcttgcccactgtcggacgagccgaaaacagaagttgaacggggtgctgataatggatggagcggtagagtcgggtcagcggcagagtcgtcggttttcatccaagcctttcctttcttcgtctctggggtttctttttctttgaattcgagagggcgttcccttcctctcgaacttctttcttgtttgtattcgctcttttttccattcttctttacgaggttgtatatattttcttgcaccatgtttcaacacaaacccttctctttacttttcatccttttttccccctgttaatgtttacgacctcgccctttttcatcaaactcttcatagtctttgccttgattttctctcgttcgactcggaagagcttcagaaaaagactatgattgtccgtcaaccggcaatgtttttcttctttctcttaacctctcttctcttcctctctctcctttgaatgttcaccctccccctttttgttcacttaaagtaggcctgattctttttctctcatctaaacaaagtctctactcctcttttccagttttttcttttcttttctttctttcgatcgatttccgttccattctattcgattcaaggtattcttttttgctcggtcgagtatggtccatcataaacaacgtgcatgtcggaagtctccatctagaaagccgaatgtggggcacatgcacatgcgtatgcgtcgagtcagtcgtcggtcgtagggttttcaagtccctgggaagagatcttcaagatatacagaggtagtcaaatacattttatttcattcacgcccctgtgctgtttcactctcgatcatttcatttcatatcacactgcatcatatcatatcgtcttgttcgttctgtctgtcctttactttgctttactctactttactttattctgcactttgttctttcgggagatcgaacgaggaacgaatgccagagagatcgaagactctcggatcgattcaatcagatcctgcatctcctcatccttatcttcttcttcatcatgcccgtgtctttctccttgttttccgtcatctccgtgttcgaacccacgtccatgtgtctcgtcatcgttcttttcccgtggcgagtccgatggacgcgtcaggttcgaaccgttcttatcggaaggtatctcagagcgaggtaaacccgattctatcgagtcaggtgatcgaccacctgagccttgagcctgggattgtgcatgaggatatgcgcgcgcatgggtctgggagtaggagtgaggttgagatgaaggccgagagtgggaaggacggatgagggaagctgctggaccatgggattctattatcgagtttatctatcctttcccccccccccggaggttgcgttttccgaataatgataaagataagaggatcgagtcaagtcaggggacaccaggaaattgttagaaggcgcgccaggggagaaagacaaaccccgaacttgatgatggcgaaatagaaatcggttggaaaccgatgtgcgtcgacgagatgtaatctcctagctttgaccgtgaggaattttctaggacaagccgatggtggtaagaaacactcgtactaagcgaggaacgaaaaaaaagagcactcgttataattcttcctttgtcctttgtcttatgtctcaaaagagaggaaaccgaggaaagaaggaacggacggttcggctgccttggtctcgttcgatttctaagagtgggttatgaaactcgttttgatgctaccccattagatgcacaagagaaacgtttcaaacaaaagttgaaagctcaacgggtcgttcgagttttgggcatagagagaaatagtcaagaaaacagaaaagaaaaagagacggacaagttccaagtatcgtctctccggaaaaaccttcccacaagtcttttctcttcctttcccttttcctcttcctccgacgtcacccacaggcgcctcacaaacgagttcgtgaatctttgcgtaatgtcgttccaaatcaccgacggtcgagaagaatgtgggtctggacgagcagagcggaggtagcgtgcactttaacgattctccaggcaaagaactgggtagccgggtgtatttcgagattgctctaggggacgatgcgtctgacgaggagtcagaacagtcggaggagaccggtgttgttgatctaggtcgtttgagcatcctttctacctacgccgtgcgtgttgcggttctaacccctttttatttggaagagattgtagaaccaggagttatctgtaagttatagatagtctggccagatagatgaagagtggtaagcacagggcgattcttgatgatgaccagagcgaatggatggagaactcggaaaaggctcaaaaaaatatccgactgaaataaaaatcatcatcatctttccatcaagaaaatccctaccgactactttgtcaaaccttccaccttaccctactcttccttcctacgttcacaatcgacctcactgcctcaggcgcgttgaatgctccgtcggatctctgttcatgccactagtatcgtcaacatcctaactcgcccgaggtcatcctcctatctcggtcgatcggtcagctccgccattctccgtccgtttgtctctccgcaacagaagaaaatctgggtgaacaggcttgtgaaatccaatggttccgacagggagagcgctgagagagagctcaggtggataggagaagagatcagcaggagagaaaacagccagggaagctcgtctttcagtaaggatacggtcgaacggatgatagcagaaagagaggatggaactcctctacaatatgttctcggtttcgtccccctttactttcccgttgattgctcgtctcctttcccagtttcaatgtaactttgtagctaacgatggggaagggtttcttctccttgcgtctgacatgtggcatgattgtaggaaaccaaccttttggaccggatcttgttctgaacgtccgacgaccggtccttatacctcggccagagaccgaagaatgggctagccgactagccgatctgttgacatctcttccctcttcctctccgagaatcaacctgttagatctgtgcacaggaacggggtgtataccacttctgatctgtaaatcatttgaacgagcgaatcgacctctccgagcactaggagtcgatatcttgcctcaagctgtcgacttggccaaagagaacgcccgtctatcaggaattcctactttaccctgtaccgccggtcgaaatcgagatcaagatgagctcctgatgacgttcgatgtgcgcaaaggagatatgtttgatccgtctttcaaggatgggttgagagacgtttggggaaatattgatgtgttgacatcaaatccaccgtatattccactctatgagatagaaagtctagacgagaacgtcagatcgttcgagtcgcctttggcgttgttaggtgatctacctaaccttccgtcgaacgtacgtccttctctcttcacttctctcgccttctcctttatgttgcactttcaccataagcgcaggatgctcatacatctcctttatcaatcggggtttttaaaaaaataaaaaaataaaaataaaattgagtccagttttatccgcaacatttgcaacactaccagacccacggcctcgatttttacctccagatcgctcatctcatctctgccggcctcgttcgcccccctcaatcgtcttctcaaacatcgtcctcatccaatcatcgcaccccacaggttatactggaagtaggttacaatcaagcttcggctgtcaaagagatcctgaaagagggaccagctaaagagctgatggagtctgtagaaggctggaaggatttcgcgggaatagaaagagtcgtcgtcggcttcctcaaagagcgatcttaaggcctggtgggaggcgatgctgaggccgagtgttggcttgaaggaaggggggagtttgcgttgaaccataatctagatagactgtatccgcacacatacacatatatctat

SEQ ID NO: 2879 - DNA, 35079 bp, Xanthophyllomyces dendrorhous
gatctatatacagctgaatgattctgatcgataaagccgaatggattgaaaggataacattgttttgagaggaagaacaaaatcgagtgcgaagaaggaggaaataggcaacaagggggacctaggggtgaggtaaggaatacaaaattgagcgaagagaagtgtagcacaatatggagtgtatacaagtaaaggaatcgacaacagcgcatctaatgactgatatattggactgtaaagccagcacaaaccaacgaaatcaaggtcaaacataattcgttgatttacattctagcatttcagagagaaaaagtatagaaaacaatgaccacgtacaaacaaagctgacatccggttggccatattctgcccgaaggagatcgtcgtgcatgttgcccagatcttggttcgtgaaatggttccatctgaatccagatgaacgcacacatacaccagacagcgtcaaatttgtttaatagatagagggcatatacagaaggaacatagagaatgattttatttttatttttaaaaaacactcacgagctcgtatctccatacaacagagctggcgccttggtaatctgctttccgtccttacatctcttacatttgaagatatcgtgtgtatcacaaagtgtgttttcgttgaactggaaaagttcacgaagatcgttaacagaaaagtgacgttcggtcgtttcggcgttgtcgtccaccacgcaagatgacagggcgaccttttgagatctagaggaatgcacataggtaggtcgaatggtaagtaccaaggccactcatagagatattcgaatatcagaaaacgggtataaccgctactaactgtctctggaacaccttctcctcaatcgtaccctatacgatgagtagaaaattgaacgtgaattcaacacgcggtctaagcaacaaaatagaagactagaatttttctaaacatacagtggtaatgaaccggtaaacgaagccttaaggtagagacgataaggatgtatgattagtaaagtggcagcgcagagcgcaagggaaacatagtagcacctacattctttcgtttggccatcacgccatacacgagcaagtgcttgttgatcggctacacatgagagaaggaagaaacaaagagtctcagtaaagaagcaagtactaataaggtttctttaggattgtatcttaccagcgggattctgtaaatgaagaagaaagtgagaccaagcacatgagaacagtcgcgattagcaaataaaaaactctttacatcaccgaacgtatgaagagttgaatgacttacccagtctgtagatgattcaaaaagaaaaaaaagaaggagataagaccatcatgttagatggaacatggacaagacatgaaacagccaaatccaaactaacctgggtcgaacaagatcagccggttggcaccaatcaaattgataccacatcctccggctttactactcaacaagaacacaaactggcctccattcgggtcgttgaacttgtcgaccaacttctgacgtttcgtcaccgccatcgatccatctagtctgagcacagggtatcttttagacgatcaatgagcaagattgattagcaaatatacctgttgtgtaacaaactgtactcagaatacataaagcaactcacttgttgttatagcaaagcttctggaacaggtctagggtctgtgtataattactgatcagaacgatcttatcgtctgtagttgtcctcaactgatgtaagaatctgctcggcagaagagaacatagtcaggtcgagattatgctgtaagtatcacattgaccaggcaagaagatcacagaagaacatcgactaaccgttccaagaccaagaacttcccaccgtattctgaatgaatcggccccctactcgccctcttgtctttctcataattctccggcaataaatcctcacatccctgaagatctttggaaaggtccaacagatccggatggttgcacagtttcttaagaattccaatagctttgagcggttgtgaaccggttcctctaagaagtttacgaatgtcaggtgacttgatgaaatgtcggtagagcgcgagttgtagaggggcgagcgagcaaaagacaacggcttcatatttgaccgggactgggtttgaagagaggaaacacatatcaggtgatgaagtgatggaaaaagatgaagaggagaagatgggtgacgtacggtacttggacagcaggtcgtttgtacgtcggataacaaacttattgactttgccccctaactctctcagcttttcatcgctcttcgctcgatctttctccgtagcgtccgagtctcggcctcggaggatgtcaagctcaaaattctttcggaaatctaatcgggtacccaagtatccaggattggcaaaatctagcaaggcaaagtactcagacaagtcgttctatcatgagaaagtcgagaatattatcagtatcaagtatctggatataaatatctggactgaacaatacctacttggacgggagttccagtcaaaataacccgtctagtgcactgaatggcattgagtgccacgaatgtcagagactctaaataatcgcgcaagatagatgagttgatgtgtttgatgagaaagcaaaggagagttgatcattcacctgcgtttttcagcctatggccctcgtcggccaagagtaagccgacctcgcatccagccaactcgtccgttagagaacgtagagtctcgtaagaaacgatcatgacttcgaatttatcggtattgaggaaaggttagaacgtgtgtatgttcttgtaagatgactaagaagagtactaaccctgttgcgtgaccgatctccctttagcagagacccacctccgaacggccgggattaactcctgtcgcccaccctttccatctactaccaatgggttgatgactccttctcccagccatttaactaagaacggagagatgacatcaatacataaatctgggatcatcgatacttccaaaagatcaaggcttacctaactccttggcccagttcttgaccaaactactagggcacacgataattcccttctcaattgtggccttgcttggaataggggactgcttgagcaaagtgtggagaagggcaatacattgtagtgttttacctaatgacgattcgatcaatcaagacatgatgggtcagcgcagctaccaagttgacttaacaccaagaaaataaaagtccttaccgagacccatctcatcggccatgatacatctgaagaaaggcatcggagattgaactgtctatcagtgagtgcccaaagaacaagtctggacaagattaagattactgacccaaaagcatcatgaacgagaagaccagtggtgcatctatataaaaactgagtgtcccgattatatggatatgtccgtcgatcagtatcgagacgttcatccgagtcacgaaaaaagaataaaaaaagacacaaacgaaccttgacaccctcgatctgatgtggtctgagaacttttgaaagtttcggatcgattacgacaggtactttcacgatctttttcctgtttctcgccgcgtccgccttgctttccaagccaagaatctccctgagactcttatgaggattcaatccgccgtccatctcttccgctatcttttgacgctcagcctcttgccgaatgagtacttcatccgcctctctctggatgcgttcctcgtttgtctcaatcagatccacggttggatcatagagtacgatggcatgatcggccatagggtcaaatagaggccgaggaagaagaaccggttgacgacggacgcccaaggcgatattcgagacaacatgagtaatcttttctcctgaaggtttgatgatagtcgggattgaaaacctgtagagcatattcaaaggatatcagggaaaaggtcttggaatgagctacctgtggcatggacgaacccttttctagcaacatccttccccgaagcgtcccaaatcgggaatttcttgttgatgttgatctctccaatcggatctccattctcgtccagctcgaccgaggcgttgatagcttgtttggtcaagttggtcaccttgggcttcttcttgtttgactcgtcatcgtcatcgtccgaagctcctttttccttatatgattttttggttcgcttgttgcacggaacacaccgagaatgaaagtaccaagtcttagaccatgcatagctatgaagatctataacaagagatatcgcacctttctcggagggagagcagacgggccacgcttgttgacaaatgaaggggtcttgaaagcaggcattccaactagggccccaaacccaccaccgagcgagtgggagtctccagatttccgtcgaagcataccggtatgatacttggacaggcgtttgacagataacggcgggagacactagaacaagaggagaaagtcaagaagagaaagtatatggatgggtaagcgtatgaaaaaagaagaggtatatgcgtcgaggctagagagttccgatctgtgggtgggttggagcggagtggagtggcggcacgacttcgatcgagagcgcgtctcggtgagggtcctaaatgagaacgcgtgaggaggcgtcaacacagcgaacgcgtcaagatagccacgtgaccttcgcttcaggctacgcttacgaaatatagccggtactgatggcgtcgtgtgtatagagagcgaatctcaaacccatttagtccctaccttctagatctccaagatcttacagcatggtatttcgttattctgttagagtgttcgcatcctactctacatctcctcagttgtttaagactactacaagatcaatgtcgtcccttgtgctttgttcccgacaggggaaagttaccctgctcaagctcaatcgaccaaaagaattgaacgcacttaattcggcactcattcaaagcttgaatgaagagctcgacaaagcagcggcagatcaagatgtcggttgtgtcgttatcactggggaaggaggaaaggcgtttgccggtaagctcattaaatctctccctttcgaactcttgggattaaaccaaagagcttactggtcttttgatctctccttaccttgcttggtataccatagccggagcagacatcaaagagatgcagtctaaaacttgttagcaaatgaaatagtacattccgtcggacagaaagcttgaaactcactgctcctttattctgatctagtgtctgaggtgtacaaccaagacttcttgaccacttggacaaagatcaattctttccggaagcccatcatcggagccatcaatggattcgctgtaagcctgcgcgatcagacttgttgttctgggctcaatgcaaacgtatgtccttaaacttactgaaaaaaaactcattccgatttggtagctaggaggaggttgtgagcttgcgatgatgtgagtcagattgcccaaagatcctctgatcgatcaacacatccctgctgatactctgtcgctgtacatcaggacggatatccttctggcatctcctcatgctaaggttcgtcaacccctttcaccttttctgcccgctatgagtatatatgtagtcctggatgtaccttcttttattgaccgttctttctttccttccttccttccttctcagttcggccaaccagagatcaatttaggaatcattcctggtgctggaggcacccaacggtcagacatctttttctattcgttctatctatttggcttgaccctatcaacttcgtttcactgatgggtcctatgtcttgctctttcttcaggttgatccgagcgatcggcaagtctcgcgcgatggagtatatcctcacaggcaacatgtttactgctgagcaagcatctgagtggggcctcatctcacgggttgtgcctgataaagaaggtgatgccaaaggacagggtgtagtagatgcggcgatcgagatggggaaactgatctcagagaagggaggactgagcgtgatcgctgcgaaggaggctgtcaacatcggtaagcttaatctaattctctcttctgtgtgttgattcagcactatttacttgacgagatgcgtgcgacactgactcttgatatgaaaatcggcgatgatccatgcattctacctaagcggaagaaacctcactcaacaacgggttggcttatgagcgaaagcttttccattcgttgttcgccacgcacgatcagaaagaaggtgagccttcaacatcttcttctcttcttctcttcttctgctaccctcactcaggtgatcgaatgatgaatacctgattcgttgacacttgccaattcggattgttttcttcccccaaacgtgttctgtcaatggtcatcggctcgaatttctcacgcatttatttcttcatccacgacgcattcgagcaggtatgacggcgttcgttgagaaaagagctcctaacttcaagaaccagtagcggatttacccgactttccttctctgtatatatctctatgttctgtttccttgtctttcttgtattctcgtccttccagacagagatctgattctctgtatgatcgaagggcttttcttccactgccaagccttttctgttttttgaggtcgtatctgagaagggatagattggctattcaaagtgcgttccttcgatatcaaccaaatgggcttgaatgttggatgccacaaagtcttcgctccacttctctgcatctggaacttcattttctattttgaaaagagaacacatggacagccccctatgttccttcacttttcagcctgatatcccttcaaagcttgctccctctcgtgttgaatcctatttctgttctccaaagcaagttccaaccctggccgtctgccttcttcggcaccatgtaaagcctcgacaaccatcctcattctcggtgtcaaatctccagcatctgaaccgatccagtcattcttcctagcgtttgctaagcgttgttgttcgacagcctcgaggtctttgggaaggacaaccgcgtcggctccaaagtccgcgtaattaggtgctgctggtgatactaaagaagacgcagaggaagaagacagagaggacgaggcgtctggggagagagacgaggtaggagaaggccgggagagctttccgggatgcctcatctcgacatgaaggtcgatcagggatgccatgagcggtcggttccggggttgtccatcgataggtgcaaactcggcatcaatcacagcgtctagattatctttggtgatatggtgttgggtagaatggtataggttcacgagagagcttagggatttctgttataagaaaaatcgttaggaaagaaagagtaagaaaagaaagtcaagtctacatgaagcaaccaacgatgggccatgcaagaagagaacaaaggaaaaaagaatcaagggacaaacagtagacaagactcctcccttgaacacaggctcttcgctcttgtagtcgatcaacacgtccggccgatccgctttggctttcttcgacttttttgttggtctggcagcattctgaccactgatgacggcctttcgagcgattcccatagaactcgtcgcttttgacctggtctgaagtcggacctgagaaggaatggaccgaactaggagtgaaggagcgaacatgatcttcttttctatggatatgaaagcgtcgaaagagaacaaggaaagccaacgaaacgtccttctggtgatcagaaccgaaggaggtaagagaagggaaagcggctgccctgaatacaaattcaaatatacttatacaaggtagctcgatgcctagggttgcttaggtaatctgatcggcccgccggtcatgagagatccctcttcatcctgttacctcgcctgatctttctctccacctgggaatcttctgtctttcttctcccttttgttctctccctgtcgtttgcttcatctgatagccaacttctaagtttgacaaccatcctcttgatctggaacaacaacaacaatgtctgacgagtaagtttccgagctgtggttgctcgcttgctatctgaaacatcaatggttctctggtcgttctcgtgtcgtccctgagctacttgtgcgatcactatcaaagcaatgacagctgacatgttctcttttgtcgcttgacaccctctttttttattatccttgttgtcgaacctgaaaacagtagctctgagcttgaggattttgagatggatgaggatgatgatatgctcgactacgacgatggttggtctcactcttctctctctcgcgtgggtgtgaatgttggcatagggaggcgttgggtcggtctttagagaagtagcgatagacgtctgtgttacagataggctatatgctatgtacaaagagcatgcaggcaaaactcctctttccttctaacctccgacctcattctccacttcaccacttgtgtagccgcacgacagagaccgcttactaacatctgggcgtgaatctttatacccactcgcgcagattcagcttctgaagttgatctctctgaagatgatggagcggggtttgctttcgaggacttggcagcttcgaaatcactggaaaagaaggtcagtcttcgcatccgttcgacatacctttcttgttccgttgttctatccaactgatccttggatatccacccctgcgacctttattgtgacgtaattcacctagccatacgatatcctatacacatcaaagaatccagaaaacttgagggaggcaatggacaacgaagtcaataaattcaaaagtctcttcgatatggacgtgagtcctcttcagtgctagtgaacttgcgcttttaaacaaccttttctatatatatagaggcatgtattaacttcggttctgtgggcctcttgtgtgtattcatatcaacagattcaaactgctactcttttactgcgaagcttcaattggaaccgcgagagagtaagctcttggatagatcatcacgacaaagatttattgttttctgctgatcgctcgtctttctcttcggttttagctcgtagaacgatatatggatgcgccatatgaatgtctggcgaaagctggactggacattaatcctccttccccagtcacaaacacagtgcccttaccttcttccgcttcacatcatgaatccccatcgaaaaaacctcgtcgaacgaacgtccgatccgtctctggctctcgtacaggaagtcttgacatgccctcctcctcttcttctcgccccacacatcttgcccctcagcgaccctctactcctgctcataccgatttcgagtgtcctatctgttgtatagatttctcagcagaagaggttgctgctgagacgttggcgcttggatgtggccatcgagcttgcaaggagtgctggaaacagtacctggagggtaagatcaaggatgagggggagagtgtgagaattcaatgtttggaaagtgggtgtgggagagttgtctcggtgaatgttgtggagagccttgttagcgcacctctgaaagagaggttagtctcaaagcatgctctcgagaataaaattctcgaacatctgaaatctgcgaggctaacagcatcttatcgatctatcattctactgtcggcaggtatgatgcccttttaaatcgaacctatgtggacgacaaccctacgcttcgatggtgccctgctccagaatgtgagtttagcttgatcacaatgcaacagaagcgagattacttctcttctcataatattctcatcaataataacaaatactctggcctcttcatctttaggtgaatatgcagtagagtgtaaacaggcgccaccgaaagtgctggataagattatccctacggtcaagtgcaagtgtgggcaggtgttttgtttcgggtgagctttgcttccttattgatttgacccaatcctttctccagaggaacctcaaaccaactgaattggttcaactgttcagttgcggatactcggccgatcatcgcccagtcatctgtcgagttgctaccaagtggctcaagaaatgcgcagatgatagtgagacatcgaattggattagcgccaacacgaaagagtgcatcaagtgccactcgacaattgaaaagaacggtggatgcaagtcagtatcagtccttacttttgccttcagatcaatggaaatatcaatcctgatttcttgcgcctttcaatcgatagtcacatgacttgcaaaaaatgcaaacgtctgtctgatctcttctgatgtcgtggtctgattcttcatgggctacgtttgctcatatcttctcatctttcttccgacatctagacgagttctgttgggtctgcatgggtgactggacggagcacggaacgagctggtacaactgcaaccgatatgaggaaaaatcgggtcaggacgcgagggatagccaatcgaagagcagggctagcttggagagatatctacatgtaagagcttttaatactcaccctcatgatttgtttcctacttgtacatctgtagtcttctgtgctgagactgcttcttgtccttttctctccaaatgatagtactacaaccgatgggccaaccatgagctttctgccaaactcgaccgagagctttatctcaaaaccgagaaaaagatggaacagatgcaattgacgtccgatttgacgtggatcgaagttcaatttgccaagaaagcagttgacacgcttgtggtcgcccgaatgacgctcaaatggacctatgccatggcctaccagtgagctcccttgtagtttctacacaggctctcgaaaacttggccactgatgcttactatctcatggtttcaatcattcgatagtctggcaaagaataatcagacagcgttgtttgaggacaaccaaagtgatcttgaacaagcggttgaggcgttatcggagctgttggaaaaaccaatcgagccggaattaattcctgcgcttcgacaacacgtgaccgataaaactgtttgtcctttttttttgcgatcttttcctagtcaagtgcctcaaactgactccctttgaacaatgtgtactcctttgtcctgatgggttggataggtctacgttcagaagagacacgctatcatgttggacgacagcttgcaaggttaccttgaaaacaggttggttcctatattatttgcgtcgcctttatttgattctcctgtttgtgaccgtgttcgtactgttatttctgacaacatttttgatggatgtgatcgggtctgtcattctaggtggacattcgacgtctagtctctttcctgcctgtttgcccctgtagtattcacctccgccccttttgttcatcatcactctaccattcttttgctgtttgctagctagccttatttatctcgctcttcctgtctgtgctctatcatttatctcacaattgacagttgtcttctctttgcatgatctcacgacgctttcaccctcttgaccgcttttgtgtttgtgaccgacctaccgccttcttcagtccattaagagggcttgatctttttttctttctttcttttttttttgccctcgggcgattgatcaattgatcgtttttgctgttccgtatcgcttgatttctctagactagcttacactacattcagattcttcgccatgagacaatgttgatttgaagagagcgagcatgaaggggaagggacgtgatcggcgaagagcgatgcgatagttttatgatacgcatgtctatgacgatttacatttcgaacatcttcgaccgataccacatctttcctctgaccttcactcatcacgatccttttcacctcagacacctcgactcccttgcttgtttgatcctattatattcctctggaggatctattccacctccaactaagatgagctcttcttcagcggatctccagaaccaacaggatccaatctgcgagattggttagccacctccctttctttcctcttctcttcttgcaatctgatcgagccaagactcggaccgaggcttcatctcacaagacaggcatatatcaggaacaactgacatctcgctcatcttactcgattgttttcaatcgggattgaatctcgggctggtgatttttttccagatcggctccctaatcccagccctgtatcgaacaggaaatggaaacgtcgagccaggctctcactcgtgttcttgtctatagccgggaactggtatggttatatgcttcttcttgatcagatacaatccttgatgttcgactcacgtctcgctgggttgggttggtcttattgttatcgttcgactttctggacagtatcacggcgggtggtgtagcatcgttccctttgttcgcgccctatatcgcgtctcacttcaacttggaagaagcagctacaaacgtcgctatccttggcggcttggtcggcgcctactttggagctgctcctgttggatcctttgtggatcgttatggcccccgaaagtatgcgtctatccccgctgtcttccatctgtcgtatgtatgtgagcggatctaacgttgccatgggctttatctttcggttgttgctagaacctctctactagcctccctctttaatatcactggatatttgtctcttcacattttgcttctccttcctcccgaccatcctttccttcaagcgtctccgttctcgatacatgtcttactttcattctcattcctctttatcgggctcggcacggtatcttcctacttttgctccttgacgacatcgtcattgaccttcccttctcatccatcactcgcccttggctgtccactagctctgttcggactgagcgcttgggcgatcagcgaaagtgccggttgggcaatctttggagatccgaccgacgagctagatgtcggaaagttctcgcttgcccttttgttaacggtaggagggtggaatgcatttgctgcctttggtatgaaggttatgcctcatcgacatgaagttgagttcatcagggacgaagtcgcgagggctgatcctgattgggtaagggaaggcggcgcggatggaacaatcgacgaggagacaccgctcctcatgggaagtagaagtttagggagagcaaggggaacggtggatttgacattcaaacatcttatgtcggaacggtcattttggatcttgggaatgagcatgtttctcatgattggacctgtcagtatctttcttgagatcgtcgactttgtctgattctcacctgttgaagtgtaaactgatgttcatcctacgtttgttggacctcctcagatggagatgatcattgcgtcggttggatcgattgtgacgtcgcttcttcctcggtctaccaatcaaacgactcttcaggcagtttctctccatctgatcgagtctgcttctcccttgagcttcctaacatcttctaaagcaacaaatccgttgaggattcgacagaaacatgtcaagatcatctcgatctgcaacacgatctcgaggatttctgtaggagccatagcggactatctgtccgcttcaactacggaccctgtcgtattacccaaacttgctgatcgaccgtcagtggagaaccgaagagctgactcatcctgggcaactcctatcgccaacgtctctcccccatccactccagcgtcagcgtcttttgaggagagtgatgtaacgaaggttgacgtggaagagtcaagaaggtggaagcataggttccacatgagtaagatcaccatggtcctgttgacgcttactatgttagctgtagtctatgcattcgcaggactagacgcagggctgggagctagagggctggacgcgctttgggtgcttacaggggtggttggttggagttatggctgtctctttgtaagtgcagtattctctcctcgtgaatgcatatcctcttggtccacttcttcctaacgccgagaggttctgttggttgttgggttctatcagaccctccttccttcgatcactacacagattttcggattaaagacgttcggaaggaattatggtcttctctcttactttgtcgccacgtcctctctcggtttcacgtacctttatggtctcctcgccaatctcgcctacacttcttattcagcggagagagtctgtcgaggagcaggctgcttccgacacatcagtatgttttatgcagttgtcttatggtgttgtgttctctcgtgtttagatactgaccatcaacctctggcttcgattcccgaatctttgcactccttcgttccatctgatgtggtttgtggctggctgaaacataatcagtgtggatctcgtttggaagtacggtggcagcggctgtcttgtttgtagaactcgggcgaagatggaagaatcgcgtgtagtaagatgatcacgttcaacgtgtattctcctttatctagtttgttgcatgaagcccgctttccttacgtgtttgctagaagtaaagaacgatgtatgctcttcaaacttggtctcagcgtgtcgtgaacatgatctactggcgatatcttatcttggatcggagcgaaatgattaaatgaagcacgtgttcaacaaaaggatgtttcaaccgttgttgaatcagaccaccctccatctctttacaacccattctctctcctcccttgtctctgaaaagccccagcggcatggactctataataacacctctacattcacctccatcttctggaacgctcgttatggagcgacggtcgtcagggactgggttaaacagcatgtttcctaccgagttgagtaaaagtcgcgtcggtgaggtcaccaacaacggggttcgtctctcaatttgtccttatatgctctgtcgttcagaattgatcaccactgatccgggatctcgttctgactgcgttgatttgcgtgttgtgtttgtgaacatcttgatgttcagctggacgatctggacgatttcgaatgggaagaagctgaggacgaacccccttctcacacactcactgttcctacgcttaactcttataaccactcaacacactcttttacggacccatccctattttccaacatatcctctttgagtccgtcgagagaagatggaacaaattcacccaactcagatacatatatcgtcccttccacatcttctccaattcctcttctttccccactcaacaagtctacaaagcggaatcggactgatacatcatcgacggtgtcagctcaagcttcgcctacttcagctttgatagctaggatcaagcagtctgccaccgcacttcaaaaggatcttttccggataaatacctcaccacttcgtatgcaccatcaccgacatcaaaatagaactaatgagaatcacagcagtagtagaaggaggaagagtagtgaatcagaaagtggttcatcgaatgggacggattcggaatcgggagggatgctaaagagagcaaagatgacaggtctggcagacctagaagactcggatgacgatttgaattcagatctgctcgttctttcgacgaaacgaactacaaagccggccttgacacctcgaaaggcggggaactttaaaccaacaaggatatctgcttcttcaagattttcaaaggattcgatgacgtgtcctacacctgatcgtcaacatcatcaacagcccgggttctcacctccaaagcttcgaacgagaccagcgatgtctgccaaggcggctcaaaatgttctatcttccgttcaaacccgtgcgttaccaggatctggaatcaaaaggccgaacagaggagacccgtcgatggaaaaacttcggttacaaatgaggacttcgaaagcccggatacaaacgcttgaaaagacggaggagatcaaagagaggattggactcagtgaaaaatttctcatcagtgatgatgaagacatgtttgcagacgaggaggaggcatcgggaaaagggtcacctcaaggagcgcgcaagggaaggggggcaacctctattgatctggagccagaagctcacccgaaaggaaagatcaatttatctttggaccgggataaacgaagaggtggatatcacgccgaaatttctgatcaagatttatcatctgattctgagtccgaggagagtctcttgttaggaaccccctcgccaatgctctttcctgaagacgtgccgggctatacgtttgcgcccgaccctccattgacggagcctctattgctcatggagtcactatttggagcagagaacgggactgcgctcagagatatcgtgacgaaggacaagagggcaagaaaaatggaaaggagggagaggaggagtctagagaggcagggcggtggggaaggttttagaggtgtctggtgcagaaatagatcaggagagaacgagttggcagtcgaacaggctgaggtatgtactctgatttagatcttgaaagctttcgacagtatgtatgattgacatatcaatgttgtggcatgtgcgtgtctggaacccagtgggcttttgtccgtcttcagggatcgtcaaggcatccactattcatttcgctttctagagctgttgaacagaaaggttggtgatttaccaagctaaaattctgtgaacctctctcatctgcatctcgtccttctgttacagacgtgcatgctttcgaaaacattgtctctatgggtgggctttcgccagctgtactagaaaccatggatgtaaaaggtagacggggacttcttatatccctcatcgagaatggtacgtctttgcttcattcttgcgaattgatgggattaaagatgagttgattctgattgcgatctcatctcgttcgatgtcagtatagcctgtctggcccccagtatcagtttgtcaacactatgtcttgaacatattggtcttatgttcaattcttcgttccacacgccagcatctcctatcattgaatccgcgcgcctcatcatggtactctcatcggccttccagcgactgggattcagggttgatcttctccgagcggcagcgagaaatgattcagggtcgaccccttcaaagcctatacctccccagcaaggaacgattttgccaatgagtcacacgagaagagagagagcggtaggttgcctgatcgaaatagtagagaatgctgtcaggtgagttttcaaagcattcgcatttcttcttttgctcagttctaaatcagctcccgtgaaatcggtaatctcgtacagacatagcatcttttcgaattctgctctttctcgagtgatatgcatcattgcactggtcacgttggataggatgacgcctatcaatctcctgtacacctgccaacgagccttaggtgtcgccattgaatcaatatcatcgcctaatgaagtgtgtacctcatctttcctttcaaagttctttttattccatatctcgattaatatacttcaacaatgactgttcctaacaaaatatctgcacacttcaggaactcaaattgtgccacaagttggtacaaatctcgagtccgtacaaaatggggttcaaaatggggctgctcgaagcgttccccatagcagggccagcttgcaggaggctcacctcggcattggctgtactcttgttagacggtacaatgaatttggtcagttttacccagtcggttggttctttgtggctgctcagaactaaatcttgtctttaccatgctccgttttcgtctggtgatatcgctcgtcattcgcttaagtcgacgtacggttctccaccatccatggacgttctacttgatactctttcccaatcgaaagaccgaactcctctctcgaagttttacatccatcctcataccgactacgaacaactcgttgcttcaatcagaatcctttcattcattctactcgacctacaagagatatatttagcggagcaagctcgagccaaggaccgtcggcttaaggctaactattcagataatttcctctccagaagggagacgtttgagctgcttgaggcagaggggtcgttacaaatcttggggaacgcgctgaatgcgtgtgatgctaaaatcggtaagttgtaattaattcgttattgcttatgcagcctttacccagttttcttttgattcaacgctttccttattcgttctttctagtggatgctagggcgactcacctcgaccgatcggcagcgaaagcattccttctcaacctgcgcatgtcaatcaactaccgcaacattgtttatcaatctaaattccagaaacagagggctgcaggggaagctggcaggaacggtcaaactatcctgaactttggttcgtcgaagatgactgccgcatagggttcgcgctcctccatctattcctttctcttgtacttctcgtgatgtgatgagtactgcctctctatgatatccttgtaaagttgttctgtatgtatttttgtgtatgtataagcatacgtcgttggctggctgggaagattgaagcttcgacaagcatgtcacgatgagtaaataaattcgggcaaatccgtcacttaatatctcatcatcatcatcatcgaccatcaactaccgaccatcgatcatcgtcaactttcaagacatgtctgctgctagttcttccgagctctctattcctctgttgatagccaactacctcaatgcttctggtgtcagtctacacatgttgttgccgtcatgacatctttcgtttctaatcaagagattatgcctccttttctgcttctcaatctcgatagtattcttcaacgctcgcctcgttcttgaaagaaaatccaatccccaacttcgactctctaccggctcctcctatcgaccttcgtgacttagtcgaagagtacaatcatgctcggctgaatgagatctttcaaaagatgaaagttgagaaggatgaagaggaggaagctgtattaaatagaactgttaaggatcaagaactacccagcaaggtcagtcgctaataagtagtggctcggtctctcctccccgtcacatttgcttcgatctttcttgcgggagaaactaaaaacaaactccttttccttcttatttggagcttttgtaggtagagaagacatttggaagtatacatgctggaaatatattgagtgtcagcgttcatgatgttcctcgaaggtgagctgatttgcttgttcaactgattagaacctacgtatgaagctttcatttggctcacttggattcgaggactttccttcttcttcttcttcttcttcttcttcctcaggtctttcaacacaactacagctaggtgagctcctcataattgatgaagcttcagcctagattcaacttatacctgttctcttcctgtttcggttatcaagatatgaaactatacttcacccttcgctcctcacgacgtcatctgacaagaccctcaagatcacttctttatcgactggagaagttaaagatatattagaacctcacaaagctgcaattttgagtgttgctgttcatccacaatgtggtagacttattgggacggggagtatggatggaaggtgtgtgtttctgtcttcgtctccgtagccttcttcacacctattgagtatactaatcttactgtcatggtatttgatgaccaaacagtgcaaagatcattgacctaatcactcaaaagactcttcaaacgtttcagaatcagaaatttgtacgtatacatcagtgttgcctgatcgcctcgtcttctcgtctctaatctcttgaatttttatacaatattcttgactatacacatttttggacgacattcaaatacacaaaaaggtcgtgagggtcttgttctcaccaacaggaaattactttgcgaccgcctcctatgaccataccctcaaagtctatcgattgcgaacccctcttcccctcgcgcccaaccttggtccgagtaatgatgaggatgaggaagaagatatctcggagcttgaatcggactatgaactggtcaagatcttagaggtcaagagtaaccctgagggtctagtctttggacctccgactgaagaaaccggggaagctgcgtggttggcgttcactacccggtatgatgtctttcttgtagttggcacctcttcaccgctgacaactgatcatctttctttcgttttcttcctggttcgggcagaggagaccatcatatcaagtatctgatgttgccgtcttcagttgaagaccaagccgaatgggagattcgaaagttcaatttgaatcctaatggagacgactttgtctcattctctattctgttcgtccatctttcattctcgttgccattctgatagatattatatctttcaactatctatggttgtctgtaccgttgttcttactaaatttgttgtcaaaccggcctttagatcacttgcgcttcatccgtccaacaagtttattgccatgacgacaggagatcatactggacctcaatccagtcgagtattcttatatccattcttgagcaaggagcgaaaagcgacattatggactggatcaggtgagcgatcatctcttcctcttcttccttctcattcacgaactttttgttttctaaagaaacattgttcaccaccacaccgttctgatatctttcttgacggataaagaatgtgatcaattcaccgtaacgttcgttctcctatctcttgcctattcttttctcagctacgcctttcaagctcacgcgtctgcctcacgtccctctcctgacttctgattcccaattgacgtctcgtgctctgtttctttattctttcaagtcgaatgtcttgggccccatcaggtaactttgtggctgtcacctccacggacgggtatgtccgtctgctcgacctccagggtcgggtccgacgggctatccgggcacacggtgaacatccgactacaggtgtcaagaacgatgttgtcagagacgttttcattttctcgaaaggaacgaccgaatcagaaggaaacggagaggggtggaaggtattgagttgtggtttcgattggacggttcggctgttggcttgatgtgacagttaaatcttctctccatcatttgtagacggaggaaggaggatatccgagggaaagggtatcataagatctttaagcaacgataagaaagagcacaaaaaggagagattccagtattcatccggttttggagaaagaagaggtacaaagacacaagaaaaaaaggaaaaaaaagatgaaataaaatgaaatgaagaccacacccgaccggcagagtaagaaatcgtttgacgataacgaaaaaaagaagaaacagagtgtgtgtatacacgtttctgaattaagacttcaaaaaaaaaacttcaaattgtcctagtgagtaacgaagaaaagaaaagaacggagaatagaaccgaaatgagaatgaaggcaatggtaaacaaggagcaatgaacagcaaacgaaacacctgaaatcgatgcgccgacacctaaaattaaaagaacattttttttgctatggagctccaataggatatcaagttaggagataaacatatgcttctagagtttgttccaatgaagatgctacgggggggctccgtccgtttgatctcgatcagatagattttttttacttgtctttattgggaatcgtggtagatcttttggttttggttttgattcgggttcgaatatccaaaattcagaagtagtttcctgtctgtttggaatctggtttttgagctgatccacgtcggaaaaaaggagaaagaaaagtcaagcaagtcacgttctttcgtttagtcaagagaaatcaaaaagacagtgttatccgtcatagagtaaagagagggaaggccatcaaggagaaaacgtacaagggatgctaggatatcttcgatgtattcccgacttcatctcgatcgtctcccctgccggactactcatcatcatacttgatacgcctatcgatagactctcttccgttctccttcttcgtcttctaccaccgacaccattatcgccatcgccatcgccaacgtcatcgccgtcaccgtcgtattcatccgcatcctcggactcgtccgcgtcctggaagtatgagttcctcgggtcgtaatcatttatctggacgccatgtgattgagcgagtcgacctagcttgtcatccatctgattacgttcgatatagcccggctcggacctcaaggatccatcgacagaatacatactctgtgaatacgccgtgtctgatctgggccgtcctgatctactgctactaccatcgtcacgggtaggaactcctaacgaggacatgtcaccgatctcggcggataacccgatgggtgcgttctcgacctgtcttgtcgtaccctgaggagtgaaggtcacgaccgaagccatcgcgggactctgacctgctatcatccccaggacctcttcattctgtctatctcgtccgcctatcgacgttctcgtcgtcccggctgcgtccgtctgtttggttagtgaaggtgtgtccggttggtcgtaaggtgggtagggagaggacggatcgtcttgttttggccatagaggggcggtcggcgtgctggggcccgaatctacggataaatcggatggattgatgagtctcgagaacggccttggttttgatcttgtgtggggttggaattgggcttgtctgtccggaccgggggacgacgaaaacggctgtcgggccgataggccgaaggcccgactgttcatcgtcgtggctggactagagaaaaagttgggataggaagtcgagccgccgcttgtcattcccagggtcggatcttgttgccggcggcgtcgttgaatcgctttgaagatgataagaaggataagacctaaaacccgagtcaggtgcggcaatcgcccgaaagtgaggggaaatcaaataaaccagagtgaaatcgtcagggatacaagatagatgaatcaatcaacctctggttggataacaacagagaccaagcagataactcacagataccagccacgatcgcgatggcaacggcgacccagattcctgtgagcgaagactctgaatagttggaagtcgtactagacgatgtattagaagaagtcgcgacagaagacggcgatgacgaagaagttgtggtcccggatatcgctctatacatcgttgttgtattttgtttcaaaacgagtcccaaaacatagcaatgagtcaagcaacccaagacagcgaatatcagtggtactgtcacaattcaatatgaatgcttcctgtccgtcttgtagggtatcacagtatagaaaaaaaatggaatgactgacgcttgagcagcggatccatactcccaataatcaaccatcatcaaaccaccctcctgcatgttcgtcatccgaaacgtatggtctcctgatcctaagcctgctttacgccacccgatctgtttgaacgtcgtgcttgaatccatgtcggccggtgccatgtttttcgacagattgacagttgggtaagcaaccccatcgatcgagggaacaaactgagcaagggacggttgaatagctgtcatcacattgagatagtttcctatgtttccatccgcgtttttcggcgagagaataccagagaataaaaagaaacaacggacgagttcagttataaaacgaggccgatatcagacacacgcatgcacacgacgcgacttacctgtgaaagtgaattctagataagacccgttggaactcgtccaactgatggactgattataaaatgatgagatcattgaccggattgtttcggcctgtgtctcattaacgatgttgccatctgatacccgacaaccatccagagtgttaagtcaattggcaagaatcccatgcacccagaagagttgcttctgagtatacacatcctggcgatctggatgatacaaagaatgacgtgaggcgaaggagaagaaaactcacccagattcgacgcgctcatcaggttccaatcggatgaaagctcaatcttatttgtttcccaggccgagtcgtccaacaccgagggttctgtcgttgtcgacgttctatccgttttgatcccccaaaaggacaccccagacagaacgaaagaatggaaatgaagccgagaagagaaagggaaaccgagcaagatcgatcgctggtgtcagtgtttccgttcctacacaaccacacatgaccacttgtcttctccctcgctggcgcaatgtactattcaacacacatacaagttatcccacccaatggtgatgcccaacaaccgagctacatcggcctgactagacgctcgcgagtcgtcaatgctcctgaagacgcccgagaaagaatgcgtaccgaacggaaggtcggtgatgtttacagagctcgtggccgacatgtccgagatagatttcacctcggtcgagttgatggatagggtcaattggtatgccgaggtcggttcagtgagaaaggatagcgaggtacctgtacggatgatcacccgaacgatcaacccgatgcaactcagtacagtcttgcccggtcaagttcagactgtcggcgaaacgcgcgacgattcacagagagaatgaaggaaagagagaatgagcaagggacaaaccttcgaactctaactcgacccctatgtcagtcccaaccgcccaagcctccgcccatcgctgactgacaccatcccaagctgcagaattattccaaccctgtttccatccaacagtccagtcacaacttatacaaggcgtgtacgtgattaatggagagagcggcgagagagtggttgctagacttgttgtcgatgatgatgaagaggaagaagttgaagtcattgagagaggggagatatccgaatttgttcactctagaacgcgaatggaagagaaaatcgagtgatagcagagcagttaggcgggacacaggtgggtcaaaaagatcaaggctaaaaacgaaaaacacggcaatcgctagatatcgttgaatgaggagaaggacgaacgaatgaatgaacagagaaaacaaaggaataagaacaagaacaagaaggagaaagagaaggagacgagaaaagaatgctggtagtctgcggttcagtcttcagttgatgatctcaagcaagaaggaacgtaaatcgagcctcggctctgtcgctgagatataacaagattcaactaagatagaacggaacctcgggtaaacacacacacacacacacacacacacacacacacacacacacacgctcgatgtggagttcgatcaacctagaacgggagaaagatctgtatcaaacagaggacgatggcgagagtgagaacagatccgaaagtgatggaggctatatgcctacggaaaggtagatatcgaaacaaataaacattgtcaacgaaacgtggccgaagataaatagtcacgtgcacttgataactctttgagcatgtacattctctttcttcctccctttagacttggacgttctgatttctcattaaactgtactgttgtggtaatggttcttacggtcaagagaacttgtttagattaaagctaaagcatcatgagatgatcacaacagggtggatacagtagtcggggaaaagaaaatggttgtgggagggtgagggaagcagatgtaggcaaaactaaaagctcatatagaagaaacacagaagaacccggaaagggaggaaaaccgaaaggggatcaagagaaaacttcttaggcgttgtaagtggaagcagagacgtttccacctcggccggtccagttgatgtggatagcctgtcccttctggagtcgctcgttctccttaccaggaaggacctggaaggtgtgggctccgaagaaatctcgctgtccctggaggaggttggcaggcacggtctccgatcggtatccatcgaagaaggaaagagcggtagagtggcaggggatggggataccccagatggtagcctgggcgacgattcgtcgccatccgggctgggccttggcgatggcgttcttgaagaagtcgtcgaacaagaggttctccaagtcggcgttcttctggaaagccttggtaatgtcaccaaggaagacggacttgatgatgcatcctcctcgccacatggcggcgataccagcgttgttcaagtcccacttgtactccttagcggcctctcgcataagcatgtaaccctgggcgtacgagatgatcttggaagcgtaaagagcctgttcaagatcgtcactgtggtttccagtaggaaaaatcgagggaggagcaagcgatcagatcaagaacctggctcgaaacaaataagggaatcagtacatgagtatacgtacatgaactgctgcttgtcaccggagaaggtctccttttcgggtccagagaggaccttggaagctcggactcgctctcccttgatggcagaaaggcatcgggcgaagacggcctctccgataagggtgacgggggttcccatgtcaagagcgttaatggcagtccactttccagttcccttctgaccagcctggtcgaggatcttggtgaccatgggctcgccatcgtcatcgttgtacttgaggacctgggcggtgactaagaggggatcgagaggtgagctcggatatggaaatcagcaaaaaagaaaaaacgacaagactaactgtcgatcaagaaagagtcaagaacacccttgttccacgtaaggaagacatcggcaatctcggactcggtcatgtcgagtcctcgcttgaggatatcgtaagcctcggcgatgagctgcatatctccgtactcgataccgttgtggaccatcttgacgtagtgaccggcaccggttccaccaacccagtcacagcagggctcgtcaccgttgggtccctggatctgggcagcggtcttctctgtattgtccggaacgaaacgataccaagcggattcaaggttaggcgtttgtgtacatgtaacagtctaatgaaaccagctgggagacgaacggaagatctccttgatagcgggccaggcggcctcggatcctccgggcatgagggaaggtccgtgtcgggcaccctcctcacctccggacacaccggatccaacaaagagcaagcccttggcttcaagctcctgggttcgtcggatggaatcagggtagtgggagtttccaccatcaatgatgatatcacccttctcaaggtggggaacgaggaggtcgatgaaagagtcgacggcctttccggcctggacgaggaggatgatctttcggggtcggacaagcttagagacgaggtcctcgatcgagtgggccccgataacgttggtgcctaccaaggaagggagcaaaagaaaagtcaatggttgatgcggtacatgtaggtagttgaagaaaacaaccttacccttagcctcgttctcgaggaagtgatcaaccttagagacggttcggttgaaggcgcaaaccttgaaacccctgaggtggacggtcagatcagagggagaaaggtcagaacggaatggttcaatagagattgatcgatataaagaactgacttgtcgttctataaggaaaaatgggtttggagtgaataccaaatacagttagttttctcaagttctcggaagattgttgaacgtgatgttgtgcttttcttctcgctgctacccatgtctcaagggatttttttcttcctgttatcttgctccggggttacgtaccatgttgagaatcaagttctggccctgtggagatgaatcgaacgagagaatgtcagaagcgataaccaggcaagagcgatgggttgcaaagggaacgaaccatgacggcaagtccaataagtccgatatcagcgctttgagcgggaagagttaatcatcggccgagggaacgatgaagagatgaagagtgagagaaaatggaagaaagaaagagaaagaaggaaagagatgagatgagatacaagatatgagtgattcaaaccaagagaatgaagaaagcgaacacaaagaagagcatacctcattttgtttagttgatggatgtatagaaggatggaaaaagaaaggagatgatggttgttggcaggagaaacagagatgggtgattcgcaagagaaaagagaaaaaaaagaaaagaagagaaggaaaaaaagaaaaagaaaaaaaagggaccgtacggcaggcgaaccgagcactctcgtcgcccgccctgagcgttactcatcacacaagccgcacggaccggactgacgttgaccgcgcgtgcttggggtagaaaagtgcggggaacaattgggggcaaaggaactaatgccggctttagccaggcgtatggacacggttatctgaccaccagcctaggggatttgttcctgacaagtccaagttaggtacccatatttggccatgtcttggggttgattcaggcttggctgccctatgagtgacgatcgaggcccataattgcccataattcctcgaaggatcccaagtcgttttatctttccccaagctaccccgaacacaaacatccccggtgtcatcatccaatcgaacgctctccgcgatttggttggacagatattccatcattgcttcctttttcgcgtctgttttccccgcatggacggataggtttatcgattacgtaacggatgattgatctccccagtgttcatcacactcggcgtctctcctgccttggtattctcgttctgcccttgatatcacgctgatgtcgttgccataatctttacgcctggtatctttactccatgacactgttcgttccttgtttcactactaaattaatctccctatcagtattcttgccttcgatatttgtttgtcttctataacttttcctgtagtgtttctgtagtattcttgtagtttccgatcgatcgatcgatctctgttagtacaatcagtacacctactgagcttactgagcttactgtgcttgctacactgctactctattcttttctattgccctttccctctctgctaggcgaccgcttcgtcgatctgatactttctactactttcctctaccgccctgtacttacactctttactgctctctatacttctgactctatatgcatgccatgcttgataactgctcgctcatcagatggttcccgccttcagattgatcatgtacacatccctctgtcttactgggatctctctgttcggatagtaacaacttgaacgacaaacgttgagcaaccagaccatacacagacacgcacgtatatgctcacatagatgctcacatagatactcacacagatactcacacccttgcccacacaagtgctatcgatcaagtaacacgttccaccagggaagagcacataagcagtgttgttacagcggtccgcagttcttgacgaacgtatgtgtgcgcgccctggtgttctatcccaagaaggccaaacagcccaaccgttcgaagcttcgcccatctactctcgtccctctggtctccactctctcatctctatcacacacccaatcggttcgttgcgttttctctttatccttctcttcttctcagtctgctgtgaatcattcagtgaggtaggcggtcagagcccatcatcgacacgcttggtgatctctatttccggcttccccagccctcgcggatttaatcgcttgggaccgagccccgttcagctgacagccccctctcttcccctttttctctctgtctccctcgtcggctctctcatcaacaccaacttgaaaaaaacctcaaagacaacagtctctagagtagctctgtacttcaattcagagtcatatcgcctgtcttggggatagctgtttggaacatcgtcagtaacttttcatctgttcaagaagaaaagagaaaaaaaagtcctcaaggttcctctggccatcttgcgatctcaccgtacctctcttccatctctctcttattttctctcctcagaattccctctaacttctagacacaacacactctctctctatcttgacaacatacatctcctcccataagccgactgtcagagagcatctcgcactaaaagaaaacgtacggctttccgtccatcgatccttcgctgttctcctccaatacggaaatgtccttcagtctcgctcggagcgcctcgctgggaggacctcgaaagcagatggacgacgtcgaacgtgcacttggcacagaggactaccatcaatctctccggtcggacggacagaacgtttcctcctggtcaagtagaggatcacattcacccggagagtatcatccaagccatcggatcgtcggcgagctctacccttcctccatgacggctgacggtatggccagaaccggtctgtttcccgtcaacagtgtcaatcaagctcaccagcacccaccaccaccaccgccgccgccgccgccgtcagcatcgtatgctccccaaggatcggttgataaggttgcgcctcaccgacagtcctaccatcaggttcctcctccgccgtcaccttccgcggcagctcgcaccaaccatggtccgcctccgcctcagctagaggccagcccaggaaacttcaactcgtcctcgtcttcttcgtcctttcatccgcatccctcatcttctcaccccaaccagtcaggccaaccgcctccctcagcctcgtccaatccgtatgccgcccaggtatcatcatcctcggcctcgtcctcttcgatggcttacaacgtaggagcttccggtggattctcgcctccttcttcagccggtcattcccaagcacacagatcgtcctgggcggactactctccgttgccttcgcctaatattgagatgcgcgcttcacctcatcagccatcttcatcatctggtgcctactactccaagcctcctcctccggcctcgccctcatccggctcatctcccaacccaaatagggcaagctatcatcaaatgaacccgtaccttcctcaaccgccggcctccttgtcttctcagttataccctcaccatcagcaacaacaacagcagcagcaacccccactaccgccgtcgaatcaaagaactcatagcagttcgaatatggaatatcagcttccagttccgcctctgccgccaccccctcctccaacgcaaagccaagctcagacgcaacatcattctctacagcagcaacagcaatatattgcgccaccccctactcagccccgagcgccttcgactgaacaactgtcgacaggtacctacggtcatcaacactcccagtcgatgtcatcacatcagatgcattatcaacctcatcagtatcagccaccgccgccggcaaacagtatagccaatcaatcatactcgagtcattcgagggaaactatgatgggctcctccggcttggtcgattcgggaatggattcagggccgggtagggaggacgtccatcaccatcagcaacagcagcatcaacaacgaggtgggcagacacaggaagattctcaagggttcagaaccgttcatagcccaagtgatgtgaaacctcgggcattcaactcgagagagatggtccgttgttcttattccttgtcgctgttctttctgtttctttcgcgcgtttcatcttcaaatcgtccttctgttttgctgactcttccttctattctggcttgtttcaaccatcttcgatgctcattcctttcagcgtccgttgcaagccctgacatctgacctggctcagacgtatacgcggtgtaacccaaactttcggtatgagaccgctgcgaacccgaggagggtgctgacaaagccgtctaagggagtcctcaatgacgggcacgataacgaagataacgattatattttatacgtcaacgattatttgggtacagaagaaggatacaagtcagttatctgttctcattctctcttctttcccttctctgttctgcgcccattgggttcttgctggcgatatgatcggaacatgtaggtctgattctccgctttctgacttcgcacgtctcgctacagattcttgattttggacgtgctcggtcaagggacgttcggccaggtcgtcaaatgtcaggacatgaggacgaacgagatcgtagccgtcaaagtagtgaaaaacaagccggcctactttaaccaaagtatgatggaggttgcgattctacaggaggtccgttcttggctttttagtgtatgatgtccgacaggaatcaagtgctgaccgtatagtgatcttctcccgcttgtcttctctttcatcagctaaacaacaaggccgatccggacgacaagcattgtattcttcggatgcacgcctcgttcatccatcacaagcacttgtgtctggtgtttgagtgtctgtcgtccaatctttacgagctcatcaagcaaaactcattcagaggactgtctatccagctggtcaaggtgtttatcacccagctgttagactcgctcgagacgttgcaaaaggcaagactgatacactgcgatctaaaaccagaaaatattctgttaaagaggttcgttcgaactgattgcctatagctctagaaccttatggtttggatactgacatctcgctttgctgcctcgtatgtgtttgcgcgcgtttcatgttgctgctcgcttgtgtgtgcatccactccacatcactgctcacctcagtctttcatcacctcagatcaaagtgatcgattttggatcggcctgtcatgaatactcgaccgtgtacacttatattcaatctaggttttatcgatcccccgaggtcctcctcgggctgccctactctacagcgatcgatatgtggtcattaggttgtatagcggtcgaactcttcatgggtctcccgttatttccgggaacaagcgagtacaaccagttgtccaggattatcgacatgctagggtaagaccaagccttccttcttttgtacaatgcgactgatgaatcatccttgaactctgggtatctgataccctactccccacgttttgcccaatacttcttgacccactcagaatgccaccgaaccatctactcgagaacgggaaacaagtccacgagttcttcaacgcaaccccaaacccggacgcctacactggcggccgtgtcttccgtttcaaatcgatggagcaatactcgaaggagcataatgtacaggaaacagtgagcaaacagtacttcaaggcttcgaccttgccagagattattaggacatacagcttttcaaaaaagggggccaaacagtcggatatggatcgaggttagtccttctttgtcttttatcgcttcataagtcttcttaaggggaagacatgctcatcatcatccaacgccgactcttgttctggttcactgtactttatctgtacgtcatgatcgacagagatggcaatgcgagcttcgttcacggatttctgcacagggctcctcaacctagatccgatcaaacgatggtcccctcaacaggctagacaacatccgttcatcaccggtgaaaagtttatagctcctttcaatgtgagtgtttgtttgctcgtcttctatctctttgcgaggtggcactctcactctgggagtgattcagacagggaagaaggataaaagagaaagagaagtatctcatcaacttttttttaaaaaattcttcagccatcacgacactcctcaccagcgtcggtcaaggccgtgccttctgcccattctggatctccgaccgattccaaacgaccttacggtggccttgtcgcgaaatcttcggcccgcccccctcgagcctaccaggatgctgccgcttataaccagcagctcaaccaacatcagacgtataccgctcaacagcaagccgcccaggcggccgcgaacgtataccgacacccgttcgcacctccttctaccgcttctacaagtagttcttcgacaggtggtcaaccggtggaggatcaagcaggatcataccaacatcaacagagacttttacaagcgcagcaagctcaggtcgtacaagctcaggttcaggccgctcaagcccaagcccaagcccaagcccaggcacaggcacaggcacaggcgcaagcacaagctcagcaccaccatcctcaacagacgctccgagcgagcacgtcgacttcaaacttaacagcttcaccttactctgttcggaactcgaccggatcgacaacgaccattcttcctcctccggcagccgccttacatgcttctagcttgggcgggggtggcgttggtggcggcgcaagcggcccaggcggttattataccggtggaggtcgtgctcggtcaaacacgatcaaccaaatgtcgattgtgccggcacagatcgctcggatggctagtttaggggtcgaaggacctggttctcagataggaaggggcgcgttgacaccagtgatgaacagggaggaagccatgagagaatgggagaggagaaactcacaggcagccgcgtcgtcgacgacggcaggcgggggaagttctggaaagagaggttccattggcggtggtcatacatggccgcagctagatttcttggaagaacgagcggaaagcttgggaaactggaacacgacttctcgatacagcggaactgggctggactcccatcaatcacatcaccaccgtcatcagcagcagcagcaacaacaccaccagcatcaacagcaatcatatcaccatcagtacggttctcagccttcactctcgatcgtcgttgatgaggaaaatcgtcggaatccgggttcaatatcatccagacgggactcttcaggaatgaccgcgctcgaatccggtaccagttcgggctatcatgactcgacaccttccccaggctcgtcgatcaccagtccgccaatggcctacgctggttcgaacagatatagcgcttattcctctggtccgaatccacaggtttcgtcttcggcttctcttcctgttgcaggttacgaatttgatcatcggttggacgggatgggtagtctgattcaacc

SEQ ID NO: 2880 - DNA, 9259 bp, Xanthophyllomyces dendrorhous
ccttcgcacgggtcatttgcctttacaccgagcgggaaccatcgtttaggaaccggaggtacattgagaagataggtgatctctgttgacgaagagagagagagagagagagagaggagacgatgaaagaaaaagaaactcagatcgttctacttttttgtccttcccttctggaaattcctttgccctcgtccctatccttccctacttttctctctcccttctgcccctttctcagtcttctttccaccctgcccctcaatttcgttgccagagatctcttctcatctattcttcatcttttcccttccttctttcctttctttcatccgttcctgacatgtctatcttacatctcatttttgtcctaccctatcctgcgtgcctgcccactttgactgacaaagtcaaatgaagatgacaaaactctgacatagaggaaccaggaccggaaaaccgaggtatggaaacggggaacagggcatcgtatatgccatgagaatcaagaggaaaaaaaagagaaactaggaataggggaacgagagaacatgatatcggctttccgaagagtttcaactcggggtttccgggtgcgcaacgctttcttgcctcttgcccccttccccccccctccttttcctctctatcttctgcagcaaggagagaggaaagggtttttgtgtggtcgaatggttaagagagacagaagcacgtacatcattatcaacatagatcatttgttatatcaggtcaggtcaaggaagacaggggaatatataacgaaagagtaaacagagaatgagatgaggaacgggagagataggtattgaatacaactgatcgatcgtgcacgatggcacacgagacggattggataggatgaagagtagagtggagacaagtcaggtcgagaaaccgaagaagggaaaggaagaaaaaaaaaggggggggggaaagaaatacaaacgcaaacaagcaaacaacagagaagaaaaagaagatacagatacaaacgatacgatctctcccctctcccttgttgttttcttcttatctatctaaggaatatatattctggaataaccctcgactttagatctacagcaaggacaaccactcaacgccccattttgtcctctagtagccaacgtttctctacagtcgttacataatgccagacatctgcaaggccagaggatgaccgtcctttcgtccgctctacagatcacacatactctgccttctggttcatcccctgcgtccggtcttgagaaagaattcgaaggagatggtgtcacggagggttcccttcgttgacgaacaaactctttcaaggatagagcttcctgtccggcatacgggctggaggaggagaagggcggaggagacaaagttgaagaaaagaatgaagatgacgtggtcgaagatgacgaagctgggtcgagtacactcaacgaagggaggagcgcattgaaccgtcttctcgtcagaggagaggacgaagacgatgtcatgtgtgcaaggaggacggtgggtagcgtcggggatggggggagcattgatagtgtcgacagaggttcgtcagagtacgcagcaggtgatgacgacgaagaatgggaagatgaggttgacgatgatgatgaggaggaggaggaataggatcgagctcggagttgaggccggatttgatgagaggatctagaagggtgatacgtcgggtcgtcctcctcagatggatcgttgacttgcgtataacctccggcaaggaacttcttgtacacattttcatcctcctcaccctctccaacgtcgtcttgtggatgctcctctcttcgatcttcttcctcttgctcaaagtctggcccaatcaaggcatccccttcagcgagaatggggaccaacctaagtccccacctgcctcctctcgagagccgtctagtacctccgaatctcagtgctctcgcacccaggtcccaagcacctcttccaccgggtacccacccaagcgtccaccagccgagtgcacccagccattctttgagcgcggtgtagaaccgactgaactctgtccagtaaggagaatcatctccaccttcccatgagccgaggatcccaggtcggaaggacgctttgacctgagtgatctctcttccaaacccagtcgaaacgtgtcgatccaatggggacgaagccacgtagaggtctgtatgtggaccggtgggatctctagcaaaagcagagttggataaatcgacgtaactctctgccgggagctcgatcagaccgacctcgttccctagaccgcccatcttggtgtgggtgagacaacaggcgctcagtttgaggagcactgtaggaaagtcctcgctcgtcgaaggccaatcactgatgggtagtagcgtatcgagattgatagtaccctgggtgaggagttgagtgaagaacgagaggataagcgtgagggcgaggatcgtaaagtgaaagagcgtaaacatgtttgaggccaaagtaaaagcaggcagcgccgatggagacgtgagaagaagataggtgaagtgagtctactcggaggttatgttttgtatgtataacaatcgaatcgccatgatttgtcattgtccattcggtcataaagacttgaggtcagcttgatggacgtcagagcgaaggcgaaggcagaggagaaagaaagattctcttacgacttggatcgatccgcatactgcagtcggcagcaacctatttctggcccacctttgggagcattcagccccgtgcagccaggcgaactgtacagtcgtcagccagataacgaatagaatgttccaatctggcctgctcggctctggctgtttgcggtgcataaacgggttagagtacagatgaagaaggaagccgaacgaaaacaggttggcctgggagcctacatgggcgaagccttctagggagcgagcgaatgtgccggtgattagtccgaccgcgatactggtaaagacccgtttaaaaagcttttcggtgggcatcgtcagtgtctggttggcaagcgggagggaggccatccatggggatgcggtcggagaggtcggatgaggtagcaggcataatgtgagaagatagaccgagtagagaacatacagcagcgacggtattctgagaagcctatgtgtttgagtcgaggtcaacgttctccgaaggatgatcttccatcgaggctgttcaattgacggatcgtcttgttccgcttgtctgcggtccatcggaccggccggtcggacgacggcccaaattcgattggttatcagagctacagcaaggaggacgaggccatagtaagatatgaagaacccccaaggggtcatcccggacgaatcatcggttggaccagactgaaatacccgagtagatgatgttcggtacgcttcggccacacgtttcacacgggaagggatgaacgatgtgattcgagtgagcagacctggcatcgtgagagatcaaggagagtatcggaggtggtatcaaactcgataggaatatcgaacgagtatgtgacaacgtatgcttgccagtatatctgtatgagaacagaaaggacgaagaacgggttgatgatggagggaagataggaagaagaaggacgagcggaatttgttctcgcttacccccaacgggtaattccgactgggcgagattgtgtctgttctctttctctttccttcctttcgctttcttcgctctcttcggactctcagtgtactatgaacgacggagtgtcttgtgctctcattgtgctgcatttctctccctacaacccatggcgtttgactgatggacaccagccaagccttcttccggctggcttgctctgttggcatctgtgagttacgtatatgaaggcgtcctgactagataaacatcacgtgactagggctgtgtacttatgtagcccggatgttgtctaaggttatatacataaatcaaaaatacccactcaacatccgtctattctagatttctttgcctctcccaacttgcaaaggatacggacacggatatcgtcttctcccttgtctttgctctcctttgcttcccaagatggcttctcgctcgctacttgcttctcttatgcagggtcccgcttcagctggatcttctcgagttgctctgaccgccgcgtccagagtcgggccttccttggttcgacacgcccactcgcatcatttgattcttgatcccaaacgggatgtcgttgtcgatggaaagatcggtgagagcttatctttttattttgctttgcttctcttgctctgttgtgtcaggaggctgtgtaccggtcatcttagaggtctatcaaaccactccaagtgtatgtcgagagatcgaagaacagtcttagtacataatctcttctggacgtgttctcgactcttgcgtcgaacagatagcttgtcctttgcgtcctccattctttggttcttgcttctacttttctcccttgatgatgatttgtttctgtgtatcctcccttcttttgtaactggtgtagcttacgtcttgaattggtccttttttccctcttttctcgcctatctttaccttctcttccagtcaacccaatctcgccgatagcgttcagccctaaaccaccctatgcacccctcttccctatctatacccctctttcctcgatcactccaacagtacctcccgcccaggcggccgagactatcgtcccgcttcctcgggatatctttggtgttcctctgaggaaggacattcttcatcagtgtgtggtccaccatatgactttgttgagacaaggaacggctagttcgcttcgaagggacgaggtcagaggaagtggaaagaagcttcgaccacagaaaggaacaggaaaggctcgagtcggtgattcaggaagtggtatccgtacgtgtctttctttcttagaccggataaatcttattatctcctgtttctctaatcatcgaaatctcctgcttttttcttctcttttcctctctcctttatttcacgctcgacaggtgtcggaggaggatccattcatggaccgaagcctcgagattggtctacagatttgactcgaaagacccgtcagcttgggttcaagattgctctgtcccagcgaatgcgagagggacgactccgagtggtcgattcgcagggacttgttatggacgattggcttgtcccggctaagcgggttgtcaagcctggcaagcctgccaatatggtccaagcagcctccaagtcggctcatatcggtaatcgactcaaaggtgtgtcttcaacagtctactctgtatacattttcttcctgttctgatcatcccatctcttttattcccgttctttcctcactttctccattccttagagctcggctacaaaaaagcattgttccttcactcaccgttcgcggtcccaccctcgaatttacttccccgatcaatcagcaatatctcgtccatgaggctcgcctcgatttcctcaatctctactctcgacatcctcaagactcatgagcttgtgtttgacatgcccgctctcgagtggctgattgccaaagtccgtcagtttgacgaggccgcttactccgctcagttcgacggaaacgccatggtcatgagacgaagagcgcttggattaagtgacttcccggaggacggtcagcccgatgaaagtaaggagatgctgagacagctggaagctcagctaggcggtgagggtgagggtgatatgacagagttcgggttgggtcaaccggctggagaaaggctgagtctggaggaggagcaagagatgaagaggagagcggactggctcttaagagtgctgccggacggtcaatcaccctcgactgcttaaagaaggggtgggatggagagaagaggaaatggaaacagaagaaaaaaatgaatgaaagattgtaactcttcactcagaattcctcttttcttctcgtcatcattgtcttcttcttcttcctgaatctctgttgggtcgatccgcgaaagacgtggctcgttcatagtgagaaatcgtgaatgtgaaaaatctaaacgatatgagtgaatttcctaggagggacaaattggactctaatcagtctccttgtaatcacgatccatcatctttgttcgaacaataccaggatggattgagccacatggtcaagtctttttcttctccaatattgcttcctcttctctttgttctctctcccttttttcttcgatttcggttgcacacgactcaaggaaaaagttaaaccaagacggcccatgcacatatgataaactccctctctcccttctttctcctctctctcctcccctcgtcccgtctgcactttctttttttgatctatacctcaaagaaggaaagattagatgttgaaaggtttcgggatatgcattccactccagattccacgagcagaggtcgatcccgggccaggttggatctgagcatgacgaagggagaagattctgtttcctgactgtcgaagcaagtttcgaacctgttttggtttcaaggggggttttatatataaagttatgatttcgtccgatcgtccaatgcaagaaagagaataagggaacggttcgaaagagagcatgctttaagatgaatagagtgtacgtacacgtaactcgacagtgtccggtcgaagctgcttcaagcaaacggacttttcccttccagtagctgcagcacacaacacccaaaataagagagagttgccaaacaggaacatcaagcaatatcgcagacagacaaaccatgacggtcagctcagtcccgatcatgtagctaagagacaagaaagaaaaacggccaaaaagtagaaaagagtaggagggaaaagcgggaacgcactgtatatagctcgaacgacaggagcttttcctcctcgggccgaacgaacgatgaattctgtctgagggttggctctagccagtcgggtgatagacgttcgaaggtattccctaaaggaaagaagagggagaagagagaaagcgtcaggacatggtaccctgtggatggaccacacgacaggcggatggcagagaaagagcagagaacgataaagccgaactgatccagacagaagaacttctttctcttcttgaattcctgttgaagctgatagctaaggaaaaaccaaggtctcacctcataccctcggcagtgacatcggactgatggtactcaaactccatccgtcggcagggctgggtaaagtgcaaatatccgggtaccgtgtaggatctcaccgaagaaggaggcacatagaacggcggaggaatcttgaccggttttatgaacgaaatcggactgggtctcattgcggaaagagtgaagaaagagagctagaaggaggcaaagaccttagccggatgggaggatgagaacgaaaacgagtagcggacgatatggaaagatcgtataggaaataaagttgtttgttagggttacacccgctcaagttagcttttctccaagtcaatctagatacgatgaggacgcgaccgatacatcaccacatctgctctatcctcatttctctcgactttgcttgttcagaacttcttacacgcgatgagtgtgttgttcgagacctcactaggagatttggtgatcgatttggagactgaagcatgtcctgaactgtgtctgaactttctgaaggtgagctcttaccatcccatctatgcaagatgcttttcttatggattaaggactgatctttccttcgatacgtatacgggtttttattctggttacccacagctatgtaaagtatactactacaatctgaacgcgttcttcaatggtacgttccttcttttggctagttcagtttctagagagtgctttggttgtttgcttacctacaagttgatgcatgcgcgttggctttgttctcttttgttctgttctgttcatatagtttccaaggatttcatcgcccaaaccggagacccaactgccacaggtgaaggcggagaatctatattctcttacctatcctctccgtctgatgattctgtgcctcgatacttcaaaccgccaatcgtccaaagtctgaaacatacgagccgagggacggtctccatggctttcgccggaggtcctaaaggtggatgtggtagtcagtttttcttgacgttaaacgaaggacctatcgattatttggatgggaaacatcccgtgtttggttcggtggtcgagggtctggatgtgttggagaagatgaatgagacctttgtcgatggaacgggaaggccgatgaaggatatcaggattcgacacgtcgtggtattaggtgattccttccacctatctttgcttcttcttcccattcactttcgagtcacggaacacagaaaacatgtactcgagacaatgtactgacatcagatgtctttcgtatacttttatagatgatccgttcgacgatccgcctggtctactcgttccgcctggttcgccgacgatgattccagacacaaactttaacttgcgaatagccgacaacgaagaccctctggaaacgttacctgccgaacaggcggaggaagaacgtcgtctggctgccgcttctgcttctgctctaacattggagatgattggggatctcccgttcgcgaacgtccgaccaccggagaacgtgttgtttgtgtgcaaacttaacccggtcacgagggacgaagacctagagttgatcttttcgagattcggaacgatcatgagctgtgaggtcatcagagataaaaagacgggagacagcttgcagtacgcgtttgtcgagtttgacaagagggaagaagccgagcaggttcgtcgtagtcttctttttctcgtctgatttgaaacccgttggcgcgctgtgaacagtcgtcgttgtcgtgttttctttctgacgtccaggaaactggttatgttcaatgaaacttttaggcatacttcaagatgcaaaacgttctcgtggatgatcgtcgaatctgggtagatttgtgagtgtcttgtctcatgttacttttgagttgctggccaattcaacctgtgccttgctggtatctttgtacgtctctatggcttgatacatcaactgacgatgaacgttccatagctctcaatctgtatccaagatgggaggttcatggagttcggctgcgctcaaggtgacatccgcctccaatggtcgaggaggaggaggaggaggaggtggcgg

SEQ ID NO: 2881 - DNA, 11640 bp, Xanthophyllomyces dendrorhous
ggagggggacatcgagatcagcgattcgatcaacgaggaggccaatcctctatgggtatggtgtttgacgatcgtgatctctctcgaagtgggtcatccaaaggcgcacgaggaggagatgatcgtcctgaccggccaagagacgacagacggtccgaagggagacggagagaagatgaaccgagaagggattcgggacgagactaccgaggcagcgcaggaggaggaggagggggaggaaggagaaggagtcggtcgaggagtcctgctggatacggaagagattccggtagaagtagcggcaggtatagggacagagacgatcgagatcgagaccgagaccgggaccgatatgctagtcacaatggcagacgagatcgatgagagattacatgcctgaacgagaatcgagaccgagagcttagcgttgcttttagagtgtatgtacacccaagactacacacctgtgaacgagtgtaacaagaataaaagcggtgtccacaacaaaattgctgtgcaaatgtaacataccaccagccaagccagccaatatcacgacttccccacacgtgactcgaccaagccagcgaattttcaccttccccctcaccgcaccgagacaatcctcaacgccgggcggaccgcttttctctttaccatcctcacaccatcggcttatctccccctaggaaattatttacatttttaatattctcattttattttattttatttttctcttcttccttcttcaccatgctcaatcgctccatccttagacggactatcagcacctcatctttcagagacaacactagatctttttcttctatccgacaaggtcttttctcgcagaggccttcttctattcgtccttctaattccagcagagctttgtgttcctctttcgtttcccctgtccagtccttccagcgaatgtccatctcttcttctgccgtcaacgcttcggcccagccgatggagggtgtcgagacccaggcccagatcatcgacggaaacgctttggccaagttcgtcttcttctttcttcttggtcggggttctttccttccttcctttttttttcttcgtcttttttcctggtcgcaaagagagatcatctaggaaaggctatctttgctgggttgacaaggaaaaaaaaaatcctgagaaaactagagagactttctcgctcgccttattctcgtgcctgcatatactcatccatccgatccaagattgcttgccttctctctttcctaaaacggagaaaaaggagtttcaattggccatctttccgttttttcttcgttcctccatttatcggaatcttgcgccgttctgatgggaatctttttgggatttccaatctccaaaaaacaaacaaacaaaaaacacacacatttcagtgaggctgactgttatttcccctttcttgatccttccattccttttcactctaccataggagcgtccgagccaagatcgcctccgagatcgcttcgattcagtcaacgttccctcggttccagccaaacttggtgatcctccagcgaggatcccgaccagactcatccacctatgtcaagatgaagctcaaagccgccgaggaggccggcatgcgatgctcgctcgttcacttgtctgagacctcgaccgtcgaggagatcatcgccaaggttagagagtgcaacaacgacgacaccgtcgacggtattctcgtccagcttcctcttggcgagggcgtctcgtccgatggagagcgaagagttgttgagagcgtcagcgaagccaaggatgttgatgggtatgcatacttttcatttcctcccttctcttctcttcttctccttccagtccatcaaactcatgtgttgacatcggtcctcctccagtttccaccctaccaacatcggtcacctctcttctcggcttaccaccccgcttttcactccatgcactcccgccggtgtgattgacttgcttgactctgccaacgtcgacatttccggaaagaacgccgtcgtcctcggccgatccgacattgtcggttcacccgtttgcgccttgctccgagagcgagacgctaccgttacccagtgccactccaggaccaagaaccttcctgagattgtcaagggagctgacatcgtcgtcgccgccatcggcaaggcccagtacgtcaagggagagtggctcaagccgggctgtgtcgtcatcgatgttggaaccaactttattcctgatgctaccaaaaagtctggccagcgacttgtcggtgatgttgacttcgagggagcatccaaggttgcttcgttcatcactcccgttcctggaggagtcggaccgatgaccgtcgccaagttgatgcagaacacgttcgactcggctaagaggcgatttgagcagggccgagagcgaaagatcaccgtcaaccctcttcatctgctcgagaaggttcccagcgatattgagatcgccgtcgcccagactcccaagccagtggttgacattgcttccgaaatcggactctcgcccgacgaggtcgagagctacggtcgatacaaggctaaggtcgagctttccgttttggaccgactgagccaccgaaaggatggaaagtacatcgtcgtcgccggtatcaccccgactcccctcggagagggcaagtcgaccaccacgatcggtcttgcccaggccctcggtgctcatctcggcaagtctgcctttgcctgtgtccgacagccttctcagggaccgactttcggtatcaagggaggagccgccggtggaggatactcccaggttatccccatgaccgagttcaacttgcacttgaccggtgacatccacgccgtctcggccgccaacaatttgcttgccgccgctatggacgccaggatcttccacgaaaacacccagaccgacaaggctttgttcaaccgactttgccccgccaagaagggtgtccgaacctttgctcctatcatgcttaagcgactcgagaagcttggcatcaacaagaccaaccctgatgatctgacccccgaggagcagagcaagtttgctcgactcgacatcgaccccgagaccatcacctggaaccgagtgttggacgtcaacgatcgatacctccgaaaggttaccatcggtcaggccgccaccgagaagggattctccagggagaccgggtttgatatctctgttgccagtgaggttatggccgtcctcgcactcagcaaggacctcaaggacatgcaggagcggttcgtccggccttccctcttctttctttgcttgctaactttctgaagacgcggtccgaaactaacttccctgactgatttcgttgttttcacttctcatacagattgggcaagatggtcgtcgccactagcaggtccgggcagcccgttaccgctgacgatatcggatgctccggtgcgctcgccgtactcatgaaggatgccatcaagcctacgctcatgcagacgctcgagggaacccccgttttcgtccacgccggacctttcgccaacattgctcacggaaactcgtccatcattgccgacaagatcgcactcaagttggccggtaccgaggagggcgacgatgccagcagaaccggttactgtatcaccgaggctggtttcggagctgacattggaatggagaagttctgcaacagtacgtcgggttctttctcccctctcgggtgccttttgaggacctcccagtgcattctgacttatcgatatgtctgttctttatcgatcaacagtcaagtgcagagtgtctggcttgaaggctaacgccgtcgtcttggtcgccaccatccgagcactcaagatgcacggaggaggacccgaggtgacgcctggtaagcccttggccgagacctacttgaacgaggatcttgagaccctcgagaagggatgctgcaacttgggcaagcacattgagaacgctaagaagtacggaatcaaggtcatcgttgccatcaaccagtttacgtaagtggtcttctcctcgcttgtctccttgattcttcattcctctctgcctcctgactgaccgttcggttggtgatcaatatagtaacgatactcctgccgagatggagctcgtccgaaagtacgcgctcgccgctggagccgaccaggccgtcggatccaaccactgggccaagggaggagaaggtgcgatcgaccttgccaacgccgtcatcaaggcatgcgaggaggacaacgactttgagttcctctacgataccaacaactcgattgagaacaagattgagacgatcgccaaggagatgtacggtgctgatggaatcactatcgagcctgaagctcagaagcagatcgatacctacactgcccagggtttgttcctctcgcttcctcaatggagaagaaaagagagactataagctcgtgaatacgtactgaccactttgacttcttaggttacgccaacttgccgatctgcatggccaagactcctctttcgttctcccacgagccggaacgaaagggagtgcctactggattcaagattcctatccgaaacgtcaagcttgctgccggagccggtttcctctacccgctctgcggagccgtccagactttgcctggattgagcactcgacctggtttcttcgacatcggtttggacgacaacggtgacatccagggtctcttttaaagagaacaaacaaacaaaaaagatcatgaatctctctaattgaaaggttctcttctaattttcttctcatttgttctttatcctcttttctttttgggagtttttcatatagatctcttttctccattcgtaagttcccgtctatctactttcacgagaaacttttcctcaccattcaataatgtcgactaactttgatctctttcgtttaaccctcatgcaggtttattctttgttttcaaattgccttgagcatcaactgcatctattagcatcattctcacacttcaacaagtgatctttccttctcgaaatagaaaaggccgttgtatttctaatacagaaaagataacgctctcctttccgttttcttcgttccttcgtttcccatcttttccatcttttggtttgtttactaattatcaaaatgaactagaattcgcgcgtttgtgggtgtgagtgtgagtgagtgtgtgtgtgtgtgtgtgtgtgtgtgtgtgtaagaaaaagaaagagacagagacagagacaaggcaaaacaaaatggagaaccagaggactaaatcattcattcatcgattgagccttgttctctctctctcctctttgatcggaggaatcaagacatctctgtgtccttctctccagccttcgcttttctcgcgatctctctatccttcctatcctttgctttaagtttagccgagtcgatagcagagttgagactgcctgctttggccaatcctaagagtagttgatgggcgaatgagatatgattatgctttcgaagcttttatcgtcgacaattcaccaagccaaagagaagtagaaagacctcgtcatttagagcataatcgaagagaaagaagaatagagggacaagagggatagaggggacaacttacagaattctcaaaagcccatttcttcctttttgcttcctcctcctcaatcttttccttgacctgaccgatcagatactcttgaccagccttctctgcctctttcaactcttttctcagctcgctcatcgggtccttgacgaccgccaagagtgagaattcgagggcgcccatcgggtaactggagatccgttcttggataacctctcgtgctctccctatccattcctgatcatccttcgtcggtacaggaccgtgtgaccgagggtaagattggagaccgtcgagttcatagagtgtgcctagagaaggaaggtaggagatgaaatgataggcatccgaaggctcggagggaatcgaggaatcgatagaaaacggatcggatctggcaaacgagttgtgaacttctcgaatcttttcagacaaaacggatgcaagcaacacggttcagtatgaagcggatggtttcttggaggggacaggcggtgaactgactttgtccgagttagagatcgtgtatcctagcgtctgtatttcgacgaattcgtcacttttcataccatcaacatcatcgcgcgaacatagagggtaagatttctgacatgaagcagaaaagtacgtacgctggggtccattccgtgtccgaattctttcaagttatctagttcagctcccagctcgattttgtcgtcctctgtctgcccacctagaggaaggttgaacacagagtttaaaatggcgagcgtagcgcacgcgctaatatgttttaaagacagaagaaatcagccctatctgttttaggaatacgagcaagaaaaatagagaataacaatggacaaaataatgaaacgaaacgaaacttgtcgatgacttgatgagcaaagaaacctgggaaatccggatcctagatgcgagcgtcaacgtcggggttaaacatatatagtaattcctgtcagttcactccccaagtagccattggatagataaaactagaaatgtgacctcacgggagaccctgctttcttggactcttcgatacctccaacatactaaggtccgtaaaaacaaaacaaaacagaaagaaccccgatcttgacattagtaacgatgtttagccagccagccaggccttcaccatccttccttctgttcttcagcctcaaggatggcccaaacaagaagatcgaacgaaccttgaagagaaatatgaacgccttgatctctccgacgttcttgagtgcctcatcctccaacgaccagagatcctcgacttggagacctttgactcctagctcagtcaagagtgcggtgaagaccgatggatcgctttgggcaaatgggtgattagcttgagaattcttcttgaaacgattacgaggcagaaaaaatctccacatacgactctgtgagagaccagcctgaattatcctctgccatgatgtatatatgtgtatctgtgcgtgtgcgagttgagagaacagagagagagaggaagttgggaattgagagtaaggcaaggaatacaaagcaagatgagaagacggtgagcgcaattgcgtaagcgtaatcaatccagtgccacaagcgaatggttacggattacgtcagcctcattccaggcttggtcaacccttcccgctataaatttcagtttttttcctctattctctttcttctcttctctccttcaagacagtcattgggtcaggtatgtctctctctttgctatcaatccttcgtccatcctctcccacccaaaaagaaaacgccataacatgttgagcctaaacaccaaaatgatttaatgagcatgatgcccgtgacacggcaaaatgatctgaaacttttacgtctgaatcttcccctactccctatacattccttttggccttggtgccctttattctcatctagtttcgatgaagaatagcttgactgactctgtcttgcgtctttttaacgctttgtttatctggtgggttaattatagtcatgaactttcatgtatgaaaaatagaatggtctcgatgttgcaacacaaatttaagcttacgcttcttgacaaaactgatgaggcgagaattgagagaaaaaaaaagaacagaagcttgtactgctgctctcgggaaagacgttcttgaagagaaagaccgccgtctcagatagttagttattggtagtcgaggacttgttacataaatcaagggattgttttcttcatcttttgtactaccagaatcgataacaatcatgaacagatacatatagcaagtaatgaaaaaagactgtatcgaccatggtgctatcctgacttaaccaagtgcattcctcacgctagcttctgcttggttatttatgcgagagtttaccacagaaccaatccaagtcgaacaattcaacatgcgctgtatccagactctatttccgttcttagttctactctctctctctctcacacccaaccaagcttcacctctgatccttacgaacgatctccaccatctcaacactcccatattctatctcgaaccctgcgctgtactctaccgacgctcacactggattcaagaccggttaagcaacgaaagatgacgtaagcgagacgatcacgaggttggccggcaacacccgccggacgacgtgctcgtgttatatcatgtctcgacctttactcaccctcatcgttcaacccaccaccatcaccatcaccgctactgccactactgccacaatatcgatcagtatgcttaggaaaccttctttgatctcgcctagacagctactggcattgtctggaaagacagtaatccctctggatgcaagttggcacagtaagagaatcttctttcccatctcatccttctcatatttcgatttgctgaacccctcttttgaccttgcagtgcctaattcttccgagaacgccctccagaacttccagaaagagcgaattcctaaagccagattcttcgatcttgacaaagtcgcctccgcccatgatctcggactcgcgcatatgttacccactccagagatctttgccaaagcagctggtgggtgatcgatcattcgccgttcgacaaagaacatttctatcaagagtttacaggtcgatcgtttcctgctgactctttgtttacctcatcgtacttttcctataatcacctcaacagccaatctcgcgatcgagccttcatctcacatcgtcctttacgacactcacggcttgttctcatcttccagagcagccttcacattctgggcgatgggacacccaggagaggttagcatcctcaacggagggctccctggatggaaggcagaaggtttcgaagtggagaccggatctccagcctccttcgctgtgagtgtgtttatgttcggactgtcctgtaataaaggggcctgcttactgaacatgtatcaacacgcttctttccctcaagcctaccgagtatcctacccccaagagtgtcgttgatagagcaacggtcccctacgcagatgtcctttccaactgttcttccaaagtttcgcttgtcctagatgctcgacctagacctcgatggaccggtcaggctccagagccgaggcaaggattggagagcggacacatgccgggtagcgtaagcttgccgtttggagaattggtcaaggatggaaagttgatcgacgatgatgcggtcagtctttctagcataacgtctccattttcctcttctacagtcgagagagattcattctgataccaaatcacgacctctcggacgaaaactgaaacagatcaccaagaagctcagggaaattttgggagaccgagccgatgccgtcctggagggcaagcaagacgtaatcgcttcttgcgggtccggaatgacagccgttagtccttctctttctttccctccatacgcccaactcacatgctttttgttctctcacacacacaaccgacagacgacgatctggttagcgcttcaaaggctcaacatctcttcctcgatctacgacgagagttggacaggctgggcctctcgacctgagactagtccgatcgtcaaaggcgaggagtaagaacacgttctcaggacctcatctacctctttgtatcatttctttgagggttgcatccgagtctttagatgatggtttttattttaagtgttgtgaaatagggccgtggtatggacgaaaagggtgggagggatcattcctttggtattgcacttttaaatagacacttgatcgattgagtcgtattcgaccatgttttccttgataaacctctgctcgttatatccttatcttctttctactttcctctctttgcctccaaagggtgatatcatgaaaaccaaggaaaagacgcgccagatagggaaaaaagtgaagcatgaaagcgcaaattcttatcgttatgatacacattctcgttattcatgtcgaaacaagccatgatcactctgctttctcaccctcgccgacctcgctctcaccagcctcgcccttgcccttgcccttaccagagctctctctccgcaagccaccgacaatggaagggggtttgtccccggatcgaggcgcgtcgatgttctcctcagatcttttatcatgctcactcaatcttcttcccaagaccaagctttcaggtgttcccatcaaagactgagactcaagtctgacctgggattggggttcggtcagtggttgatttgacgatcgaggacggtctgatggggttcctttctcatccgatgagcgatcgtccgtcgacccggtctttccgttcgacgcgtaggtcgacgttgaggttggcgcatagtccagattgggatcagagtcgaggagagaaagatgactggtatgtctagaaggtgtagccgaacctacgtagtccgatgcagatccaacggagctcgaggtacgatgcgcgagagtcaacccatggatcgtgctcgaatttgaacgcaatgaatccaccggggagaacactaaccttcctggtgccgtcgttgtggttatcgttgtcgttgtcgttgtagttgtgtcgtgattgtcgtcgttgttatcatcaatatggctcttgctaaagtgagggtcccggtctaggatggcttggcgggcgtttcggatggttaaagtggccgctttgggagagatggccgatgagcttcctgatggaccataaggacgggcggacgagatcgaagaagacgacgaggttgatatcggacgtggcgatggatggttcggacgggatcgaagaggggaaggaccggcaccagcgccgtccttgcctttgctacctatccaacctcttctcttcccaccttcctcatcccctggagatcccctcatgcctaaaccggttacacccgcctgtttaacaggtgtcgacaacgttgtatacgtcgtagcagcatgcggacctccaacgggcaccacaccaccatcacctccgccaccagcggcggcaggacgtgaacctccgggaagggtttgagatctggaggcttggccgaccgcccggaggaggctctcgaggctttctcggagtccatgggtgtcttccgaatgtgaagtcgcaagcgtaggctctgtcaccgtttcaggaccagccacgatcgccgggtcggcttgggtcatcagctgattaaatccaaacgccaataagggaaagaaagaaggtgatagacaacagacttctttcttagcattcaccctatttcaagacaggtaagagaaagaacaagttgaagaaaacaggtgcgcacgatgagagccatctgttgcaacctcgccaactgttgttgactaggaggcgacctcttcccgacttcctccggggaaaccaacagtttcaccgtcctcggaaccaacgctcgcaagatggagagtaagaacaacgtgaggagatgttgtctgacgtcgatcggttgtgtttcaaacgctttcgatgatgaaccagctgacaaaccggaagacatcgtcggcagggaagaggcgtagaacgagccgttcctcaacacag

SEQ ID NO: 2882 - DNA, 7426 bp, Xanthophyllomyces dendrorhous
gaagaaagaccagggccgaaatttgcagaaccggcaccaacggcgccgatagcagagccgatggaggcagcaggtcgtttcgatcgagaattatcactcgtgatacgaggacgggcagagtgggcgttgaggatgagtggatcagaacctagtgggaggaagattccttcgaccaagggaacgatagcactccagaaaaacacccagagctcaaccaatcgacctatcaacttgccgtccgtcacgccttgtagtttctgtatcaacgcacaattcaaccgagttcagcttaccggatattcgttatgcctcttctcgtaatggaaggaaagtgtgtagtccatcactcacagcttgtagcgtcagcattccgcttcccaagatatccttcaaatcagtgattagagaagggatcgctctggaagggtaccgagtgaacgtagattgaatatgattcttgaccagcgaatttagtgactctaacgacgtgctcagaggcgatccgttaaacaaaggcaaaacatgcaagaacaagctcgacagagcggaagtagctggatagagcgcatcgcgtcgttcgcacgaacgtcgtccgatcagtaaacgaccatcttttcgaaaccttggtaagacagaaaggaaaatgccaagaacgaacgatgagatggatgaggatacggctgttctctcccgacactcggatctggcgtcggatgtggatttccgaaactaggcgctgaaggcaagatgggtggtctttcaaacgagttgaatatcgtctttgcatcatacggcaacaacgctgccttgcttatgccatgtgcatggtgatggtggtaactactactgccgttgttgttgttgttgttgttgttgtatgtatgggttgaagaggaaaggacggaaggtgtgatcgatcttttatgagacaacgtagggttcggagattctgggggctctcttcgagtgaatgagtttgttgattgaagaagaggtgaagacggtctggcatgagatcgtattgatgtcggtgatcctggcatggatccagatattggcaccggctgttgttgctgctgttgttgttgttgtggtggaggctggaaccaattcctaatggcattggaagaggctgaagcacccgtctttgaagcaccctcaaccggacctcctgctcctatccctcctgttgttgtcgctgttgctgctcctgctgctccagtaccattcccactcaacgaagcgaatgatctctccctcgccagcttcttcagcccgttcggatcaacagccactccaacccgtccgctgtcaagactgcctctgcctataggtggttccgaagggatgagagatcgagctggtccagatgggcgacgttgatctatcagcgtcgtcagtggtggggagtctggtcgggaaagtgagtttgaccgaggccgactgggtattgatgatgcaggaagaggaggaattttgaagattgttgaatgaaggagagaagaagaaggagaagagacgtgtccaagagaagggctgagtctgcaggtagagctagcctgcttgttgcaagatggcaatggtgaaggattcaattcggtccggttgagacgatggtccgcgaagaatgttttctcttggctgctcacatcacgaaaggagacgacaagtcattttgtttgttcttttcattcgctttctcttcggtctcttttgacatctccgtttcctcagacggttctacaaagatttggaaacgccatggtagtctgagcgcacatgcacgtaagaacaaggagcgaaacaaaacaagaaaggtggaagagacgaaagcagaagaggtggggagaaattcgaaggaatagatatataaagaaacaaaaagaaaagaaaagatattacacgacatacgacatacgatggacacagacacacacatacgacgctagctatcggaagggaaacagtcaagaagaattaggtgtatatacgagagctcacaagaaaaaaaaagcagaagagaagaagacgagaaggaagaaacccggcacaagtagaccaagaagaaggaaagaaggaaagaaacaaatatagatcaaaatataaaattagggaaacatgacaagagatatatttacaaccgaggcaagccccatcatacgtctacacacgcacatgcacatgcacacacatatacactcaatcaaccaaccaacccaccaaacggcaaaagctgtcctccgacttttctcactcctgtcagaacaatcggcaagaacgagaaaaagtagtagcaaggcacgacgacgagaagggaaagccagaaccagatcattcggtcctgcttgaccttccgcctcgaagcagttcgatgaccgtacgccttgatatgatcggcaggtgaggccgctttgagctcataaccaacctggtggcgagaagacagcgtcgacgtcgaaggaccagccaactgggtcgtactcgcgctcgaggacttcacatccttgacgtcgatcaaggccgaaccctcctccgaagattgatacgccggcgggggtgccgaacctgaagacatttcctttagccaggctgagatcgcgtagggcagccaagggtaggcagcagtgtagtgatcccatgcgtgctgctgatcgcccgtcgaagacaccgctttctcatcgatctttcctcgaccagcggtcttttcccgtccacggagtgcaggaaaatgggcgggtagaggcgaagccgggaagaagtttgcagggaaggccaatgtcgacgaaaggtccgccaggtgagcgaccgaaggtagatgagggaatttttgttgaggcaggttcaagtttgccaggttcggcaggttcgggaactttcgtttcacccaagattccataaacggcatccttgacggtggccgagttttagctatcgatggatcgaccccagtcgagtcggcagtttcctgttcgtctccagttaatccgtcagaatctgggaaagtgtcggctgcgactgccgatgctgctactttatccgaactgagggcggcaagctcctggtgatggcggtgttggtgccgatgaacaaagtcaccatcgtctgaactgtcgtttccggtagaagggttatcatcatccagatgtcccgactcatattctccttcgtcatccgatccatcgaccgaggacggatgatctcgatcggccaactgttgtctgctcgctctcgttagcaaatcgacgacatcgatctgatctcgctccctggcaatgtctaccggccgtttaccctccgcagtgacaatctccatatcagcgcctgcctcgatcaacaacctggaacaggcgatccgagcggacaacgcgcctagggccagaggggtatacccgttcttgtcccggacgtccaaatcagatccaagggcgatgagtctggcgacaagcctgtggaaaccaaggaggacggccaaatgaagaagtgagtgtccgtgtctgtttcggagagagatcgagttggcattatcggcattgtcgatctccggagacaagtcgagatcgatcaggtcaaggaatttgagaacagtatcttgaaagttgcctcctccaacggcattcgccgctgcttcccaacgggatgtgatgttctccgatgtagacgcatctcgagcctgctgagttgttattgaggagccagcatgttgctgaccgttgctgctgccggcgttgtgagattgagagggttcgctaccagccgagggggcctgtccgacgatccgcagggcaacgttcttggcatcttcgattcgacctgtcatcttgagtcccacgacctgaagagccagctccattcttttcgataaaaatgacaccgaacaaagtgaagatgtaaaaaaaagaaaaaaaagagtcagcccaaagagcgtcgcggcgataaggttgaaagtcgaaagaaaaagaaaacttacaaagcccgatcagaggtatccaaataagtaaacaactgaagactcatttgactgccccgttcgtcaacttcattctcggactcctttctgaatctgacgacgaccggccctggggccgcactcggcggtaacagacagaccatggccgattctccccagagagttgtcttggaggaagcggtatctccaaacatgcaggtcagaccgtgtacaaagtttgcgcctagaatagtcacctcaattcctccgtgcatcggaccctcgcctggtatgagccgggtgatcatcggtgccggcggaggcggtggtgacaattgaggaagcaaagatgccgagtatggttgaccaagtgatatattcgattcaggtaattgcatttgcatttgctgctgctgctgctgttgttgttgttgttgctgttgcaaagggaagatggaagaagtcccggcagcagaagacgaggacgaaccgatatctggccagaacgggttgggaatcaacgtgttcagtcgactatgatcggacacagagcctgacgatccagaatcgtcaagctcgatcggaccggtgtagagtgtcggcgagggcagatcgattggctgtgcgggtacaatcgacgatcctggtggtgagagtggcaaggtaaacattgattcgaacgacaactgctcctcctctgtcggcgtcgaccacccagcgaccggctcggcgttcaatccaagaccaccattagccgccagaggaggggcgaccggaccatcatagtcaactagcgagtcaaacgcgacttcgaccgacatatcgtggatgccatcctgtccatcgtccggtttgaccgaatggagggaggaagtgtaccgatcaaactcatcttcgacgttcatcggatctacctctaaacggccgacctcagcctgccgaaccatggcgccgacgagctctcctggatcgagcgggacagattctccgaacatcgacaccggcggggtcgtctctgaagacgaagcctcggccgtgcttgtcccggagaaagtctggttgtctgaatggatgtttccgatcctcaggtctcctaatccagagacgtcgacaggcgagtgagcggttgacgatgacagcgtgccgggcctgccgatcggggtcatcaagagttgttggctcgtcgtggttcgcggggtgccataaacggagctcccggccgaagaaggagaaggtcgtctgtcgtacggcgtggccgactttctccggtgatgatgctgatggtgatgaccgatcgactgaaggtcatcttcgtctccatcgacagaggtcgaggccgagatagaatctcgcttgttgggcttcgacggccgacgaacacccctgatcgacgcgttagacgttgggttcgaaggcatgatcatcgcttttggcattctgttcgtccggctcgcgaccggctcggcgttcgaggtggctccaggagttgaagctgctgccgctgccgctttggcggctgctatcgacgaggacgtcgccttgtgatcgtcggtgatcatgattgggggtgttaaaccagaggcaacaatctcattcaagtggtttttgaggatgaatttgatgctgtaaagaaaaaaaatcaaagagacaaagatggatatgattagccaatgatcctcccctgtctctcgtaagaagcaaactctactcacacaaacccaaccttttctcggtgatgtctacaataacaggtgactctggccggcaattgagtttctccttgggaaaagtccaagagagaggcacagttgaagagaacgatcttttgtcgttcgtcctgaccgttcgtcccgtttggggatctgttggcgggcgtggtcgaggtggagtctagctcagagtctgagagtgtcggccgaactctggcagccaattttcgttgtgatcgtttgacctgatgttccaaacaaataaacccggtcagcgtctaggggtaagaaggagaaggcaaggtgaggttgaaggggcaaaaactgaagagaacgcacctctcgagctcgacaattttgacaggcaaacactcggagacctagaccttttccgtttggactcccgctatcggctccctctgtagcacaatacacctcggtatggagatggaggacttgttcttcccttggatcgacatcccgcatcccttctgcatccttcttggaccgtcgcttggtggccacacccttttggagtttaagatgggtgtacgttgagagaaagccgagggtcgcttggttcgctggtgtgctggtcgtttgcggaccggagagtgggaaggatactgagatgttgagcttcacttgtgtctctactctggattttgctccggacagagggattccagaaatctggagtggcaggtttcttgctccgtttggaccgacgtcgacaagggttcgtcttgtttccgggtcgatccggatgctgggtagactcttagcggtcggggtggtgaacagaccagacgagccctgttggggcacgttctgccgggcaaatgacgagacctggcctgggatctgagtcgaggcggaaagagcggtctgtgaggatgtagggaatgaggacgcatgtggttgtctggattgataaggagaaagagggaggcaaggagggagaggaaaggaatgagaaaaaaaaaagggaatttgcatcccccaaccaaattgaagatgagtatatgcaagccatcagattagcggagatatcgatatctctctcgccctcgccctgtgcatatgcattgttatctcttcctctcttttgccgagttccatccatcgtttggtcttcgtgacgaaggaagcaaagaagagagaagcacagagaaagaggaaagacaggcaaagacaaaagcaagggcgaagaaaagaaagcgaaagagagagagaaagaagaggacaagatactaacctgttggttggaccgagtgaaaagtctggactgacagcgttctctctgaggattcgatcttcttcatccgagccggactctctcttgacgagtcctcctacggcggcgaccgacttttcgagtgcttgctttcctgcttggatgccactgacgagtgaaaaggcggcgtaatcatatccgggcggaccaagacgttcatccatgtttgaggagctcgaagaagcctgagaggcaggcgagtttgggttcgcttctgaatctgacgaggaggaaagcatcaagcagtgggttgactttggtgatttcaaagggagggcggagagaggggatgggagtatcccacttgactgtaaagaaacaaagttgtctttcaagagtcccaaagaaaagaagagggatagggaaaaacgaagaaagaaagtggtccaagtggaagttgacggtgtgtccttaggttgggggaacgccagaaggttgtgtatggaaagaaggtctgtgcgttcttgcattggg

SEQ ID NO: 2883 - DNA, 4794 bp, Xanthophyllomyces dendrorhous
tactcgagtgcgcagtaacccggggggggggggttcgcatgtcataggtttttttctaatattctttctccttttgtaatcactgtattgtaaactgtattctagaactgtattgtctctgacaagtctcccttggatgtcgaatccgacccgaacgaagaccggagacgagggaaattaattcctttccggatcatcaccttggattatctcaccttctgttttaccccaacagagaagaagaagagaaagaaagtgtggaaatagcagaacccatattccgacacctcttttttcttctagaacatctttcactctttctttgtctttgtctctggctgtcaagtcatttgacgtcgcaacctaggcagaaaggagtattactaaattacacgaatcacgcatacgcacacatcgccacccacacccagatatataaacacacatacatacactagatgcaacaaaacttgctggataacgcgaacccgatcgttcacgccgcttctggggcgttcccaggaagctcaaagaggaacttgaagaaccgaacggtccgatctctttggacggaagaagcgggggagtccttcaagtcggctgctattgatgacaaagagagtgaagaggagaccgagaatacagaggaggaagaagttgaggacatcgatgaggaagaagtctttggttcgttctttccatcattttcacttgttctatttctatttctatttctgaaacgaccatgcccgggctgactctcaggtttatcggttcaatagatttgctgagatcgatcaccgatccagaacatccacttactttggaacaactggccgttgtctcgaattcacaaatcacattgtcgaagaaccatgtgctcgtcgagtttacgcctacgattcctcattgctcgatggccactctcattggttcgtctagtatctcgtttgcggctgtgtctttgattgcgtctgtgtctgtgtttgaagctgatggcgtgttgatcggatgaaacaaaaacatacacacacgacacacacaatcgttcaaacccgtacaaaataaaatcaggcctctctcttcgagttcgattactgcgatcgttacccgaacgttacaaggtggacatccgggtgaaagaaggaagccatcaatcggaagtagctgtcaacaagcagttgaacgacaaggaacgagtggccgccgctttagaaaactctcatcttttaggcgtcgtcgagggttgtctcagtaccgccggaaggagagggaaggaggtcgtgaccgtttgaaagagggcccaagtaagaattgagagggtctgtgtatttgtaagcatgggataagaatatatataaagagaaaacggactagacttttctctatgctctatctatctgtagtctgtacgggtttcgtttagcgattattcaatgtgaaaagcttcatacgataaggagaagagcgaaattgcgaacataagggcgagaggaggaggacatggttagacagagagaagcaaggagggagtgtgtgtgaacgtgaatgtgaatgtgaatgtgaatgtgaatgggagagggaaagaacaaggcacaaagagcgagagcgcatggaagagatagagaacagtttgctatggaaggaaaaaaagaagaaagacacacacagacatagagtgacgcaacggagcgatgtggtcggcaagtatcatacagcatgacatagcactaacacaacatgagtaaaatatgaccacaacctttctactacgcggcctctgatacatcagactgacacagcagtgtcgtaatacaaacacacccaggcaaataaacaacgcatacatataaagagctcgacatattctgccctgacgtctctggggtggccgccggagagatggatgagttacgcgtgattgattcgtcactttccaacagcacagcatcgtgtgtaaccctagatcgaccaatcagataaataaggccggctgctgcgcctccgaacacgccggccttgtggatttcaatttatttttatttccttattttcttattttttttcttctcttcctctgctcattaaccgacgaggtagacctcagacccaatcctcaaaaggcaacacactcgttcattctcgtataccaaacacacatacacacacccgttcattacactcactcacactctttgtaggacaaaggaaaaaaaaacagacggaaaaaaaggagaatttataacacaaagatcgatcgtaagagttgtaatccttcttgaacgttccctcaagctctcgtgcttctcttcttccgccaccatccggccggctttgttttctcttttggtctcctccccggaaaattccaatcgaaccacttttcttctgcctcacctttagccactttcatccgttcttctctatccaatatcataccggcctcgacctcgttgattcagcctcacactctttcattcaacgccaccactctgcctctctgtttgtcgttgacaatatatcctggacgttcgctctcttttgataaaaacacccagactcaccttcaagctccctccgacacagccctggctttactaggtgagcgtttttctttggtcatcaaccgtttgtcgtactacatcatgcccatacacacatccatccgagtatatactatataggctgaataaaagaaaatcgaaagctcattcttttctttctctcatctttgtaccagtgctcttcgtcccttcgtcccttcgtcccttcgtcccttttcctttcagccaccgatggaatatattctagacgcagcagacgactacttgtttgacaaggcgtactctgcccttctcccggcttcgcgcttcgtgccttctcttctccagtcggccaaccacacagtggcttcggtaccgacttctccctgggtgtcccagctgttgtcgtatttcccccacccaccactcacctcgtccacagcggccgagctcgcctcggcctccatctggcctagagactacatcctccggcagacgctctcactctccatcatgaccatggtcggcatccatctgatgtacttgaccgttgcggccgcatcttactactttatcttcaaccgagagatggagaaccatcccaggttcctcgatggccaggtcggtaaagagatcagatgctccctcaaggcgttccccgcgttgaccgcgatgaccgtcccttggttcgtcggcgaggtcagaggtcacggaaggtattacgaccggatagatgactacggttggggatacgctcttgcgtctattccaatgttcttgctcttcactgattactgtatctactggtgagctctgtcccaggtttcttgttcccgctctcccattcgttggcttatcccctggaccatctttctctctagggttcaccgactggagcaccacccatctatctacaagcacctccacaagcttcatcacaaatggatcagtatgtttctcctcttctttttctttcttcatgctcggtcttccctgcagggcccaatctgatcatcagttgctcggttcattacagttcccactccattcgcctcccacgcgttccacccggttgacgggtatctccaatctcttccttaccatatctttcccatgatcttccctcttcacaagaaacgtaagcctttgtttctgtcttccgcttcagccagacgctttctctgtattcgtgactgatcgtcgtgtgaaaaaatactctacagtctttttgattttgttctcgtttgtcaacctctggagcattctcgttcgtcttcccactttcgtagcgtcatcatcagcacgtcgttgtgtgctcacctagaatgtgtatggtatattgtgtttcctctcttcctcttggccttccttagattcacgattcggatatgatcaccggtcacccactagaaaagatcattaacggaccggcccatcacaccttgcaccacttgtatttcaccgtcaattacggacaggtttgttctccccttttcttcgtcctggatggctcttgctgacgtatgcacatcctctcctctacctgtgtgccttgtgctccagtacttcacttgggccgacaggacacatctgtcttacagacagccggacgcgtcgttggatccgatgctacaggtaaagatgcagcagaagaaggaatataaaaagtctcagtaaatgaaaacaaccaaaacggataccgatttctttctcttcctcctctggtgctccttccttgctgttttttttctgtgttttttctttctctttcattctctcgctctcggtttcctttgggtctgttccttgctgctttcttttcgttcatctctttctacttgtgtgtttcttgatcacctttgttctcctataatgataaccccaacccaccccatctttgtgcgcgttccttgtctgctgctctctcgctaaatcccatcaccacctcgtttcctcatccgccccggcaattacttcttctttgtttttaccgtttcccaacatctaatctagaagctcaaaaaagagaaacaacgtctagcatacaagctggactggctgtcccgtatctttgtctcgtgtttcttttcttcctcctttcccattgtctcttttcttgcttgccaatcgtattgatgtccatctatggttatatatcttgtctctccttttctttcccacaacgagtaccacacgcttagggagacgaatagagacgttcgatacacagtctaagggaatgagatggcga

SEQ ID NO: 2884 - DNA, 48626 bp, Xanthophyllomyces dendrorhous
  misc_feature (10672)..(10681): n is a, c, g, or t
cctttaattattcgaatttcctttttcttttcttttacctttctacctcttactgtttctctcctctctctttccttctgctttccgctctcttcagcccttctctcttctctcttttgtagtttccgtctcgaatcaattcggcccggtttggtttgattcgtaccgatcataatcttggcttggagccgcaaaactaaggacggaggtaacaccgagttaggtccgaatttaccaactctaccgagccgagccgaggaggaggagcggaaggaccagattgggcatcaaacgctaagcccaagaccggaattcagacctgcaccaagcagaaaagccgatctttgattcaaataccaacataactggtagagtatcgggcgaccgtaaggaaggaaagtccagaaaacgaaaaaaaggaagagaaaagaaagatgtcgactctgcagccgcctatcaggttgaactcgaatccgagtacgatttcgatttcgactttgggttcgggttcgaggtcgggcgtaccgtccaacgcaaagttcaagagtgagctcacctattgcttctgattgcttttctcctcgctctctctcttctttctatcgtctgtgtgtttctctgctctcgtgtatatgtgttgcgtccacctatcctggtctggcgagtttaaaagtcttgacggggttcgccaagtgggtgatgtaccgctgttgtgatcatgtggtggtcgtgttggattctggactctcttcgtcaacgtctctcaggaaagaaccactcgtgttgcccttgaggttttaaccggatagagattcgatgattgaggcttgaacctaggaaaacgagactgactcatccttcccttcgttttcttgcctctttctcttgtcttctctttttcgctgccttgccattgtcactgacgtcgccatcgccattgccttgacgttcgttcgtttccactttccttttggatcctggggtgatagccgcaccatgccagaactttgaaaagaacgggtattgtaaatatgaggatagatgcatatttcttcatcccggtatgtctccccctcttcctttttctctatcctcttctttccgtcccttctttccagtctggtcctttttctctttttcctcgttctattcttttgcatcttggctttgtcttgtatctgacgaggttaatcgggctggacgaacagatccgactatgccaacgccgatctcgatgccgatgttgatgtccatgtcttcagctgcgactgcttcaatatggtatgacccagacactgatcctgtatgtatcttctcgaccttctttccccttgttattattctcccttgaaacactccatgtcttctgcacccacgcgctcatcacttgccacgcatcaaatctctagttcaaccctacaaacgacccggtctctcctgtatacccacttcctccaggtcgatcccgaaacgatgggtccccgccttctcctgtaggttctcctatcgggcgcgatcattctaacggacatgggcatggaaacggacacggaaatggccatgcaaacgggagcgcaaaccaccacaagagcgggaacgcacatattaatgggaacggagcaccgaccaacggatcctcgggcttcaacagatcagcctctaagcaccgtccgttcttttacggaccgtcagactatccccagctccctctatccaacggcagcaacagtggtagccatgtcaacaacaacaatctcaataataataataataataataacagtaatggccatcattcaaagagaggaggatcatcgtcgtcaaccaagcgcgatggcttgcagggtcacggtaatggtaatgggaggcttggcgaacaaggtttcgtggaagctggttcgacagctgcacacgaccaggatcgatccgcttacaggagtaagctttgtggattctttgctactggtttttgtcctaacgggaatcgatgcacctagtaagttcttcctctgatttcgacgtattcaataccacttctcgtcgaagaaaacttgtgttagatattgacggtgggtgactgtgtgttgttgccatctagcttccacccggatcaccctttgacggctgctctgggcaaaaccgtgtcgtcgacttccacctcctcttctggtcactcatcctcctctccttccatcgtcaccagcaccgtgacgacaagcaataagggacctatccgatcttactctaaccaatcggcgcacacggacttgtcggcttcatcccgattctcatcttcgatatccaacggatctcctattgactctcaccatcaaacctaccctcactctcacgcccggacccaggctcaagcccatgaacgacagaggatggacgatctcgattcgttggacgaatatgagtatgctttcgattacagtcttacaggactcgggccagaagatttagatcttccgttggacggaccgttcgatcagagctatccaattcaggccggagtcgagtacgggagggacggtcatcctcttcacaagagtttgtctctttctcttcttcagcagatgccccatcttagagtcctttctttctattattgttagtggatattgatcgggtttcgcttggcaattcggtttatagcccgaccatgtaggtactactctcagccgagcggatgcagcaaaggcgacagatgttcgttcagacacaccgaagaagcagccgctctagctaaatcgggtcatgtctcgcttactgcgaaagacagacgaatggctaaggaagctgctttggaggagaaacaccgactttggaggagtacgttactttcttgttttcctactttcgcgttcgtcggcgcctttcatacaatttaacgtcttccttctcgcgatttgaatcctgtctggtctctagccgaaccatgtggtatgtttaccctcttgagataggctttcttctttgtctcttgaattaacgattgattgatgtctggtgtgattagcctatttccaacggggttcctgttctcgtggcgagagtatgtcgtttctctattttctatctcattcatgcataaccttcttccggttaaagatcagaatacaagaactgacaaaccaaccccgacctctcactgaaaacgaactaccagcctgcaactttcttcatgttcggtcgacaacgaatcaaccgttaggtcggaaaccttgtcggatcttgctctccaacgggtattgccggtttggtagtaattgccggtacagacacgatctctcgaacgttgatttcggaggatctttccctgtcgaggtagatgcgaatgaaggaggtggggaagatgatgtgaatccttcgaaagagaggaaggaggatgatgcggaggctggatcggagaaccagcgtcgtacacgacgacaacaacaacagcagcaaacaaagcaaggagaggaggaggaagggttggaggatgaggaggatgaggaggacgaagaagaattagaaatcgttctagttgcggatgatggatccgagggaaaatcatggtctgttgaagaattcgaccaaaaagttagtccgagcgagatcttctctatcacatctttcataccagagagccgttggtcggagatctgacatcccgttcggttctttctctttcccctcgtccattctgttcgtctgtgtgtaggagctcggagacacattcgacttgttgtcgatctagtcatctaaattcacgacagacatcttcatcaagccccgtcttgtcttatttcgggtcaataatcgcttcaattcaaccacatctatccatttgctcgcgactcttctcttcttcttgtccatcttgcattctgaaaacatatgtcctttttgaacagaacagaaataaacaactcttcttcctcatcctatcttttcatcttttcatctcaaaataaataataaaataaataaatacaaaacaaaaaagacccatcaatatatcgtttttttttcttcctacaaaaactaaaaaaaatcaagaacaaaagagttatgtttctccaatcgtttataataacatatcatatatatgcacatatacgtcccatcttctactcccattccgaatattcctactactctcaagtcctgcattcgctcgagaaaacaaatgttcatccagtccaaggtagaggacaaaaaacagaaatgaggatcgataggagaatgattactactcgtctggtatcgtccgccaagaatgtaagtacagctcgcacgctcaccgggccggagaagcggaattcgaacattcgactttgtgattcatccccgttcctccgaacccatctcgtcttcatcccttctcttctcgtttccttcttacccttctttgttgagcaacgataataataataacaacaacaaaacacacaacttgcgtgaaatgtcggacgcggtacagctcattacagatcacatcatagcacagtatgccattcacaggcaggcgcatttgaaggaggaaactattcctcctttgatcgttggacttcaaggtcctcagggttcaggtaagttaccttcctctcttctttcctcctctcccttggttgggactgaaattgcacctctccctcttcatgtacgtacgccatacttgtggaattaaaaggaaagacatacctcacctctcttgtcgatgctcaactcaaaggaaggccagacaaaccaagcgtagtcacgttttcactggatgatctttatctcactcatgccggcctggtggaagtagctcagaaacaccctggaaatcctatcttacaaggtcgaggtcttcctgggacacatgatattggtgagatttctttattatatcgcccttgattcttcatgctcatgctcaatctctgaatcggttggattggacccttgctcgaacactgtagaactcgctcaacagatctttacctcccttctttcttccggtagaccgtcccggcctgaacttcctacacctcagaacatgactttgcttcctcggttcctcaaatcgcttcaatcaggccaaggtgatcgattgcctcctcaacaaagtacacttgtccaagcgcctgtcgatatcgttttgttcgaaggttggtgtctcggcttccgacccttaggccctcaaggactagatgaggcattcgcaagtagcgttcaagggaggttcagagatgtaggaaaagacaatctaggggctgtcgagacagaattgggacgtatggtagacgggctatggggcgttttgaattgtttcgtacaggtaacgagatgtctcttgtacttgtgtctcctcagcctgtcggtcgatgtgtcgactcttagggatttgtgtgctgatcgtttctcttctcgttttcggttttcaactcttggcttgacctccagctgagcgctccgtcactagagacaatctatacatggcgtcaagtgagtctcttttgttttcggttacgttttttcctctcccttcgatccactctagacatatcgctcatctttcctttctttcgtagcaacaagaagttgaccttcaatctcgctccgccgaccgggtaatgagcccagaagaagtcatccgttttgtagatcggtatatgccagcgtacgagctttggtcggctggcgttcgagccaatggtacgacttgggccggcaaaggcttgggaattgttcttggtcagcagagagaggtcgtaggtatcgatacattttgagcctgctgatttcgagatgaatgtactcgagcggacgctcgtagatagttggacttcactttgcttacacaacgagcttttgtatggtatgatgagtagagagatagatagatcgatcgatcgttatgtcgttctatcatcagtcaggttcagatctgccggttagtatgaagatcagtcgcaggaagtcaagatccaaaacaagacgacgtcgcaagactgggagaaagatctaaggaccgaaaaagaaaaagaacgagaatggaccaccttgggtcaaaagtctcatagaagttgatcgtgcggcgttgggccaagcatagagagaaatggatctcatgagggcgaagacgacggaatgaggaaagccagccatggctgatgaggtccgtcaatctctcccatctgattctcgtttcggacagctattctgatccttctctcgttagtacacacacacgccgaatacctttgcctttcttttctgttctctgttcggtttgggaaaagaaagctcgaacgagggggattgtgaaagaagcatgaacctaaataaaacacaaccggactatccttctcctctctctttctccatcaccccttcttcctgttcctccttagtcacgaccaaaagaacctgatataagtcgaattctgtttaagccttgacagcagcctccaaaacagtcaacacatcgacctcgacctgagcctcggccttagcgtactccgaggtagtagacgacaaggtctgcttggcagcggcaagggaagacttgacggcctggagatggaaataatcgagtgaaagatggatgccgagagagtaggttcagcgagtgtgtcggtcggaagtgacaagaaagggtgaacaaagatagaaaatccgagtgatgtgagatggatgggtattggtcgaaattcaggtcggaaaaaaacaaaagatggaataacattcgagagcgaaggaatgacagaacaagtcaatctcgaagcctcatgaaagccgttcacagctcatgataatgtaaaatggaaagaaaacgaacggaagcatcaaaatcggcaatgtcgtaagcctcaacagcgttgatggtaagctcgttgttggggtgaacggaggcgaacccagaggagactgttcgcgacaaagcaaaaggagaaccaatcggtcaggatttacatcagaaacaaatctctatatgattgaagcaaatatcatccaaaacggaaggaaagaaaaagcttgataggaatagctgaatgccttctccagcttttttcttccctccgctttcgtgattgcatcgttcatacttgatcgagcggagacgcaagcatcgaacgtgataggatggaaaacacagaatgtacgtactgaaccacttcttggagccgttagcaccctcaatgacctcgaccaatccgggagtaagagcctcaagggtagggacgtgtccggaaaggatgcccatgttacccgacgaggcggggatgttgacctgggtgacctcggaggaggagaacaaggtcttggaagagaaagcgattagaagaggtataccaaggagagtggtgaacacaaaagaaatagatttcagcatgagaacaacgatcggaatagaaacagactgatggcggagcgaatgtagctgccataattgaactcgtgtagatggatgtatagatctggcttttttaaaaaaaagaaagagaagaaaagaagagaaaaatctctctagaactaacctggtggggaaggaccaaagagagcttgagcttgctagcggtggcaggagcagcctcagcgtaagatcgcttgaggaggggaagagcagctcgggtgacgggtcgaagggcgaacatgataatggatgggatggagtgagtgtggatggaagagagaagggaaaaagtaggagaaaaaaaaagagcgtaggacggagaatgattagagtaaagtgattagagaattttgtagttcgactaggaaaaaaagatactatgaattgtatagtcaagactgtaatgacatttgccaagtttgtagtatccccaaacttgtagtcttttcgtagtcattctcacagattttgtagtcattctgtagtcgttttgaagtacatttgtagtacatttgtagcatatttgtaatctatcttgtagtatttttcgtagtcttcgaaagaatcaccacaaactcatcatccatccactcattcatccaccgctctcccatggtaccatggatccgacatacaactgccaaagctgccgtcaagttagtttggtagcctgttgagcttgaagtttctctatactgaaaccatacgttctgttcgtcacccatctagcctctgcagctcgactcatccatatccaatatccaacagtcccagttcgagctcatctcaggtacgtttcactcatctgacacaagattctgtcaagatctcaacccttatttgttgcaatctggtctcccttgatacatccgtcctcagcttctctgcccgctcagtcgactcctccttcgtcacaactctccctccaggaccgaatcgccaaactaaatgccccagatctgtccaagaaggcttatctccagacggtgtcaactaccgatacctcatcctccaatcaacctctttcatcgtcatcgtctcgtcaacctaaaggcccagccgaatcgttcatcgttctcaatggcaacgcatcctttccaccagagttatctccctcggtccctgctccgagtgtaacaaaaccctctggaaaccgacaaccagtcaacaatcctgcagaaaaaccgacgaaacaggctctgatcaccaccttactagaattggtgtcgtctagagcagacaccgatcatccagtgtgtacggaatgtgcaagactccttcaagaagttctcgctcagcgtctagaagaggtcggattcgaacgagacaattatattgctttcgaaaggcaggtcaaagagaaacaaacgggcgtaggcagaaagaccaaggatgaagttgacgcgctcaggagagagcttgatgaggctagttctcgtctacatcggcttgaaacttcctggcatatattcgtagatgctgctgacacattgatacactggcatatctgatagatcacagcggaggagaacgaagcgcacgcgacgcttctcgctctcgaagctgagactcaagctttacaaacagacctatcgaccctgcaggccagatcggccgcgctcttgtctcaggaactcgagttccatggctcccatgcagcacttgccgacgaaaaggatcacctggtatcagtcgccactctggtccaatctcagtatgcttcggatctgaaacatctgcagagactcgaggcgaccaatgtgtacagtgatgtctttagtatcagcgtcgtcaaaggagaagccggaagtcggatcggtagtatcaacggactgagattaggcaaaggcggaggtcccacaccggtgcgtacactctcacgactgttcgaagcatttggatagaaaatcattctgatttagttctgaaacttgactccaaacaggtcgattggccagaaatcaatgctgcatggggactagcattgttttgtctacatagcttggccaggaaagcaaactttcaattccaaacgtatgacatcctcgcgactttctatccaccaaatcaacccatcagtgaacttggctgacccattcatctgatgaacgcaggtaccgactcgtgccattggggtcaacatcaagaatcgaagagttggacggcaagaacgtttacgaattgtaagtcataagtttctagcttgccttgccctctggtaagattgctgtgcttacgaattgatatttcctcatctcttcctggtgtatatcatgctctcggtcctcgaagatatggctcttccgatctagcgctctcccgttttcttcagaacaggagatacgaaaacggcatggtggctttcctcgattgtctccggcagttcttagaattcgctcggaaacgagactctgagcgtgagaccgttcgctggggacaggaaaagtcatgggactttggtcgttatcagtttgtccaatttaatcctgctttctctgccttcgttcttcctacttggctccaagaaagcatagactgacgattgtcgtcttctctttttgcagcatcgtcaaggaaaagattggagagccgtcacgagaagtctcgattcgatctggctacgttccgtcttcgctatctgtactcagcccaggactaggggatgatagttggacgagggcttgtcggtatacgcttttgacgcttcatcgtttgatcggatggacaacgagagatggtgcttagagcaatgagtccttcatactttcctgatttaaagaaggaaagtggtcttttctctcctctttttctgcttgttgtaagggtccttttatggaccatgtaccatctagactatcaatgtatcaccacagatactatttgctgttacaaaagaatacacaacgagacacctcgatgagggaaaggcgtttgtttgccctttcgtgtagcaccgcttctgaacccttcgaagcacgtgtctcaacatcatctcggtcatcatcgcacttaaccttgatgcccaaactggtcttgcattcagaaccttgaaggaaccatacacatcctgattcatcacatcatatctcatcacgagagagtcatggaccagcctgctcttccatattcttcggtggaatcttctttgactggagaggggacaggatctactatcgaggcaccgggacatgccgatcatgttccttctgatgaagaatcacaagaagagtcagaggacgacgacgacgaagaagaaggagaagaagaagaagaagaagnnnnnnnnnnaagaagaagaagaagatagagatgaagtcgaggagaaagaaaaagaggagaacgatgatgatagtgattcgaacctatcagcccgagatgaagctgagcgatcggaccagaaggctgaacagaccatcgacgtgactgaagaagagagcagtgaggaagacgaagattatgaggatgaagaggatgaagagatatctgacgacgaagatgaggaagaggaagaaccgtatgtatactcttacagaactgtttgccgattcttggttcaagatcacaactgacgtacttcgagttatctccggttgcttgttatccacagagtcctcaagtattctaggctggaaccggcagtgtccgagattttggctaaggacaaagcatcggtgatcgcttcttcctcacggattatcgtcagtagctctatttctttttcatgtcatatcaaagacacctcatttacttctgttttcttctggtcgcaaccaaatcctcactgggtgggtttaatcaacgcaggcggtaggaacccatgcaggaatggtccatattctgtcgcccacgacgggccagaagatatcttcttatagggctcatacggctagcgtgatggatatcgtgatctcggacgatggaagtgaattcataggaacgtgtagtatggatggtaggtctagcttcttcttcatatccttcccccgttgtctatggcttgcaattgatcaatcgatcctttaattgcatctcgtatcgatgacacaggcaaagtcgtaatcaattcgctcttaactcctgaaagatacattcaccagtttcctcgtccactccgctcactcgcgctagagccgttcttcgccaaacgaagctccaaagcattcatctgcggtggaatggcaggcacgctatctttcatggaaaaagcatggtccttggtaggtggtttgatgggtggtctaggaggtggagggggtacaggaggaggaaatcacaaggagacaatcttacacgagggtgaaggaccaatttgggcagtcaagtgggcaaatagcggattagttgcttgggccaatgatctggttcgtcgacatggcctccctcttatatccacgttgatgaactatatgcgccagagctatcatacaacccactgatattcatcgtcttctcgatcacagggcgtcaagatctacgacacatcttctgaaaaactcttaacgtacattgatcgaccagcgaactcgcctcgggcagatctttataaaccaactcttcactttgttgaaccggcctcagcaacatctttcgagcccatcatgctcatcatcggctgggccgactatataaagcttgttcgagtccgttctcgaatttcccattctgtcccttcgtccttgtcatcttctggccgaccggctagtatccatagatctgcgttgggaggaagttcaatgccaggcgtgataggtgctcagaaagaaggcttcagcgtggagatcaaatcgatcttccagctggattgccacatctcctcattaattcctttcgagacgtccgaaaaacccacatcatcaggcctctcttttcttgtgttggcatttttaccaccttcggattcaacacgcaaatcatcatcatcgatatcagatgaaaatgacgatgatgatgacgaggataacgcctcaagtccgatgttcagacgggtaccatcgctacgtccggagttgagaatcatctcggggcaaggagaagaactgtcgtcggacgcgttgacattagcgggttacgaacaatggagctgtaacgattattggttggttcccactgttctcgcccctggtagcccaccctcttcgatatccgccggacgatcttcaaatggcgcacaagaaaaggccaccaagaagccagaggttggatatgtcgtactatcaccaaaggatattgtggtggccagaaaaaggggagtaaaggaccatatagcttggctggtggagagaaaacgttaccaggaggcattggaccatgtgggaaagctgactgatgaagagagaggagcgaaggatgaacatggagagattagcgtgagaggcatcggagaaatgttccttagaagcttgatggaaagtggtgagtcttagttgctagtttgtcaaaaaatgttctccttcaagagtactaagctgaccaaacgtttgcgtgatccaatagccgaatacgaaaaggcagcttcattatgtccaagggtattggatcaagacaagaaagcatgggaagattggatctttctgtttgcccaaaaacatcaattgcaggtaagtgttgattgatcagagcacaagctgaaggttttattaattaattatgtgtggtttccaacaacataaggttatcattccttacgttccaacgacgagaccacagctgagtgatatggtgtacgagatgatgtttgcccatatgctcactcatgataagccggtgagtttctttgcgtattaacggacggaccaagattgtacaacgaagaccaaggttactgatgtgctgttcgcgccgaatccaatagtcattattacgtatcatcaaaacttggccttcatcaacttaccgagtgccgaccgtgatagacgccatcgaaggccttttggctgattcatctggagaggctatcttgatggagtgtttagctgagttgtgagtcttcaatccaattctttctcgtgtatctgctctttgtgttttgtgctgataatctcattctctctcgccgggtgtatgaatagatacctgatcaacggccagcctgctaaagcactcccatactttattcgactgcgaaggtcaaacgtctttgatctgattagacagtacgacctgttcgaggcggtgaaagatcaagcgctcttattggtcgagttcgattctgagcttatctcgaagccaaatggtccatacaatgttgatgaaggtggcaggaaaacaaaatcgacaatcgtgtcgagtaaagagaaaggaacggcaaaacatggcaaagctataaaactattggtggatcactgtcattcaatccctgtaagtacactgtggaactccttttgtctgtaggttgtagatcagctgatgaatctgacctccttgttttcttcttctgggtattttttgtccttcctttagatcgcaagagttttcagtcagctctcggaacgaccggagttcctgtacatgtacctcgactcattgtttgagaaggatccatacttggttttggactatggagacgagcatgtgcgttatctctgtcggtgctgatgatcggttgaacgttttcagacggacagtactgatagttgtagaatcggtttgtaactttaacaggtcgaattatgtgccgactatgatgcgccacggcttatggaccttcttcggtcaagtgtagactacagtcttgagaaggtacgtcgtccgtctcttctttattcatgaccatacgctgtacgcgttatccatacgttactgaacaatccgtctttctcgggtgtccgcaacgttgatgaaactttaggcctactatatatgtaaagcaaaagactttgtacctgagatggttttccttttaggccgcatgggtaacaacaaagatgcgttgatgctgattatcgagcgactgaatgatgtccaacgggttggttcacgctcatagttccacgcaaacagtcgtgattactgactttgttctcctaaatgttgcatacaggccattgagtttgcgagagagcagaacgatgaagacttgtgggaggatcttttgcattattctgagaacaaaccaggtgaagctcagtctttcgtgccctttcccttccctcatttgcttggtcagacatctcttctaaacactcttatttctacaaacatctctggaccaaacgctagctttcatccgagttcttttgcagaacgtaggagcagatatagatccgatcatgttgatcagacggatcaagaatgggctagagattcctgggttgaaagacgcgctcatcaaaattctacaggatttccaattacaggtgagctacgcatctcgttgtatacgtttaatctttgctacgtatgttgaggctcatgttctgattgaattcttgctatcagacaaccttactagaaaactgtcagacgattctcaattcggattgcaacgccgttgcggtcaagctttataaagcccggacgagaggacattatcggacgggtacgtgttcatctttgctatagcctaggcgttcgtgaaacctttctcaatctaacctccacttgggcattgggtgatcgatatgtcgaacaacgacctacaaaaagaacttaccactggcccccaatacacgtttgatgggtgatgtttgactgcctggggaatatgaatttgaaatatacatgataccttatctacctattgataatagattaatgactccctacggacggacagtccgaacgatttcctattttctctctcaccttcgctttccttctttctaatcatcacattcacaccaatcgtctcgcaaaagcaatgcaatatctatcgaccagaggaggacaggaaagactttcgttcgaggaggtgaggatttttcacatgcgttccttctctcagttgcttatagaagcatccccagcatcagggtggccatctggagtttaggctgaatgcattccgtgtttcttctttcttcataattcggtgctttttcactggaacaatgcaacctcttcaggccgttttgaccggtcttgctcctaatgtaagccttcgcttgctcttgttccttcttttcttgatctgttcaatgagtctcgactcacccacccgtcaattcatcacagggcggtctttacatcccttcccaaatcccttctcttcctgcagactgggagactagctggcgtggtctttctttctccgaactttctcacaaggttctctctctcttcattcccgagtctgagatcccctctgatgacctcaagaccctcgttgatacttcgtacgggaccttccgacacccagagacgacccctctacaccagatcgcctccaacgaatacattctcgagctcttccacgggccgactttcgcgttcaaagacgtcgccttgcagttcttgggaaacttgtttgagtacttcttgaagaggagaaacgcggccaagaaggagggtgagcagaaggagaagttgaccatcgttggtgctaccagtggagacactggaaggtgagttcatgacatgatcgatatgtatattcgcaagctcgatcggctacatgaattgatgtgtggatttgatttttttttcactgtcgacagtgctgccatctatggagtccgaggaaaggaggatatctccattttcatgctcttccccaagggacgagtatctcccatccaggaggctcagatgacatctgtcttggactctaacgttcactgtatcgccgtcgaaggtactttcgacgactgccaagtaagcgttcttaatacattatcatttatttatccaaaaacaacagtcacgttggattatggctaatggaccgcgtctttctggatgattttcgaatcaggataccgtcaagtctctcttctctgaccccaagttcaactcgacacatcggttgggcgctgtgaattctatcaactgggcccgaattctcgcccagatcgtttactacttccatgcctacctttctcttcctccctcgtctcctcaggtccagtttgtcgttcccactggtaacttcggagatatcctcgccggatactacgctaagcgacttggtctgcccatggccaagttggtggtcgccaccaatgagaatgacattcttgctcgattctggaagaccgggcgatacgagaaggtcgactcggcccctgagaacggagtggccaaatcggaaggaggagtcaaggagaccctctccccggctatggacatcatggtgtcttcgaactttgagcgactactctggtacctagctctggaggctaactacgacaagggagtcgagggagcgtccgctctgttgaagggttggatggatcagcttaagtcgaccggtcgagtcgatgtgggtcaaagtgtgctcgctttggccaagcgagactttgacgctcagagggtttcggatgaacaggtttgttttccaacgaacacgagacttatcagggatacgcgtctttttctctccgatgggaataatattaactcatccgttcgttctctgtcgtgtattctgttctactatagacgactgcaaccatccagcagtactattcgaactccaagccttacgtggctgatccgcacactgctgttggtttgaccgttacccaatctcttcttccctcttcgtacgttctttcctttctttttttttaaacccggcggaatcgaacgtttctttctcatcgcgcttatcactttgaatcccttgttgtttttcttctgattgacaggccggccgatcagatcttcatcactctctcaacggctcaccccgccaagttcctctccgccgttcagcaagctcttccttctctcgatttcgatgctaaggtgatgcccgtcgaactccgggggattgaggacaaggagcgaaggttgatccacgttcacgatggagaagaaggtgtccgacgggtcgtcgagcggttcgcggtcaacggaaaagagatcggagtggaggtcggagagggcgaggccgacttgccggtcgttgctgctgcttaagagtggaccaacgagtccaaagatatagatttttttaaaaaagagtgtaaagaaagagaaaaagtgttgttgcatgaatttctgttctctgaaggattctttacgatgcatgtccccatcaagtccaaacacacacacacacacacacacacacacccctgaacaaggttgaagaggtcaaaatttcattttgtttggagaataatagtacaacaatgtgaagtaagaaaagcaaggtagatagctaggtcacaagtttggagttttcccattcgttcttttcggattaagaggaaaacccagattggaagagagtttgaaggaagaccaatagagtcaaggtgggggtagcatgaagagatatgaagattgagctgattcagaaaaatatgaggatgaaaagactagagaggaaaagaaaaagataagaatgatagagagaagatagggatatagagcgagaattttttcaagttgctttgctcaagacaacatggttgaacagaagtaaatggatatatgtgtctggaaagaggaatggcaggcgatgaaataaaggcgtgcatgatgggcgattagaaaaggagacgaaagagaatgaggtgaaaaggaagaggggaaatatgttgaaaacatagtaaagaaatattaaggatgtggatgataaaaagggaccagccttcaatgagaggaagaaagggaaggtgttcggcctgctgcataacctcccaacttgagaaaacgttgtgaggagagagagaaggtcagatgagaagcaaagaccttggacaagtatttctaagcctcgatcgcgccttctcttctacctaaaactcccaaattctgtcctgctctctttcgaactctacgaagagtaatatttcgaaaatttcgtcagaaggcgcgtgtttgagaagtagaactaagaagaaaaggttgtatctacctgcttgcaaagttcttggaacccagctcatcgggtacatgtggtggtcctctcggctgtcggatcaccaccaccggtcccaatgaaacctgtccggcacctgcaactggccccccattctcgttcaaacccaaccgttgttcaatcaagtcaggcaccgaaggttggggagagggagagagaccgtctctcataagtgaaagaatctgttgatctcgtcgttgttgttgctgttgttgaagatggatttgctgttgttgttgttgctgctgcatatgaagatgttgaagatgttgttgttgttgttgctgctgagagttgaacccagcaaaggatgagacgccgtttgctccacctcctaacatccctgagtggtgaccaccggaaccgttgatcgaggggccacctgtgtttgcatgaagaggtgagggtgataatctgggagaaacagatgttggccttcctgttccgatgggtcctgactcccgctcaagcccgaaaccgaaaccaaagggagcacctcccgctccgttgttaactgacgagggaggtggaagaggaggagcactgcctccaccaccaccacccgcagatgacctcgcacgcaggttggcttgaatttgaagttgagcagcctggcgttgctcataagcagaggcaagttgttgaggtgtctgatactgatctctttgcaaccctcgatccgcttgagcgtatggatcaaaggcagtcactcgttgttggtgggcttgggcggaggaagggtaggcatttgaggtttgaggttgatacatcttaggagcctgatgctgaggcgtgatcgattgaccggaaagaagagcagctttttgggcctgggccacaagctgctgttgaagtttttgagtgtgctgtgagaacggaaccatcgatcagcattagcgtgtctggagcgagcatcttcgttgatcaagagaggaaagggaaaagactgacttgaagtctgagcaattgctccatccgagcttcaacctctctctggtgaatttgctgttgcatttgttgttgggccagcgcctgcagcaactggagttcagccagatttcgagtccccgctccgctaccgttcatctgtgctcccccagaattcatctggagcgtagcccagagaagatccgattgctgttgctgttgctgaagagtgttctggccagccgcgggctcggttctgttacctcttgaaggttgagtctggatgtttcggttgttgaaaccatcagcccctccttgcttgtttccaaatcctgcggtaagccgtccaccctgattggcgttttggaatgattgctgctgggcttgtctattagcaaatccgaacccggaagcatcaattcctgaagatccaggtctatgatctcctccagcgttcaaagcggccattttggcaaccatctcttcatcttcttcatcgtcatcaaacgatgggccgagtgtatgatcagatgatgagtaccgttgatttcgctgtgggacatggttgggaagtttggctccacccaaggtgtggtttccattgtggttagagttgttggaattagaaagaggaccattagaatgagaggttgaaggcactcggagttgtgcagagggagaacctgaagcagtacggaggttggcgaggtagaaagatcggggcggacctgccccgagggcattattgctaacgtcagaattattgttcatggagaccgggtaagacatgatcagatggataagcttcgttggttggtttaagatttgatgaaggacgaataaattcgattgccgtttgttatcgctgatgacgatggattgaagtgtttgtgagaatttgaggcaagaaaaattcactagtgtctacagtctgttgatagaggtcaagcatctgcgtgagtccttctgtgttctcttggatgatcttaatcatctaaggaggaccatcgacatgtgctactcacgtgctgcaagagggtcgatcaagaggaaatatatattcacgaaacgaatcacttttgggaatgtagattggacgaaggcaatgtcagttatgttccatctgaatgtgactctccttcctgcgatagacggaacacgacttcaagactgataggagagaagagagagaaacgcacgaagataacagtcgaaagatggacgaaagagaaaaacaaggacacggaaacaaaaggatgctgcaataggattgaacgtggacaaccgaggcgggtcacaggagccggatgttctgacgatgagttgagaagagaaccggttcgagataggattgttggttggttgcggtgcagaaatataggtaggcgggcgtacgtgagggaaacagtcgttaagttggagcaaggataggagaacaggaaagaatccggtgtgacttcttcggtgtcagatgaaagatagagaaagagtttgccgatcaaggagagttggacagggacaatgaagagacacgtatgggatagatggaaacaaaggaaaccgaaagaaaagcaaaagaagaaaggccgatgaggaaggaaaagatggttgttggggttcaaaaagaaagaaggtgaatgagaaagtgcgaccaagaagttacagcgaattttcctttaagattacacgtggcaaatttcgatctcatctgatgggcattctttccatcctagttgatcttcattacatcatgatcctctgcttatttcgtttacaacaacgccaactcggctctcttttctttcgttcgtccttgcttctcagattttcttggcctgatccttctatcaaggcttctcgtccagccaatccaggaactgcggagtgaagtatgtcaggatgatggtcgcacctggatacagaaatcacaagtagacagacagaatatagttcaagacatgagggtaagagatgtcagtatgagaccaatgaatgaagaggtagtggaagacgaaccagctcgaatgaacccatccatgcactcaaacgctgcgtccctcaaagcgtagacccccttgtctgccccggcgcacaccatcgcatactctccactaacctggtaacaggcgatagggtgatctggtgcaagttctgcggcagacgcgatgatgtccaggtaaggaagcgacggcttgaccatgatcatgtctgctccctcattgacgtctcggacctgaatgaatatgatagagaaaagggcagtcaggggtacgaacgctagatatggataaccatgaagtttaacacctacaatagctcgtcgagctagtcctcgtccaccagcagggagttggtagcactttcggtttccaaacgaaggtgctgatccagcagcctctctaaacacatatatcagggccatcaagatatcattcttagattgaaatgaggtatagtagcatctaaggtgcaagggagaaataaacagcagtcttaccggaaaggtccgtacatgcaactagcaaatttggccgaataactcatcagggcacacctgatccgatggaaataaacacatagtcgtcaggacccgaggtgcgcgcaaagacgttcgaagtatttataagaaactttggcagacctgttcgcaaggttgttggcgattaaagccttcttgatgaacttgattcgaccgtccatcatgtcgctaggcgcaacgcagtttgctccagctttcgcataagccaaagcgacttcggcaatcctataccaagttcaagccaaccccgttcacgatttatgattaaatgcatagtgccaaaccctatcatatatgacggagaagtttcaagatttgaaactcacctgggagcgctcttttcttggttgagcaaaccgtcttcgtcaagaattccacaatgaccgtgggatgtatactcacagagacagacgtcgcaagcaataaataactcgggaaagagagatcgaatcttgtgaatagctcggatcaccggagaatcaggcgactctgcattagatcctcgggggtcctatcagagtagtgaattaggccagaacagaagagcgtctgtaagcactggaaggaagaagaactctcgagatatatagagcctaccttgggctgagtctgagggactccgaagagaataactgagctcaggcctttcttgacgagaggacctaagaactggtggacgaggtattgagagaaaagaaaaagtagaaaaagaaaaagaggcggacgatatcaacctctcggtcagtcggatctgattcgtcgatagaatatagcttggagaacgagcaggcggacgggcatcctagtatgtactggaaactcgaattccaactggtcatatattcccccatcgagaaggctaaacacttggaacgaaagactgaacggacctcttccaacctatcaataccccatcgcttctgaccaggaagggagctgatgacctgttcggcctgatcgtcgtcagagataaagatcggatacatgagcatctccttcgtcagtcgctttccctgggattgccatgatcgagagagcggatgagcgtatcctccttgaaggatcgatctaacatgaatcccaacatgacacatataagcatgccagtttccacaaacaagatgatagtttgcagcacgtacgagatttccatgttgaatgtcgtggtgggagtatctgtatccgatcagctcaagaagaacggaataagtgccgtctccgtccggaggatgtgtggttacgataagtaacattgattcaatcacgtgtgcaatcacgtgatgtggctacagccctcgactactgtttatccgacctctctcaacaaccgaaccggatgaaagctggaggacaggatggctgggataacagatgggatgaacatacatggtagaagtacacttgcacatccacctatccactcgcttgctgtgagccggtcagacaacaataacaacaccgtggaagaccaacgacacacaccttgagctctctgtcccagtctcattttcagttgtcgccgctttcgtgcacgttcttctttctttctttctttttttttggatacactctccttccagttttactaccattcgttcctttttctcttttgctttctgagccctacaaccttactctggaggagaaaacttcctttgcactttgaacaagatgctttccagcagccgacatggtcatcatccatcatcctctcctctgggtcctcgagcgacagcctatccgtccgcagaaggtccggtctctcctctgcttgccgcatcgagaggaaggccgtttaacccgttggatccggatcatctctccaggcaacgggaccaggacttggacagtgctcgagctatctgtgagtggtgttcttgactattttccaccatcaggatccaatgccttactcttcctactttcaagaaccccgacgaacatgtctggccggggttatgaccttccctttcttgatttagagactgaagctgatttaaatctgttccttctttcatgccttcttttctctctatttcttctccctatcaaacggaacccgtagaccgagctcgatcaaactcaatccacctatcgtccccacctctacatgctcaacagcctcgaacgtctccaacaatacatcctaacccagcgtcgcatcagccacgaaagtccctaaattctatacaccttccccaagcctacaatctgaacaatgattatgaccccacatcctttcctgcgctctccttctccgaacaagccgacgtgtccagagcaagaggtgatcgaagttatctttccgataacgaagtcatcatggagcatgaatctgaacaggatgccactcttagcgaggatgaccattctatccactctcaccacgacgtgaatgacgataccgaagaacatccctcgctgtcctataacagacgacgagcggatcgttcaaccggatcgtctagccctcccttgcttgacatcgatcatgaatctcaacttgaacaccttgaaagcccggcagaagatccccaaagacctcgtctgagaggtagtcagtttgatttctctattctcgaatcttgggccggacaagagaggtcaaagtttgtaactctctcggatcaacaagcacgtcagacagccgaacaagcggcttccactcctatcgctgatgtcaaagaaggtatcggaggagaagtcctgatcgaccttcgagattacccagccgggtcgaagcacgatatgaccgatttgacgaacctagagactaatccaaaggaagcatccgttcaacaggattctccgctatcagaaaagcttccgatgaacgagcctggggggttctcgacccggcgtcaacggcgggtggcatctttagataacaagacatccagaagacagggcaagctcgcaatgttcgaaggtgctggcgccggtgatggagcatttgcctcaccatctttcaaccgctctgctcctaattcttccaccatcagtttagtacctcccatgactcattcggtttatcctcaactagacgcacatgaaaactttaccgaaagccaaacctccactcccttacagcctgttcccccgtcacttcctttcccgactcccctttactccgatactgaaactcaagagcgacccttcaggttttcattctactctaacgctcttcccgcgacgatccatgctcgatcactttacgagctcccggcagaggggcagacctttgaggatctctttggaggaagatctggatcggacaagccaaacatggccgctgcggctgccaccgatttcggcactcaaccttctttgagtggaacgacgacgcccagaagtttcgacagatcgaaggcacactcaacaggttctttctcaggtctgactggaaacggagctcatcacagtttactcggtcgagcggttgagaacgcaagggatcctactgggcaaacctatgcgaatactcaggcaggtacaacgaatggcggaatggggtccgccagattggatgatgtggaggcaacaacttggtggctagatgtgacttgtcctacagatcaggagatgagaatgttgagcaaggtcagtcaaggttgaggtttttgaaaagaatttcaatcctctagccagataaagaagctcacgcgtaactctgccattgataccaggtgtttggccttcatccgctgaccactgaagacattcagttggaagaaactcgagaaaagatagagctctttaggaattactacttagtctgtttcagaagtttcgtctcggacgtgtacagtccgacccacttggcgccgttgaacatgtacatcgttgtcttcagagagggtgttctctctgtaagtgaagctatcacgtaatcattgatctttactaggttgaactcactctagatgtttctttctaatttcagttccacttcagagaaactcctcacccgcaaaacgtccgtcgacgaattgcatctctcaaagactatatctctgtcacgtcagactggatctcgtatgcactcatcgacgatatcaccgatgcgtttggaccgttgattcagagtatagaatacgaggttgattcagttgatgaggtgtgtttgttctacatgtttcaatatatcagtaaagtagaaaagaatactaacgttgactttgttgtatttgttatagttggtgttaatcatgacagaggaggagcagagtgatatgctccgacggtcagccttgatttccacactcttcttatgtctattgttcaaagacctctagagaatgctaactagacaatgaggtgttgtcacataacagaattggcacttgccgaaagaaagtgatgggtcttctcaggcttatgggaaacaaagcagacgtagtcaaaggtcttgccaaacgatgtaatgaaaactggtctgcacccttctttcctccgaatctttctgagcagagatgtttctgatgctgaaccatcgtttgtgtacacgttgaacgggatcttttgtaggagtgtagcccctagatcagatatcggactttatttgtcagacattcaggtttgctcgtcctgactagaaaacttagaaccctccgcttctgtgttgatgtgcctgacgggtctgtcttgccttgattcaatctaggatcacctgataaccatggtgtcttctcttaaccattgtacgtagtaccaatatctctggtttccttctgaaagtttagttattgataaagtcaacacaatcatagtcgagaagattttatcgagatcacactcaaattatctcgctcagatatctatcgaaatgacaggtggatcacgttctttctcactcaacactctctcaggatcactcatagccactgctctcttattcgtaacgaacgctgggtggacagacgcaaacaaccagatgaatgacgtgttgagtcggatgactgctataggaactatcctcatgtacgctctcctccgcttttctccttttcctaagttcccttctgatcaatactttttgtaacgttctgtacatacgaacggaatacaaacgcgcggaacgacatatttagcccaatgaatttggtcacaggaatgtgggggatgaatgttcatgtaccagggaagaacgtacaaaatctaggctggttctttggtatcgtcgtaagctgatcccatcatttcaaccttcgtgcccaatcaacgagatcggtctttttaatccatcatgactgaccatattcactctttttgcttgtaaaacgtcttcgttacaaagggtatgctcgtggccttcggcggtgtaggcgcgatcgtcgcatataggatcttcaaatactcacaataacttggcaaattcctgctttttctctgctttcctatccgcatcttgcaaacgtgtccaaccatccatcacaaatatatatctctatcctactctaaccttcagaaagggttttcttgaacatacttgttctctgttatcccaattaaaataaagtaataactgttctttcccttctatctggtgggtcaaaaatcagttgaagatatcattgtactctagcgcatggatcattttcgttccgacctcaaacacctgtagttctcccaatcaatgatccggtattgtcgatgccaatgttcagaaggattcaaaacgatcagagtagagatggttctatacgcgaagttaatgttgatgccaaggttgatatatagagaacacaaattttataacatagagttagttttacagagttgaaggagaagaccaaacgactacaggttcatcctcgagtctatgaggatgtagatatgccagaacacaataagatgtgggagttgacagagataatataggtgagaaaacctttgagatgtctaaccgaaacgggcgagaaggaaagtcgaaagaacgtactttttcagctcccgaccacctcatcacagattcaaagacaaacaacgcagatgctaatgcaaaaatcatcaaaccatggtcaagttcggtcaacacagagtgagagtatgcgccagaattatcgaacactttcggtgaacgaaaccgagatagtaggaaacgactaaccattcgtcgggaaagctcgaagtacgacaggcacaaaccctctgtaaaatcctttgaaaccggcctcggcataaatcgctctgacgacggacaagactccggtgtatctaggttttgtgatcgagtccgtcatcattctgtttttgacattatcagctttatgattattgaaagttgaacacagacggtcagctcaatttttgatacttcaaggtagaacttgtattcaagaaggaaggtgtataacggagaagatgaaagcataagaaacataccgggtagagctcctagccagaaagcattggctcccatgccaccagcaataaacgtctgggttgggatcgaaagcgcatacggcgtgttgtccaaaagtgagaacaggcgcatgttgagttcataaccaccgaacatgaatgcgaaatttctatttagagcattttggcatttccgaagttatgaggatagattatgctttagaaagagagcatgaagcaacaaaaacgggcgagactgatttgttaccacagataagtgatgcagaagaggacgaacgatctaaacgccagtgttgctccaaaacctctccaaagcccttgaaagccttgctctctgacaacctggcgagcacagtctatgggacctgagaattgtactacaggaggcttaggagacgtagttgaggcgtgattggtgcgcgagctgtgatgggtgtttgctgcagcgagttggagttgaagtttacctttgaacagaaaagaacagtgaaactaattagagacttgctcgtatgtctagaacagtcggatgaagggatttcttgaagtggtaagaagttgtgcctacccttgaggagctctataggatgggcgaaaacagcactataaatatggaaatgagaagctcagcgatcgtcaattgaaaaaaaatctcttcaacagacgatatgatcttctcaaaaaatgcgtcggaaacgtgtgactcactttgtccaacctgccccgataccagctacggcatgacctaaaagactcaaccgcttctcgtctttttcttccactgtcagggaaggagttgtctctgcaaacccatgacttaacagtaggattcggtagttgtgtaaactaaatgaaaacggaaacgattatagaaagagaacgccacgcgttaaacttgacattgaagcagtagatatagcaaaggaaactgtaccttccgagcagaacgctatccgtgatagcccatcccacagcctgatatcgggtatcatgctcaaggtttagtatacgtatgtctgatgttaaaactttgattaagcggtacgcgaaggataatcttactggaggactagcgcctttataaagggccagaggtccctataaacgatacgtctatgagcttcgcgcatttttttttctaacaaacgataaattaaacacacttcacgtcttattgtagtcaagaagcaatcggtggctcctttgtatgtccctacatcgagtatcagaagtgaaacttttggtcattagtatgctctggttggtcaaaagaacgaggatcagagtttaccaataggaacacattgcactggatggtagacgtattccaatagttgtcagctttcgtctaacgaagggaaacactttgcctgtatcgagaggaaaatagttctgtaactcactcctggttttaatggtgtcaaacctggtgttcgatcaagatgtgatattcggcgaatcagccatttatggtcatgagatggataagaattgaaaacgtatacacatacgggtgtccgactgctagctttgtgaggcctaatctcgcaaaagagaggagagaaacccaagtgaaacaaagaagaggaaggagaatagagggaacacgagcacgtatatgagtccttttcgtctactttttgttccttctctaatccaaagtcgcaaagaagagagtcagagcgtaccagagcaggttcccgccaagaagccaatcagtcgaacactgtttgaggaatctgcatcggacgacatggtctgccaaagctatgaggcgttgcaattaattacggagggagccagctgggatgagacaaaagtttagataacgtatgggtgttttatgggactttgtatggggaaatctggggtacactccccatagactggactacctccctccatatcattcttgcttatgagaaagctctcttgctctgcttcgtacttgacttcagtcatagatcctcaacatcgataccttaatctggatctccatctctccgatcttatccctattcatatgagtcgcgtaagaaacgatggagtagagagtacgtttcttggtctcctgtagcacgcgaatctttctcttcacatcaacaggacgacgcgtcagaaagccaagctgatttgtattgccttgtttgatcagactggttcgtcgaagagggaccgtcgaaccgaatgattcttgcccttcgctcctttatccctgaagaagccgactggagcttacagcgtcttctccgagcttcctcagatcataacgaccgtttcgttcttgataaatggcatgcttcggttgatactcttttgttatggcctcgggaactcttcgagatcgttggtcgcgactcgccggctcaggcagtagctaaagggagcgctctctgggatttcgaacgatccaaccagaaagaccttcatagaagagctatagagagcttgttggtgattcgtaatgcaggactcaacgacccagccaacggaaaactattgtcgacaagtttaaaactacaacgatttctgctcgagttcctctctggagtcgaagtagagctcctcatagatcaactagctgaagtgcttatacttctccttgatatcttacacaacatgtttatatcttcttcgctcgacatctcttccattcaagagaatttcgtcaccgaactgcccctagttctagttcagttgctgcaatccaaagatcgggcaatcctcattgcaacccttcgtgtagccctggcattatccagtcctaatccagccgacccaacagccgacccgctccttcatttttcgtctgttttcattcaagcctccatcaaaatgtcgctgtctcttcttttactcccgccgtcatctggccagaatatttcgcttcgatctcttgcactcgacatactctacacacatacaagcgacccaactcatgcagcaggggttctcaaacgaaaagatattggaccggtgtcaaaaatagtagcaaaaggattattcgaaggatctgaaaagaaggaaactccgttcatcctggccggtggtggacgaggaaccgagacgggcgaagcatgggaaggcgcgccgccaggaagaggcgagctcgatcagatggcgggaatggcagagccattaagatcaacctactggttcggctcttcgttcaatactttcaaaatattctattcgcaatcttgctgttaactgtctttgtgcatgtttatgtcttcgcatctcaacaggatgcaacgaacattccttcctgcccccaagtcatatgtacctcagacacagttctggcaactctacagagaagctttctctcagccctacctccaacagaacggagtaccaccattgttgacggcgacagagctcatcaacaatgtgtctttcgtgtttccaggagctcaggcatctttgcatgaaaacacattcgtgatgaaggggatgaaagttcgtagcggcagaagtggttcgttttctattctctaattatatgcatggtctaatcccgtggtgaatctggtctctaatattcaacctttatttcgttcgcagttccttctgtcggacagctccatatgtcgacgtacgaaacactccagacgtctctcaacccaacaaccaagtcgcccacaggaacgtctttcacttgcgcgctcatcttgcggaacctctcccgggcgttagttgagctgcttgatgcggacagcgaaaggcaaaacgaccagaaaaagaaagttcagtcgggcgagttgttcggtctgccaatccctgatgatattctatcaggaagtcaatctcaggacgggccagatggagtagccgagtcgatgatatcatctggtttgacaaaagaagaagaaaagagggctgtagcggccgtcttggctgtggaggacgtggtgttggaatgggttatgaaaggaggggatacgttggacgtctggctcagtgaggtttgtctgcacagcatgttatcctcatctaaatggtttctttgtgaccttccttctgactcattcctcctcattgatcttctatcgttcgtttggcaggtgttgagatcgatcacgctgttgagcgcatgattgtcatctcttgtaattcttcatgataaacatatataacgataattttaattggtctagtgattcagcctgaacgggtctgtttttttggggcgtacttgcccccaaggttgacctttgggtaacctgtcagtcgtttaatgagaatttgtttcaccaggagaataggaaggaaagtagcttggcttgtcagatgagcggaacgtcgaacatctttcacagaagaaggacaggcacgaacgattggtctaggggtagtaacccgtcattttcatagatgactctgctcacgtctaccgctggaattccttgacatcttccagaagagagtttcatcggccattttcaagacaagatagcaggaaacagaaggcgataggaatactatgagcctctaatcagacggttggacaatttgatcgatcactcactttcgaaagatccgagggagagggtagcaagtgacggtgccacctttgagacgttcgccagtggtcggatgatagttgaagtgaggttgacaagcatattgaacgatatcgtagagcggacagcggggcaagctttcttgagatgattttggtgtagatgaggtggatgatactgaatttgctgattgaccttcacgtgttgagtccgtcatcttgaccgctgattgggatgggtgtatgcggtatgtgtgaacgcgactagaatgaatggttctattaagatatcttttcgaaacattagaaaactttgttgaattatctattcaaaatatttcctagccattagataattttccgctcgaatccggtgagcttcttcgaaagaggaccaaccatccgatgaacccaacagaaactgggtctactctgcactacactcaagaaaccatgcctaaagtcaacaccccgtctgttcctctgaatggtctctttggagtcaataaaccgtccggcccgacatctatgagtatcctcgagtctctcaaaaagatcttccgaacctcaccgctctttatagatcctaatcctcctaatccggcaaataagatcggccggaaggccctcaaagcaggtccagtcaagatgggccaaggtggaacattggacccgctcgcagatggagtcctaggttcgttgcttttccttcctagtaactcatgcacaagagaagtaagaggaagctcatgatcgttcgtttgctcttgaacgacttgtctcggttggggtatctacctgcataaagtggtcgcgacgggtcggggaacgaagcagcttgctcggttcttagattgcacaaaggtatcatcgttcatgttttcctagtcactggattggataggcacgattctgatacacgaatacgtgtgtcttctacaggaatacaggaccgtcggacttttgggatgcgcaactgattcggctgattctcaaggagccatagttggtaccgcgccgtgagtctagtccgtctttacttctgtcaagcgtagccaattcgtttctttcatatgtgattacttgtatgatcatcccgctaatctagtggcctgagtctagttggaaacacatcactcgacaagatgttgaaaatatcctagagaaatttagaggagagatttatcagattccgccagtgtatgttcttacttcagattatatgcttctactttgtaatttgttttcgaatatggctgaaaatcatcgatttctgatctggtgctttcagctactctgccctaaagatggacggcaagccgttgtacgagtacgctcggtcaaacactccattgccccgaccgatcgagcctcgaaaagtgatagtgcacgagctagtgttggagtcgtgggatgatgctgcaacatcggaagatggagagggtcaccacttccaatggccgacagaagtaatgagcgctgaagacaaactgatatttgacaaaagcaagaaggtagcgttgtagtttcgttccttttgtgatctcccagtcttcctaggaactgacttcactgtttctgcgacaaacacgatagctcgtcgaagatgccgagaaaacagacgcgcctccttcctcaacagatctcatgtcatctgaacccaccttgacgtccacggatgaaaccgtatccaccgacccgcgcacggttcctccgacattcacgctccgaatgactgtatccggtggaacatacgtccgttcgctcgtcaatgacatcggcgcagcccttggctcgctagctcatttggtggttcttacacggacgagacagggtgaattcagtctagaaggcgacaagtgtatcccttggtctgtgttcgaagcggctgccgcggaagaacagcaaaagtacttggaggcaaaggctagaggagaggtcggtaaaggatcgagcacaaacgcaaagaaggggaaaggaaatgggggaggaaactcgtcaaccaatcaggaagaagaagaggaggaggcaatggctaactcccttcctgttactcaaaaggaagaaaaggaggaaaagaaagagcctatagagctccaggcatgggagaagtatcttttggagaggtttgaatccgtataacaagaacgactgctcaatcacgatcacacctaggattcaacctataccgatctgaatctggcatcagctgtcatatgacctgtcagccttgtctatagagaacagaatagatccagacagaaaatccttctaagcgcaacaaattcatattgtcatttttatttcttaacaaatagacgtgacaaagacgttgatatgagaagctaagaagaactgaagcaaacagatatgcaagcagaccaaatgaattaaacgacgaagggcaaacatcgatgatacagataaacgaacttgacgcccacggaaaatgttcgaatagctaacagagccagtatacagtacatccaagacagctgtgttagaagaaaggaaccaagaagatgaacatggggttgagtttgaagatcaattctaattgaggaatccacggcatttcggacttccacacaagcagacaatctgttccgaaattgaacggaattgtaagagccctttctaaaatttgaacaagatacgagacagtatggtagaagcagacgacgtactttttcttgttcaatgggaaagtggtaatcataagttatctcatccccggcttcgatattgatctttgcgtaaatgacaatctttttctaaaagtcaagcaaaaagggacaaaaaagcatgttaatacatatgcataaatgggagatcgaggaaagtagacgatacgaacttcgccgttgatggtgatgattttggcggtacagtttggggtacaactaaggcaaggaaacaatgaagtcataagatttcgcaaacatcagctatacatatatatatgtggagtcgttggataccaagcataccaatgattgatgagccgtctatttgtgataataaagcaaattgggattggttcgatgagtacaccttgtgagaacttatacaggaaaatcggatatttgaacgatgactgacccaagattccctttcttcgtagcgtccaccacgctctcatcgtcgatcctgaacagataactgctcccgattccgattcgctcatagtatttctctctcttgtccgctacggcggctctgataacctctccaacatactcgataaccatctcctgggccgggatgaactccatagcgtagagaccccaatcgtggataggagatttcgagaacttgagctgtttcttccgagttcgcaactgattgaatttgaggatatcggtgtcgctcgctgctgcttttcggttctgttcgataccgagtacaagccgacgagtagcgactcgagcagatcgaccggtagagatcgcagcggccggttcaacagcagatgattcggccgaggtcgctttgttccgctgaggaagatacatcgacttttcgagctctgaaatttttcggtaaccttccgttcgagtacaacttttctccggaagctcgtcgtctatatcctctgcattcgatagagttgtaatctttgctgacgtgtcatattgagatgcctgctcgtccacggccgcttcagaaacttttcgagctctatcggccatcaacttgagcaaatacagatcttcgttgtcttcgaccacacctgcctggaagagatcgacatccttatacttttttggaggtcgttcgggtttcttcttgggcgcccgcttgcgagaaggcgctgttggtggggcaagtgcatctgaggtatcaggttgcgaatgagcgatcagactgggttcttgaagagcagagagtgaatcgagaggcgaaggggaatctatctgaacagaaagaggagctggggtgggttcttcgagcggcgcaagctcaggaatattgattgaatccaggacgggactgataggcaaggcagaaggtagtacctgtgcctgatcaggctccgttttcttcttcttcggtcgagatacaatcgccttcctaggcttgggaggctttttctcgacaaccggtagatcaagttcttcctctccttcatcatcatcggtgtccgagaagtcaaatcgtgattgcctcgatttagttctgggtgaacgagagttctcgtcctcttcgttttgctcatcttcatcttcttcatcttccgattctgcctctccgttttctcgtttgccatccatctcgtcatcctctgactcaaaatcaggcttgagctctaacttccgtctcttctttttcctctcctcatcccttgcatctcgagcatgtgcacgagctttctcacgggcctcggagtatgctgtctgattcggtctgtcgtctttgaagccctgtagaccccaggtacttattgtccgctggccttttcgttcctcccccgagtgttttcgatcgtctgccgaaggtcttctcggctcgaatgaaggccatgggtcatctctggaggtccagccatctccaggttctcttcgagaagcatatcttgtcgtgtcggaaggatagcttcctgatgagtttcttcctcgctcgtattgtgtatcccggccgagcgcaggccgagagggtcgatatgaaatgtctctatgatggttgatcgctttgggttgcggtaagcttggcaggccaggcagatggcttggtcgcgaggaggtgtgagcatccggataagcactagatggcgggagaagagggctatgagtcgaaggagaatacggatatgaatggagtcctttgaaagggagagagattgcgcctggcggagcggtcggtagtgagccagtggtcggtggaggaaggaaaggaggtttcagtgcttcgagtcgtttttgttcggtccgctcagcttccaagcggagtctctcttttctctcggcatctcgacgttctttggcgatcttgactttggtaaagtgttcgtccacggctttgtctgccagctttccttcgccgtcgagaaccagagtaagggttccttctgaggaatggaagcccaagcgagacccattgaaccggttaaccatgctgacagccaggtcgtgtgcactgttgtcagttttcgaactggcaaacttgatccaacatattcctaattgtgtggagcatatagaaaacgaagcatgagcgcgcattcgaaacacgagcagaatgaatatatgttcaaaaagagagtaaaatagatctgagcacacagagggagaaaaggagaggacagaccgagatatgatgatgttaagggatcaactttcatactgaattcttggattcgaccataagacccaaagaaggctcggacagtgtctgatgtcgtcaaggtggaaagtccggtgataaggatagcacaagcaggcggaggcggtggtttgcctctcgaactttcgtcccactgttcggaaagatttcagaacaaaggccgtgagtgtctgagatacttcaactagtctgacgaggatagaatcaatcgactaaatgtatggactgacctcgaaatgaactggatacagcctctcacgcaatttggctgagcctttaccacgacgtaccgtggtcttgtcaaccttcagtcgaggatcagtcgggattatctttgtttctccaggcttcatttgaccctcgtaccgaagaacgacttcatttcctttcttgagtcgaacatcattactgctcgttggcggcaaggccgggtcgtaaaccgttttccaagcacgttctaattttctgggtagaggaagaggagcaggtggtggtgatggtgatggtggtcgtggtggtgaaggacggacctgttctacttgaggtcgagacaagaatggcggagaaggcgaccgtcgtttgaacgatgatgaatctgaatgtccttttgtttgaggctcggcagataaatatgatgatgatgatgacgatgatgatgacgatgacgaggttataggtctgaaagatgatatgaagcccgaaggaggcctggcgacccggtctgctgggtcaggtggtagctgcttgatcgctggtccgaatctagatacatgaggctttttggaggaggaagcagatgaagaaacgaagggagcacgacttcgactgaggtcagaagacgacggtagtggctctgattcgaccgctttggcaacaagacgcgacgacgcgtgggtcgaggatttggagggaggtaaaggagaagcttcacctgatggcgaaagaggcgcgtgtgaaggtctgtcaactggtcgaacgtagggagaggggtcgtacgaccttgagaacgaatctgacgagctggaagagctattccaagatgaatgagatcgggacgacgcgcgatcactgtgggtcaaagagaaaagtgatcagaaacaatgagtggatgttgctcatatgagcctttgaggagaaggaagaagagaaagaacagaaagaacagactgacgaggcgtaggatgactgtgacggtctcctgtcttgggacgtgtaactccttgaactcgagtaactcgatctcccactcatcctttgatgactgtagaggaggaagagagaacaagagggttggagagatctgctgaagagaccgaggaaaagatggtgggatgtgggaaggaaaagaggacacaaccgagcgggaaagagacaatcttcgagcgagggtgttttggctttgttcttttttgctttgttttgtctaccttctctgtctttcactatgttctttctgtctctcttctccttgttactgtgttctcaacgtactaacggcagagaacaatgtcttttcttcccttcatcttgccatactctgtatcaacaacagatcgatggcaaccccattggttaaactggagaaggccactcggttgtttgcttcgatattggaggtctgccctgccaaagcataaccctaacaaccatgtattcagagaactctctattcgcttactacaaacatttcctagtgtttgtgctaatccattagagtaagtaccgggacaatacttaaaactttcgtttaaccttctctcagtcttgaatcgtccaactttagttgacctcagttcgattcaaaatccactgggcttaatcaaagataatggccctcgcttctgctccttcattcgcaggaaagtggtcctcgttaaaacagcctctcacatcatgggtgtcagtcttgctttctcctctgcgttcgttccgtccgatgtatcctttcaatcatcccagggctaacagtcttgttcttcacgatcttaggtcacaacgtatacaggatcttcattatgaacaaatgacccctgtccaagcatccgtcatccctatctttatggggaataaggacgtcgtagttgaggttcgttcgtttcttctttccctcggaaacaggtcgccggatgctaattctgaggaacgaacaccgtttaggcggtcaccggctctggcaagacgctcgccttcgtgttgcctatcatcgaacgtctccttcgtcgtcaggcagaaacaccctatcagaaaggtcaactcggcgcactcatcatctcacctacaagagagcttgcctctcagatccatgctgtcttttctctgtttctcacccctcctccggctccgtcgtctagcttgacagacggaacagatagctcgtcagagccctgtccgctccctccgccgctcttactcatctcaagcaaagaaagtactccggcccaggacctcgctaggttcttggataccgaggcagtaatcgcgatcggtacacctggtcgagtagaagagttccttctaggtagacgagtgaagggcctggtcagatgttccgagttggaagtcctcgttatggacgaggccgataggtatgctatcaatcataaagatatgcgcttgaacttagtcggcctagccatttattgaccacccttatgctcttacaacacttagacttcttgacttaggattctcacccacactcaccaagatccttcaccatctgcccaagcaacgtcggaccggtctgttctccgcaaccatgaccgaaggcttgtccgagcttgtgcgtgtgggacttcgaaatcccgtccggatcgttgttaaagtggagtccagaagacgagcccttccgtccgcgtcgggtgagccgtccggtcaacagactagggagcgccgaacgccggcgagtcttaagaacatgtacctcgcttgcaagccgggtcagaagatggagaccttgatacggatcttggagaaggagcgggccaaggctatgaacggcgttggactcgaagagcctgatggtcaatcagaagagctcgttgaaggcgagggagcttgcaagtttatcgtctacatggcgacatgtgcagctgtcgattacttttatagagtcagtcgttcattttccctcgtacggatgcttcccaaaactaatcacttggaatcataacttggatatgatttacttcattgtcttttgatctctcaggttctatcgaaacatccctctctcaagaagttcactctgttctccctacatggtcatctcccgcctgcatcacgaacgacgactctagattcgttctctacccaaacctctacgccactttcgccatccgtcctgctctgcacagatgtcgctgctcgagggctcgacctgcccgacgttgatatggtcatccagtacgaccctccggttgaccccaagaacttttctcatcgagctggtcgaacggctagagcaggccgaaagggacgtgcattgattctattgggcgaaggacgggaggaggattatgtcgagttcttaaacttgcgaaaaatcccgttacagccttaccctcaatcaacaccatctcttgctgcttcctcttcttccaccaacatcccggccgagacctccccgagtctcctcgcccttcgatccatcctaatgcaagaccgagatttacacgatcgttcactcaaagcatttgtctctttcttgcgggcgtactcaaaacacgaagcagcgttcatcttccggattggagacctcgacttgggtgggcttgccacagatttcggcctgttgcgaatgccaggtggtccggaggtcaagctgtggagaaagaaagtggagagtctaaaggagaaagagccttcagacggggtggtacaccctgttgattggaaggacgcagtcgtcgacgtgagttatgtctcgacctctccgttgctctgaatgtcacatagtcaatactaactccgcattcatttgttcttcaagtgggacgcctactcctatgcatccaaacctagagaaactcagcgattgactgaactggaagaagcaaagaagaaccctccgaaaccgaaggtcgtccgtccgagctcgacaccggctgtagcttggtccaacaagctctcgtcgaagacagaaaaagaggctagaaaggaaaagaaggcattgaagcgagcgagagagaagcaagcggcagtcgaggagaaaaacagccaccaagataaagatggagagggccaagtcgacgccgaagagaaggacgatagcgacgggagtgaggaggaagtacaagactggaaggaattagttagagaaactaagcgtaggaagcaagatgagagaaaagccaaagagaaggatatgggaggaatggatttcacagatctatgatcagttgcccccagcattcgaaacacctcccgctatgtcgaatgcatacttgagtccatataaatatcagaccagaaggccacgaccattctggcagagggaatatagagaggacaagagacaatagtgatttatgattatttcaccaatgtcggtcgttactaaccaatgtcgagtttcatcatcgacgaccaaccgtgggctcatttgctcttctaattcaaccgaaaagcaagtcgctattcaagcatcaaaccatctggttcaatatcgttccacagtttctcttttattgcacgtctccctagttctattcttagatgattaaaggccttcttgatcttcagtcggccgctcgaggaggtgctctcatcttcaaaaaaggtcttcgtcttcaaggaagcgatctggcagcaacgcttaccgctgctcgaatcaccagcctcaaagctactcgaccatctacgatctacgaggaacctccttcggtctctacactgcactcttcaaatctcactccaacacatatcagatctactcttgaccaggaggtcacagcgaccccacagatatccggagcctctgccttgagcgatctctatgcgtcggaaggtagcttggaccgatcaaagatcgattcaaacagaccttcttttgcccttcctcgttcttttgggttggacagtcattcacccgtcttgtcttctaaggtttctgctcctacaacatctgtggcgaaaccgacggaatctgtggaagggacgcttcagccgccccaaaatagtgtttcctccccgctgcaaacttcggagacatcagtgtcgttgtcatcggaacccaaacttgcaacaacgtcaacagaatctgtatctcaaccgatcatatctgagaacactaccaagccaacagcttctactgtcgaggaggtgcttagttcggatgttgttctgaatatcaaccagcttcctgaagctgtgaaggaagaagtgcgagcattcttctccgcttcaccgtaattttaactcactgatgatggatgttcctttgtacttttcagcttgttccagttctcaaggcctctcgggtgccatcctcacgaattggtcgattgtttcattacggatctctggcaacttctctgacatggggagctgcttcggaagctgtccgaagaacgaccggaacatcctcgtctactcagcagtcagttttcctctcggaagcaaacatcgagcgtctagtggacaagctaggaagaatgaggggtgcggcgctcaagttgggccagtttttgagtattcaggagtcgggcaccttacctgaggcattggagcaggtcttgcgtcgggtacaggcgggtgcggattacatgcctgattggcagatgcgagtgagtcttattcaattgattccgatgactctgaagttctgggttcgcatgtgtttcatttcaacgatgaattcatctgaacctgtcggtctgtttggtggtgcagaaagtgatgtctgctgagctgggagccgattgggaagagaaattccagaccttttcacccgttcccatcgcgtctgcctctattggccaagtacacctcggtactgtctccgcgccttattcacctccttcgtctcctgaagacttcaaggtcgctgtgaagattcagtttcctggggtagcctcctccatcgcttctgatctatctaacatagggcttctcctgaagacatccgctatacttcctaagggtctgttcctcggcagcacgatgaaagtgatgaagggagagttggaggatgagtgtgattatgtccgagaggctcaatgcgtgaaaaattttggcgagctgattgagaaagatggagagaagtcactattcaaagtcccaaggatcgtggatgccttgagctcggacagagtgctgacgatggaatttatggaaggaaagccgatcagtcaggtcaaggggcttagccaagagatgagggataaggtaggtacctgttgtcatttgttacatgaccaagtgaatgtctaatctttactcgctttgtcggtgttcttttttggtaacgatagattgggtccagtatcctttcgttatgccttcgagagcttttcgagttcaggcttatgcagaccgacccgaactactccaacttcttgtggaatgaaaagacccaacaggtcagtaatttccgtgtgctcatgatgttgcccttgtcatgcgcaacgtgtgttttatgtgaatgttcattgatcttgtcgaaactatacgtgtttatccattcatctatagatcgagttgatcgactttggagcgaccagagaatactcgaaggagtttatggacaactggttctgtcttctccgcgcagctgtctcgggggacaaagcagagatggaaaaatacagcttgaggttgaaatatctgacgggagaggaggaacctgtcagtttgttcactacatctgcaagttcaccatcgtttggtgtatggctagctaacttttgcgtgctatctctaggaaatgctttcggcccatctggagtcaatgtctcttgtagcttgtatgtattgtgtttttatagaagaacacgggcaggcatacatctgacactccttattgcttggttaatctttcgatcgatcttacagctcccttccgacgcacgacttcaggaacggacctgtttgattttacccaccaaacgattgctgaacaggtatgtcttggctgtattcgcactcgaaaaaatcttttgccatcattcgcgatctatacctcactgagttttgtcttgccgtatcatgtgccgatgattcaggtcaaagctcatattcccacgatgcttcgtcatcggttgactccgcctcctccagagacgtattcgttgaatcggaagctgagtggggcgttcttgttatgtaccaagctgaaagccaaggtgccttgtgcagaactgtgggaagaagttgagcgaagctaccaaatatgaaatgatagaagcggtcgctctgaactgacataaagtcatcgagcattcacatggatatccggacatgcgtgaagtggttacgttcgatcggaccagccgttttttcctcttgtctacctggttacaaaacgaaagctcgataagctgtgcgcaaagtagtctgcggacgtggcgagagtggggaacggggtcgcgcgtagccagaagcaaggaaagcgggcaaagggaaagaaccaaacccatctcagcctgtctttctctcctctcttctccacatcgttctctccttctcccttgtccatccttccaagtgagtgtctcttcttgatggttgaaagtcgtctgagcttttcacttttcgttatggccatcaggactttctttctctctttcaagtgtctttttttcttgacaaagaaaagaaagaagagagaaaaaaaaacaaagaatcgagggaaaaggaagaaagagacagggatggaaaaaagggtttagaccgaaggcaaggccggctttagtggagtgcagattagggtcctcacactcagactcctaggctcccatacaatagtaccaacgggctcgcgtcctatattcgggcccaagaagtctcatcaaccaaagcacgagatggatctatcaaaccccatcagtcaaaaaaaaacaaaaccaactatctgcatctgttttttcccttgttgttctttatctcccttctttccttgtgtctcgtttctttccctggggatcaaggaagaatcgatacatgtccacaggattaggggttttaaccttctgtgtatcatccttgataatctactgacacaaatactgatctgtgtatatgttttttcttcttcttttcttttgtgcatctttagcctatctttctttccttcatccactttctcatcacacagtgagtataaccctcccgatcaatcatacctctctattgtaatcaatattcctcatccaggttgaagatggagtcatagattggaatacttcctgggtgaatggcttgaggtgcaggcatcgtcagatagtcgatggccatctgagggagagtagccgactgcgaggtcagacggatgaagttccattcatcaagagcctttgatccaatcagctaagggccatcccctccgtgcaacaaaaaaacgcattcatgtccttgtgccttttcactatcacccaatgagttccttacgactgggacgatccttggtcttttcgaacattgctcatgctgattctcatccgatttgtttatcaatccagatgtccgagtcccgagagtccaacgtctaccttgctaagcttgccgagcaggccgagcgatacgagggtttgttctttccttcttttcctcttggttttgtgtgtttatatctaccttgagcccctgggagctgaccgcgtgcttgtccttctgttttctcttctcctcgcagagatggtcgagcacatgaagcgagttgcttctaccgaccaggagctcactgttgaggagcgaaatctcctctccgttgccttcaagaacgttgtaagtcatatatcactacctttcataccctgaaaactctacgcatagaccgatcttgaccgttataatcttgttctattagattggtgctcgacgagcttcctggcgaattgtttccagcatcgagcagaaggaggagagcaagggaaacgacacccaggtcaccatgatccgaacgtacagggagaagatcgagactgagctcgccaagatctgtgaggacatccttgaggtatgtgactttccatcaagcttgcttcctttttcacttctctaggtactatcatatgaatcccttactaatctacacgcgctgaacatgtaggtccttgagaagcacctcattccttctgccgcctctggcgagtccaaggtcttctaccacaagatgtatgtacctttttcgaacaggttttcttttgcccgttctactggaggacttcgtcgctcatcttatcaatatctgttttgatacttaggatgggagattaccaccgataccttgccgagttcgccgctggtgacaagcgtaagacttctgctgataagtctctcgaggcttacaaggctgcttccgacgttgctatgaccgaacttcctcctacccaccccatccgactgggtcttgctcttaacttctcggtgttctactacgagatcctcaactcccgtacgtcccagaatacatgatatagaaaaatcacaagaacttgttgggcttacacgctctcacatcctctttcacctgtcccttagccgatcgagcttgccaccttgccaagcaggctttcgatgacgctatcgccgagctcgacaccctttctgaagagagctacaaggactcgactttgatcatgcagcttcttcgagacaacctcaccctttggtacgctcgatttatttgaccactgtatttagaacggcagcgcgaatgtgtggctcacgagcatatacttgtattctactcatcaatcttaacaggacctctgacatgcaggagtcggagtcaaaggctgagcagcccaaggaggaggaggctcccgccccggaggagtaattgcttttggctattgacctttacctatctattttctcttcctttgtccgcttcttcattctattcccttcatcctttcttttatccttctatatctctttccttatcattccatacgcatctctgctatctcgcttccgtttgtttctcaatcccccccctctttttttgtctctcttttccccctcttggcgactccattcggtcactacctctgccttgccggagagatagatggccatatgtcaatgagaaggagaatgagaggaaagagtgagaccggtcggcttttgtgcaatcatatgggtcttgttctttccaatgtgaggcttgacaaagagaatgtgtgacaactctgtgcggtgtgcacaccagatgactgccgtcacgccgggaagacgctgacggcagctgccactatacgcacacatacacatacacatacacacacacacacacacacac

SEQ ID NO: 2885 - DNA, 2944 bp, Xanthophyllomyces dendrorhous
cacacacacacacacacacatacatacactccaacccgacggatgaatgaatgtctcaagcggaacaggatacatgcatgatctgcgcgtactccgagatagagacggaaaactggagaaaccgtagattgaatgttccagcacgttcgacgaaagcgaagaagtacaagatgaaaggccggggacgaaagaaaaatgcggagcacctcagaaaagatgttgatgtcagtgggggaaaaagagatttcccgttgactgacgatttttttccctctctaggaatttttctgctgcgccaagtcaattctctccttttctctgctcttcttttccttcccttttttttcccctcaaagagatcttttttcttttttttcgagttctatccttcttttctctcccatcaaccatcaaccatcaacccaattcacatccaatcccaaccaacctttcaatctaaccgtatcccacacatcatgtcttctggagccctttctgtcgtccctgtacgttcgtttctccgttgtccttccatcttgctgatccgtgcctggcagtcggacatcaacgattggaagggcatcatctgatgatgatgattgcctgataacggtgaaactgatccatctctcttctcgtatcttttccatctttgtatcattccaattcgctctacctctggtcgaaccgtcatctcggtcatcgttttcgtctctgatttgctcgctgacatcaggccggagtccttaccggtgaccagacccgaactcttttcgagcacgctcgagccaacaaggtgcgctcttgatctcctttttcgggctgcttatgaaatctacattcagctcatactcatatctgttgtgccttgaatcgtttaatcactaccattccaatctcttagtacgccatccctgccgtgaacgtcacttcctcctctgttgtacgtctgtctatgctgttgtctgcctcctatcatatccggcatgtcaagtcctttcgttctcatcttgtcttccatcttatcaaaaccatcaggtcaacgccgtccttgaggccgcccgagacagcaagtctcccatcatcctccagatgtctcagggaggagccgcttagtgagtctgttatttcttagcctcccctatatggcatacacagctgacccgagccttttctcttcctatagcttcgccggtaaggggattgacaacaaggaccagaaggcctccatcggtggagccatcgccggagcccacttcatccggttcgtcttgatgttttacatcgtgttatagtctcttgtttcggcttgtatctaacctgccttctttcgcctgccaatagagccgtcgctcccctttacggtgtccccgtcgttctccacaccgaccactgtgcccacaagctcctcccctggttcgacggaatgctcgacgctgatgaggcctacttcaaggagcatggataccccttgttctcttcccacatgctcgacttgtctgaggagtccaaggaggacaacatcgctacctgtgtcaagtacttcacccgaatggccaagatgaaccagtggctcgagatggagatcggtatcaccggtggtgaggaggatggagtcgacaactctgccgtcgataacgcttccctctacactcagcccgctgacatctacgacgtcttcaccgccctcaacgccatctcccccaacttctctatcgccgccgccttcggaaacgtccacggtgtctacaagcccggaaacgtcatcctccgacccgagattctcggtaagcaccaggagtacgccgccgagcagctcaagaacggagacgagaagcccctcttccttgtcttccacggaggatccggttccaccaaggccgagatcaaggaggccaccgagaacggtgttgtcaagatgaacgtcgataccgacacccagttcgcttacctcgagggaatcagggacttcatcctcgagaaggctgactacctcaagacccaggtcggtaaccccgagggagctgacaagcccaacaagaagctttacgatccccgaaactgggtccgacttggagaggtcaccctctccaagcgagtcaaggtcgccaacgaggatcttggaaacgtcaacaggaactaagcgtctttggtgctttgatcttgaaaaaaaccaaaccattcactttctcccccttaatcatacctggttgaaacctgtagctatatcatgacttctctcagatctttttctattctcttttttccgtgtctttgtctggaaagtttgtgaattgcatatgagggatacaagatacagaatacagatagtagagacattatcgagatagttgcatattgagcaagacacttacagactgagccatgacatgccggggttatatgtccaacttcgactccaaaatctgtaccaaacaaatcggtcagcttatcattcattcgtccatgggtttcatgatattaacacggggttttcttacccggtaccgatgatcccgccggcacccttgtagtcggcctctggcccgataatgacccagtccagtagaggagttccggctgaacataaacaagtcgggtaaaaagatcaacaacaaacaatagcaacaacaacaacagcagtatgtttccaatagcgtgactcggcaagagaagccaatcagagaatgcaaataacaaacagaaggattcagcggtaccaagacaagaacgtacttcggacggggaacagtctgtacgcgcgttctaggcccgaagggtctgtccctcctagaagaagcgtcagaccggccggtcggataggatgcggatgaagggagaggacgcctgtggaaggattctgtcgagcatcgaacgtcgaggttctctcgtcagagaatctgagcgcgaacgaatggggtccatcaaaagttactttgtaaag

SEQ ID NO: 2886 - DNA, 19845 bp, Xanthophyllomyces dendrorhous
gtaagagagagagagagaacgggaacctatcagaatgatttattctctcctctcagttggcggaactttatttgccggttctacgtactaggagtagatcgcagtagctctgtagcgaaagagttactcaagccaatgacgacccaagagccttccatcaatggatcccctgcttgaatcttttttatcgcctgttccgcgcagatgatgaccgtatccaacctgccatacacccaagcatcgtgcgctatcctccgagctacagatgtttcgtgtttcgaagtcgagtcacaagaaggtgtgatgagaaccaacgggccctgggatgtgagaatttggatgatcggaccgtatacccttagagtataagagtcagtagcggagattaaacgccaagatgaagtcacagaagaccgatggaaaacaaggtgttcagaggcggcttcgatggatgagaagtcgatggacacataactgtcatctatttgaagacttgttgccgtcagtggcgattcttctgggaagagtcgacgagcggcttccagcgtaagtgaaagagtcaaaacgttggatgtcttgatttgagtgatattggaaccacccgagaatactcttaacttcactcgcgcaagtctacaagaagggtccccagcagatcgctttgtaagaaagaatgttggttgcagaagataagcgcgaacggttgctcacctcccggcttcattcaattgaacaaccctccaacctcctttggatcccatctcgtcggggtttgccacggttagtgtgaacccctctttttgatattcctttgaaagcccagtcttgttcaagttgacctccaagaaatcttgaacgcggtttgacgacaggatgtcatcaaaccaatggccttcgtttggaacttcgtacaagctgaatagatgggcgcaatcgtgtcaaaatgagcctaaacttcatctagacgtgtcagtacagatcaactatatgcgcggtttacctgacgtgatcaagacttcctgtccactggccaatgagtgatctcatctcacgtccgtgccatacaggaacctagattggcggaaggcaaagtaggatatcgcataaatgtgaattgtataaatgaggggtcattatctccttctctccaggccttcatctcaggctgcttcaaactcacgttatcatcgtccctcccatgtacaagtaacacgggtaaccaagctgcattacttgcatgaatgtcgttatcccacatagacagcccattcatcaaaactcccgccagcgccggatccgcccagtgcatagatgtccattgtgaatatcctacgtatgcttgtatcttgaggtaagccgcggcgctgacaactccttggaacatgtctggaaaccgctgacaaaggtacatcgcgccttgaccaccattggaatggccgatgaggagcgtcccaggatgaggagaccaatccgatacgcgatcgggactgccgagattgatcacagctgagagtgattgacgagcttgaagaacattcctgagggatggcccatgataatcgtatccccatgatctagtcaaggaaatgcaagtacagaggaaaggccgagaataagaacttctcggcagacgaaaggggcagaaatgagagaaaacaaacgtttttccagtagcgaacacaatccagcttgacttttgtcttcttatactctctgtccagaatgaccactcagcttcaacgcctgcaccgtgagtcgccaacaaaactgctgtctggttcccgctttgaagcggaggaagcgccattgcatattgagctgttccgtccacgtctcgaaaggtgtatcggatggcggggtatgtctcacgaagtgaggggagagaccaatgagagcggtggttgaccgggatacgttttgttataggacgatgcgaccgattcgaaaactccaggcgaatactcaaatatgtaatagtcgcaggaagaggtgacgtttggaagatgataataggaataggccgaatctggtaagcttcgatatcgacactcgatacggctagagagacatgcagtccctattgcaaatgatatcaatgaatatagtgcgaatgacaggcagggtctttgagtatcttcactgggaatgacctaccttgatgcgctcgataagagtcgccgctatcacctgcacttgcttttcctcagccttcagtgacaaccctgcaatatttccccagatccagccttgaatgacatctcccaatcctatatcaccctccatcatctctgcatcttcagaaagcgcatcggtttcgaatatggtttggacattcgatgtgggaacgaattctgacttaggtatcgtctcatagccaaatcggaactgaatggtaggaggttccccccaaggatcgccgaacattcctatagcgtacagaaaataaataaataaatacatgaatagaacatcagcttagagtatgggttcatacgctatatatcgttgatcgaacggcgcagataacttacggatctcgtacaaagctttaactaggacccagtattctccactctcgatctcctccgtccagccaagttcttgacttgggaagtgctttctaggcgttgaggtggaatatgtatacaaatcaccagagtgccactcaacgtgatctgaccgctttgttggatctttgtgtatcagcgcgaacgaatgagcttgggtgagatcaaagttcaccgtacgtatttggttcaacagagaagagggagagactgttgaaggtaatatcagggaggttcgtagctatacgagacaaggaaaggatgatccttcatgatcaatgaagagactggttacaaatgtagaaaaccacttgctcaccaatgtcatgaactgtacgcccgcccaaccttctgtccccctaagattggtccaatcaaccctgttccatgttactttcacccatccatccgcatcctcttgaaacaatgtccagtccgctttaccatctatcccgtacgcgcttggccagtctccagagccaaatttgagatcggcaaaaaaagcttcgtgcgtctggttcggaggaacgaatgaagaaagtggagaaccaagataaggaagctcccgagtaccgagtgagaaaggacccagtgcctgtatcgtagatatgtgaggcaagccaataagaaatgaacacaaatatgtggaacagatgagatcaagatagactacgggtcgtaagaaaaatggagtctgacctcccatgtcctagccgctgtatcagtgataagcgatcgcgccaaagggatgagactgatcgcgacactcatgtgtcggaacaatatggaagaaaccttcatctcattcagtagagggaagatggcatgaaatgaagatttgaatgtggaagagatgtaagtagatggtaagtgtaatggtatgagcgagcgattggaattatcagatggacaacacgacttcaccttccttccacaactctctacaccgacacacactgttttatatgaagcctggcgatttagcctatgtttctggtccgcctcctttcgtcagaactgagacttgttatcaatgccttaaaaagccttccttgctatccgcttcgaggcttcgagcctgttggcattgtggcaattcatactgttcgatccattgttccaacaaggtcctctcaccggtcttgaagccgggctctagggtcattgaaggttatcagaccgaggcagtgtgtaatttctgctatacgtttgttaagagttagtcgactcttccattcagatctgtaggcacccagtgtagccttcggtgtcgattgctctaaacttacctttaacttgcatcctcattactcatctcagtgtcctcggcttcacccgatgatcttcagagatgctcgatctcgcagctcaaaaaatatctgctggtgtataatattcctctaccgtatgtatccatcatgccctgtctcgttgatcattcatcatgtcctcttcagagttgatatattatgatcaatgctggtagtcctgcggttcatgaaaaatccgaactagtggatcttattcatcattccacaggtatggacggacatcagcctcctgctcgagaggtaggtatactgttgtcttctatatttgatcgttaaatagcctcattctctgtagcagccggactcatttcttctcgttcgtctctctctaccttttgtctgatggtaaacgactggatatcgtaacacaggcctacttccgacgaaactccgtcccaaaaccgtcagcgaccgctcgcccatcggcgttcgatagactcgcacactcattcgatcaagctttctccatcggggagtcatctgggtcaggcacttcaacagacagccaacaatcggcgttttcttccgcttctggatcttctcgagattccgcacccatccatcctcccactgcttccagtcaccggccgtccccctccgctcattcctattccaacagcagggcgcccaacgctccatctgcgccctcttatcctgtccatgctcgaccaactgcaactacgcaccctacatcctccgctgtaccggtagttccaccctcaaggcccaccagagatgctaagctcctcttcgctaacctcatagctctagagtcacctgccgaaaccgctcaactttatagtgtaaaggagctcaagactatcctgaccttgaaccatgtgcgatgtacgaacatcttggaaaaaagcgaattgatctcaaaagtatgcgatcttgtgagagatgaacggatgagactccaacgagagtcggagagggagaacgaagaggctagcgcacaagccaatcataacagtaacctcgaaactcaggaccaagccagtggggacgtatgggagcagattccagatcacatcctatccgaacatccttcgatttcttctgttccggctctgtccaactctggtgcgatgcgttctagtcaaaagggcccaactgaatgtgtgatatgttttgatcagtatgttttgactccttctctactctcgggataactgtctctatcatgtgagtagaaagatcatcgttgacctggccatatcttccctttgcattgcttttacatcaccagtgatgctatcctggcaagtgttgattgtggacacctcgcactgtgcacaggttgtgcagccgaggtcatgaagactagtaaagaatgtccgctttgccggtccgtctcgcttcagaatttcttcgcggagttagcgttccttctgctaatcctaacactttgctctttcagattgaccatcagacataacggattgatacgcatattcatctaaaaacacatacaaccaaagtaatgtgtcttagattgtatcattctcttcgtctctcgggaggcttgtaccttgagctttgatgatcatgatcattacagagtaaaagaccgtgaagaatcatctattcttgtgtttgaataagttttgtatatgatacactactttctgaccagttgagatagtacgattagtgttgggaaatatgtagtattgtgaagattaaagatattgggtatgagagacatgatgtctaaaattagtctacataggttataaagattagaaagattgaacgaaaattagataaattaggacctgaagctggcttcttcgagtggaactactcggtcatgacgttggctcatgaacgattgcaagcgaagattgcgagaggcaacagactcatctgaggaatgcactacagcatccacaatagtgccgctcccatacctaagagactgtaccatcctttgttcgatgataattcccgggagccgtgagaagatccggttacacccgccgaggtctggttcgcagacaaagtgaacacgttcacataggaaatctcgaagaacatgtcttgatagttggccgagttcaggatatatgaagagtctgatttggaaggtacgcacggtacatagattctcagcaaatgccacaacctaatctgatacagacaaaagtacggaaagaaaagaaacttacaacatgtatctggcgtttgcgggactgtacatccagtctgtccaagaattgtgctatttcccgctcgatcctaataagacaatttttgcagccaagacatcaatcagtagagatttgatttaaggtgaaatgagagatctcgcaaaatcagacaagacatacaccacaaagcgagatcttgagaacaggttagacgaaaattgataacgaatcagccgcattcaagaaaagtcttcttttctaatgcatggaaagtgatgctcacatcgatataagttctttgctgactgtgatactcaaacattcgattggagtatataagtagattagatacttcacgctcgtgtaaaaatgacggggcgagaaacatgactcatacctgataaagctattgatgggagaacatccatcttgagaccaagatacagtgggtgttcctaaagcggaagtgtcaatactcgacgtattaaccccaaaggacgacggaacggaggagcggttgtaaaaccatatgctgatattgtaccgcaaaacaacatatagttcagtgacgttacaaacgaaatatcacacaccggtgcctgcaattatagagagactctcacctaactccagtgtcctccagcgccatcacccaggcgcctcctccgttggtgttgaatccatctccgaagctgagagtgtcattctgatccacggaacatccgataacagacgttgaacagtctttactgttgatcacacttttcgatgaagcaaccgagactttcttcggagagcagctatgggagcatatggtgtcagagtgagaaaccacatgatgattagcactcgaagcactttgtcgtaagaatggttgatggctggctggcttctccttaccctgactttgtgtgtaacgccatctcatttctgtcaagaagacaagcaaccgagaacatcaaagaacaccgcagaattttatgcccaacaagacgatcaataaactggtctggtctgattgatagtgactgatatcctggcatatgatgggataggacaaatcaactcacgagctcatcctgtttattcctgccagaacgctgacctctccgttggtctcatcgtcggcgactgttccaaacccaggggctaccgaacatccgaaaggcagcctgacagcatcaaacacccagagcgttccaacgttataggtgtttacggaggttaaccgagtagaggctcgacttgcaggcgtggtgatgttctcggagtctacctgataggtatatgacatgaagaagtgttcaatgaatgtttgccaaggtcgatagcggcgcgacggtacgtacttggataatcgcgttcgaggcagaattgacagatgccaagagaggtgtgtatgattgattgacatattgaaccttcattcatcgaggcaaaccagtgtcactctatcagttccaaaagcacgacgtgtgaaacaccatctgtaaaagatgtacataccgaatttatcctgtggatcagaaaatgattaattgttgatatggctttgttgaatcaacgcgtgtcgatgaaagatgatttcagaagccaacactcactcatttgtattgaacgcgaacccgctgaaaaagccctggccagagtgactctcgctgatagaatacacactggcctcaacaacggatgtgaggagtaccagaatggcgtaacgataggaacacataactacgatgggctgagattgaatgaatgtttcgaaagttggtgtgttttatgttcttatcgatcaacataaagcgacgcgacggtgtgacaagatgactaagcaccatatcttccgtaatcttctctagcgttgatagaagctcgacggaggcaaaaagccgactggataagaataagcatgacccaatcgttatctacgaaatcccaaagtcgccgagacgcgacgcgacgcgacgagagagccacgcaatcttcataagaatagatacgtgagtgcagaggcagatgaagcctagaatatggaccccactgtcgatttctgcccggtttacaccgattgagcccgttcaaacaggccgaaaagatcgagagcgttcgaggttagcgtttgtctatttctcctcggcggcttcaattcgggacaatctatcttggcacacttttcattccttttccgcttttttgcttttttccaaagctcttctcacgaaatgtgttgccctcgaaaacataaatcaaagtgcagtcaaagacaaaccagaagaaaaggcagagcagtttgttgataaagccagaagaagcaagaagcatgacgaatgtgtatatgttgtgtgtatctcttacaaaaactgtcgacctcgatgaagatttaggaagaacgtcggaagttttcacatatatcaaccgtggtcgatacctcgattttcagcaccctgtcttgacgttctctttcgatctctctgtagcgacccttcctaacaaacactccgctcagagtcaaatgacaacaggatgttgtttttgtgcaactggaggccagcttcgtataccaagccggtcagatgatatttcgaaacgtcggaccgtcctgccgatataaggcttgagttagggttacgcctgaaagggcccctcaacaattcctttatcacaaggcagattggtcagccgcctatcgactttccatccatccaaatctcccgaatcgccaacagtgtcgaagctctcgattttgcgtcctattctgaacattacccgtcctcgtctccggattgatattcttcttcggttcgttgaaagcatcttaatgcccgctgtcgctaccgctagctcgtcggccaccgcccaggcggctgctgcagctcaaccatttcaatgcattgtctgcctcaaacgcttcactcgatctgttagttccttatctctagatttttcgagctcctgaggagtgactcaactctcagtttcgtcttttcttgagtacaggagaacctcaagcgacatgctgctcttcacctctcgtcaacggagacatttccatgccaatggtgttcggtgagctttggacgtgctgacttgcgaacccgccactacaagacaaagcacaccgagcgttttgaggccactcgagcgttagctgggcccagtaaaccaaaggccagcagaaagccatccagaaacaagagcttgtccaacgctgccccgacatctatagtttccaattctcctcccgcaaccttagggcaatcacctgaccaattaaaactgccaatcaacaaccctgctttcccaaatataaatgggcctgatggatcctgggatttcgagatgctgggggaatcgattgccaagacaggtatcagtctgcctgataatcatatatggacatcggtaggctccacatgattatatcagtagagtaagtttgcacggcgtggtaactcatcttggtttgctatttttccctctcatctatcataggatttcaactccaacccttttgccactgatccagctggcacgagtttatttggctctctccccagtgattccgggtctacaaaacgagactggtcagcgacttcaccaggtgatggatcgctcttcgctcgctcctcaacctcaccgggaaaagctgcttctatctacgatgactttgttccaacatcggttcagatttcaaaaggtgtcggccttttcttcaagcacgttgcagacttcctccccttccttcatcagccaacttttgatcctgctcaggccagtccatacctcgtccttggcttactctgtttaggctatcagtatggtgatgacccagctgcggacaacctcgaaggatcaggtcaagacctctcatctaggtgcttcgcccatggtcgtcgacttgtccagcaatgcgccgaggagccttctgactctgctcagagcttggagatcgtgcaggcatacctattgttccaggtgtactcaatgatgtatctcgtcggaagctcggatgggttggatatgcattcaaagatcgtgaatgtgagtgattccgtctgtgttcaactcatagttatgcttcggtcactgatgcctactataacttttatctggaacagatctcgcgatcaagcggactcatgcagccacttccgacgagttcgagactgatgccagaccttgagagtttatggaaggagtttatcaaggcggaatcacacaagcggtaagtgtctccctttaagttggctccgaataggaaactaatcaaacctttcatccttttggccgttagcactatgctcacactgcatcatatggatgcgctatggtaccaactcctctctgttcctcgactaatctcgcatccggaaatcaagcatagcatgccatgtcatgaatctgtgtggtcaatcgctaccgcttccgactgggcacaccggacgcttgtcatgaaaccttctgcgcctattcctatacgcttctcagacgccatcaaaaaggtgctttgtgcggcagaaacgggagaatcatgtcctgcagaattctacactgtgggcgtccttcatttccttacgagttccttacgcgaggtctctggatactcagcaatgacaggtcaggtcagccaggaacgattcaaggcaggtccttatctcaaactatgtattcttcatcctatcttcataccagaagggattcatgcttatccctccctcctcctttgcagacactttctacttcactctcggctgctgggccttcatttcgatccaatctccagactgcgtctgcctctcaacggctagtcctagaggcaacctgggagatggcaatgttcgagatggtgtcctggtcgtcggcgcatatgtcaggagttgtggaaagcagtttggatgctgctctggcaactgcgtaagtagtcttgattttgcaaatacatcaaataatgacacgggtctgactcggctctctgtcaccctctttttcttctccgcttctagctcttgtcttgcaaattctagcgggtttcttattgagcctgacagcgtccgatcacttcaagtacatgccaactggttccttctttacctcgatcgtacacttatcgtcgaccaggaaccaccttttgtaacattttactgcttcagagcttggctcctcgccttgcagcttcttcgtaatggtacaccagacgctatgtctatcatcggaattgcagacggagatatggagagtgcactgctctgggcaggccgagtgttcgaaaggaggaagaggtggaaggttggcaagttgattctacagaatttgtcatccctcgaggagctcgccatgtcgttctaggtcgcgaacgaagtcttgggtcattctctcctagccttctttcgcttgtatatcattatttatcagctttatccaatagacgagcattggcgtatttctttccttgagattgtatggttcttatctgacgagcgaacgattcggacaccccgattgaaggagattaatgtcaatggcaagtaaaagaaaacatcttcatcgaaatatacaaccgagaaccagaaattatgttacaactataagagactagcacagaaaaaagacgtatgagaatgaagactggctggcatccataacaagagttgaaacatcctttttgaaccctcggacccctctaagtgtggcatatcaatcaatttaaacagggagcaagaccttgacaccgaagtactctcggtgctgcatgagtttaccatcgatcataacctgatcagcgccgatagcgtttcggacctgatcggtcggatcagtcgcctctgcgatctgaatctctcgccactgctgattagtgggaacctattacataggaaagactgtcagagacgatgtgacttgcccaaaaaaaaaggatagggaaaaaaaatgggtatgaaagggaacaatatacatacaggcacgccggcgtccataagcttcttaaactctttgtatacaccctgctcttcgatgcatccttcacgctggataaggggcgaatctgtgtagcaaacaagtaggattagaacggtgatctcaatatagaggcatcaagcgtacataccagcagcaggcgtcattcgcatatctcccaccgaagagttgaaaaggacaagcgaaaggcgctccgagttgagctgatccgccgggggcttgtatactcggtgtcgggtagccttgaagtgcccaccagagacgatctcaagagtctgtaagagtcaagaaacgaatcagtgtctaagtctgttatctgtagcacaagatgatgatagctgacctctccaatgttgagcaccaatgctccagccttgtaaggcacgtaatgccattcctcatcctgtccccagatttgcaagcaggagataggaacggagaagagctatatagatatattactgattaggtcaagacacaggatcgtttgagaatcaagactaatcaagccaagtacataccatagtcaagagaccaaagtcagtgtgaccgtgcattcggagaccttttgaagcctcctgagtagactgaggagcaggtcggaacaaggcgtgtcggaaatatccttcgtcagtggcagagccgtctacatgagactgcacgttgtcccaaaggtagtcgtcgggaagttcaagaactcgagagaggagagtaagcaatcgtcggttgacggatccaacaagatactgtatgtaaaatgcggcattcatctgtcagatactcctaatcatcctcggcacatcaatgatttcagactcacgttgcagaaagactcaatctcgtccatgaaagggtgaagacacgaagggacctggttgatatccttccactctctgtttgataaggaaaaaagaaagataaagaacttgtcagttcaaaaataatctagacgaacaccttcgactgcaacggctaccacgtacctggtgtaccagttgaactgctcaatgaagtctgctggtccacggtgcctcttaaaaccgtaagggtgcttgtatcccgaccagactcccttagcggggtcaaagagaagtcgatccttgtcctcctcactgatatggtcgtaaaggtactgggcgagcgagaattgtcggttaagctatcgagagggtaagaaagtgcatattgttaagtctacgtgcgcagtattggtttgatcaattctcttatatgaaaatgaccaagatctcacctgctcatacgagattccgtagttctcgaggaagataaatccatcctctcggatagatcgcttcacatcctcaacaagagaggcaacgacagcggggtcgtcagaatccatcttgctaaggtcgatcgatgtaagctccgcaaagttatgagtctccttggtgataggaggagggatccaagacgggacgtgaggcttgccctcaaggctaggtgaaggagggttgaaaggagcagaaggtgccatagttgaagttatgtggaggggtagagtgattgaagttgtgttggagaattgggaaaggtgaggataggtgactttgcaagaagacgattgaggctcccttataatatgttaagtttggtcaaagcaggaggagccctcacttacatctagccaatctaaagatcgccagaagtcagagaggaggagcaatacttccggagcatcttctagaggacagccggctctgtgcaagtacagtcagatgtagaatccggcccggagatggttgatgattagattgtcgcggctagccgaaaatgagattgtagggaggagctccttctagtgatttgatcaattcctcggctcctcctcctccgcctgcttatcacatctccctcctcctcctcacatcgtctttagatggttttgtccgcagcgagtttgaccagggttgttgaccacaggactataagggagatgctggttggacagaaatcttgacaactttcgttcatcttctgtacatcacaacactctctttccaccgtatcaaactctcaccatctcaactcaatctcaagtctcaatcatgtctcgcgagctcatctcttccgacaagttccctaccaagccccataactgtatgttcttctcactttgcagaagactttgcctaagccttataggcggggaaaaaacctcggctaatgctttttttctttctcaatgtgtttttcttgtaggtcctgccgtcaaggttcccggacttgtcttctgcgccggacagactgcaaccggagagattggccaggctactgttagtctctctgacttttactttttgtcttcttcgaatcaaagtctgatgttctttctttttttttgtttaatttccgcgttcaaaacgtagaggaccgtcttgcagaacctgaaagaggttcttgagcttgctggttcttccttggagaaggtcgtcaagtacaacgtctaccttgccgacatgaaggactttgctgccatgaatgccgtctacattgacgtgagtattctagactttgcctgtggtcatgaatttaccgctgagctaacactttcttttctttttatgacaccagttccttccccagcccatgcccgcccgatcttgtctccaggctgtcgctcctggcgccggaacggttatcgagatcgagtgcatcgcccaagcttaaaattcaaatcattccactgtacaaaatgtcatgcatgtcttctttagagccctgatttttttggtcttggtatggagctgtgggtgctatcgcataagtttcgtcaaagacttgtcgcaggagacaagattgacaacggacatcagaatttccaaaacggtgcttttaccgctatatataaaatcaacttgtatgcactaatgcctgttacaatcatcaacaagaactggcttggcacacggcatgtaataagtcttcgttattgatggtagacgagtgccatctcgtctaacagaggcgtaggtttcgatgatgagtaggtggcgaccatcaaacgaggatacaggacaaaatcatggttcttcaagaagaattggaacatccgcagagaggcacgccagacatggtttgagaacagcagggctaagtttctgctgtatacccaaactcagcgtccaaatgtgcgtgcaagccaaaagagatgagtcagtgtcatcttaatgaacttgcacgcgaagaatgaatctagacaagcttcaaactgtttttctgacaatccacggaatatgtgttttgctagaagatatgctgagtcgtgtctagtcgtaacagtacattctatacattctacaagaagcttcatcgagcctttttaagacgatcgtacaacctcaatctcctgctggtaccacaagctgatggccttggtgtcaccagtgatggccacaaagtcgaaggttcccttggccttgttggccaaagctccgttgttcaccaatcggcctgaccactttccagctgccttagctgccttggcgatcttgtcgatggcagcaacaaattcgggctcatcgcctcgggcggggacgtaaccaagaagcgactgtgcgagatcgttaggtccaatgaaaacaagatctaaacagagtgaagcgatagcagggtcaggttcgaggtcgatatgcatacttcgaggacatgcgcgacttaccgacaccgtcaactgcgcaaatctcctctacgttctcaactccagccttggtctcaatctggacgatggtgagcaaggtctggttggccgagagcatgtactcaggggtagtcaggccgtgggcgatggaagggaaagcggatccctgacctcgaagaccctgaggagggaacttggagtaccgcacaacctgctcggcttcagcagccgtgttgatctgaggaatcatgacaccgctgaatgcgaagaagaggaagagaagaggtaagtccgaatgctcttgaatgtgaagatatacaacaatgaagcaattgagcctgtgagttgaaaactcactgggcaccggtatcgagagccctcttgaggatgtctccggtagttcctcgaactcgaatgataggactgacaccttgggcggcgatggcagcgacagagttgtgcatggcatcgtcgccgatgtttccgtgctcgcaatcaacgatgacagcctgatggatgtgtatagtcagcaaggttagaaaacaaaagactggaacacgcagaccaagacaattatcggcactcacgtcaagaccagtaagggagacgatctgagcatgtcgaaccgagggaatggccatgaaggtggcaagagggaactcgccggccttgagcttgttcaagagcctgagtcgagggttggagacggtagtagtgtgagcggtagggaaggtagtcatgatgatgatgagatgtgagaagtactgggaaagtagagttggtagagagagaagactaagatgttgttggtgaagggaaaaccaaaaacgaaaagtcaacaacgcacaagagctttatgtcttcacgcattggagggtgcagccaggaggtggatctatacaaatgacgacaggtacatcgagatcaaattaaccggttggataagccgtgtgatgccggtgatgttagatgagcagccgaaaccagagtggaaagtaaagcggagtgataaccagggaggagtgaagcgaccggaggcgcaggcgaaagaggagtgaggtaaagaggagcagtctctccgcgagaactgactgccgcggtgatctaactaaagtctgatatctcagctgtaatctggttgttatgattgatctctaatctacaatctaagatccgtgatctttgatcggtatctagatcccggcctaatctcttgtgttgttaacccgaggctgagacttacccgccgactaaagccgggaaaacaccggtcccggcccagtatcagaaataagcacacgaactcgcctgctccgcacttttgatactcccgtaggctcctccctcctcccttgagtccagtcatgcaagcatcgaggtcgattttcactcagggttctgtggccaccaccctatcaagcgacggagagataatcagcagtgccaggcgaatcatatcactctcctcatccctcctcatcctcctcaattctctctgaccctcctccgtagattgagattgagataagcccgtcctccgattggtgaggtcgacgaaaattggttatgaacccctcggattctcagcaattctttcttatcaccatccctcgtccttcaattccatctctcatacctacctatccacttccactttcatcatgaacaacatgccggaactcaagaacgaggtcccttctgggcaacccacaagatacgaagaagacatcgaaaacaagggtagcaaaggctctgtcgatgtcgacgttctctcagtgagagaatctagattaccagagtcccttcgagatatcccacaggatgagttggacttgatgaagcgcaaactagttcgaaagatggattgggtcatcttgtcagtcttaactctttctttccgtcctatatcgttcccgttgactgacgaccgagtcttgtcttcctactttcagccctatgtgagacttcaacatctactgtttgactctttttcttttctctcctgcatgtactgacgctttctcaatacagtattggagttctttacattctcaactatattggtgagtagcttcccctttgacaacaagctttctgaagagtcttctgaccttgctttcggccttcaccttcgtagatcgacagaatctttccgccgccaaggtccagggtatcatggcagatctcggcctcacgactgaacaattcgccacagctgtctctatccttttcgtcggttaccttcccttccaaattccctccaacttgcttatcaccaagatctcccgacccggactgtgtatgttaactctcccctttcgaacagaaagtccaactgtgtttctgacttcgcttcttctccacgaatagatatttgcggttgcacttgtatttggggagctatctccgccgccaccggttccgtcaacggctactctgagctcgtggctatcagagcctgccttggtattgttgaggtaagcttctttcttatcgtctttattatcagcttttttgcagctgctgatcatccacccctcttttatatcaggctgtcttcttccctggtttgttctctcgaccttatgcgcaagattgaaaatggttctaacatgcttttctctatcaacctcctctcaataggtgctatctactatctctcagcttggtatcctcgtgctgaactcggaaagcgtattgcaggtctttacatcgctcaacaattcggtaatgctttcggaggtctcttcgccgctggtgttctcaagatggatggagctgctggtgtacgagatgatcttcccttttcatgcaatattgagaacaatcatcgctgaccaaacgatttactctttcattttttcagatcgctgggtggcgatggctcttcattttgttcgtttcttgtttttgactcttaggtgaatataacacgtacttatcatctccttcttttaaccacttgcagggagggtagcgcaaccgtcttgtgcggtgctatcttcgctttcctcatgcctgagtaccctcacaacgccaagattttgtctcctgtggagagagatcttgcagtctggcgtatcgagtccgagtcgggagcggctgagggcacggagaaagaatccgtcctccagggcttcaagttggcgtacgtatcttctcaatcactactcttttcttcaactacatgctgatacttcctttgaaccaatagactcatggatggaaaactctggctcttgatttggatgaacatgatgtctcaagtaagcttgaagaaccacaacttatatgcaactacacatattgacaataaggttctctttgtcacaaacagtgccagggatctatcgccaacttcttcccaactgttgttcaaggtcttgggtacggacgaatcttgactcttgttctcactgcccctccgtaggtcccttcctcgtgtttgtcgattttgaatcttgactcacacgcttctttcctacagttacatctttgctggattcatgtacttcggaatctcttactactcagacgttagtagaaaacttcttccatccttcttcttgactaccatggctaatgctgaagtttttcacctatacatatagcgaaaagacactgtctacaggccgattttggtccttattgcgatcggtaagtagattatccatacatctttcactgtctcgaaaccaaccgtttcttaaccccttctctatccattcagcctgctgcatgtacatcattgccctcagcacgaccaacattggagcccgatactttgccctcatgtgccttcctttctcgtctgttggacctcagattttgtcagtctcaaacacgtttcttctcttccaagcatttgaaggaagctgacgcttacgtctgattttgcgctcataggatgtacaaggtcatcaatactcatcttgctagacctaccgctaagcgagctgcttcttccgcccttgtcaacgccatcggtggtaccgccaacatcgctatgagttacgcatacatcggatcgccccgattcaccatcgccttcggaactgtgcgttcaattttctttactatgcctctcgttttatctatctcttcttgttcatcttactgacctagcgttctctcgtcttttttttttttttttt

SEQ ID NO: 2887 - DNA, 2093 bp, Xanthophyllomyces dendrorhous
tttttttttttttttttacctcagctcctcggatgtgccgtcatgtttgctttcacactcactgtctaccgatggcatgtgctcaacgagaacaagaagctcgactctggcgaccctgatcagattgctcaagtcgtcaagcgaggtgttactgaggagatggttgccctcggatggaggtacgagctgttctagaccaccaagcgggtccggctatctcagtgcgcatgttaggtggaacgatccccgactttaaatgggggtcatactatagattctttggtttctcttttctatttttgaaaaagttgaagacggtcttgataaagaccatttctgggttctatttctatcggttgtttctttttatcatttcactttgtaacccctttggtagttcatccgttgtatgttcgtacatgttacagttattcaatgacttctctcatttgccgaacatatatcacgcatttagtagtgaaacagaaatgtatctcgagaagtttgcaaccaaactatcatgccttgtttttcatgcaattttctcttttagagtcctatcacttggtcttgtgtcttgtatctataagtttatagatgattgcatccacttcttacttatctgatcgcaacccattttggagtttctcaaaagcctcctatgctagagtgataccaataatttctgctcacttctaaaaagggaatgatcatatgcatatgactgaagatatgtattgagtatttcgcagtccgcagaccagagggctaaggacgagtggagccaagaataaaatatccagtctggttcagtatcagtgtctgtcaagggatctccgcccttgaagatggagaatgggtgttcttgtgtttgacttgggttttatgttatcaggatgagcttgaaggctcagaatcgcggtggattatggaagcgttgaagatagaggcactggcatagtatgagatgggaaggaaggttttcaaaacaaggagacagattccaaacttgaggaaaaagagcaaaggaaagaaaggagaagaactatggggaaaaggagagtcacaaagtacttgtatttcctcatgcctcgagcatggaagtaggacttgcaaggtgcatacaggtacagaaagcgagaaggtggaagatacatgtagccgatattgaacatatcagcaaaccctgtataccgcccggttgagtctctgacaccaagctgaatgcaatatgacagttgccgagcctttccgacttcacagtctggtacactaagtatcgttccatactttactccgacagattaagagtctgaatctcttcgagaaattaacatgtctgattgagccccctccccaacgaaacacgttaatttttagaagagattcagaccctcagtctgtcggagtaaagtacggaccgatacagtgcacaggttgtagacaagcattgcagtatatgtagtcaagttcaagtgaaacgaaaaaagaacgctatcgacataccccagcatatcagaatctgcttttgttgacaaccaagacgaaaggaggtgaagaaagaggaatatgcaatgggaatggcgagacttttatacgcaaaacactgattagtgaagccgaattatggcgaaaaagccgaaaaggtaaacataccgatacaaagatatgaattagtagagcacggtcgtctaatcatgacggcgaaggaggttaaacacttcgggctgtgttgccgagacaacgctgaccgaaggcagcacgtgagatacggcgatcggcgaaagacggtattggatatagcaatctagacaccaaccatcgagtgttgcgcgttggttgactttctatctcttcggtttctcgttcaacatgttatttcatttctattttctatatcatctttatttcacttctctctcgttttatttccgttctactttctttctaatttgcttccatctcgtttctctttcgtttgcatcttggtgatcttgtatatacagtagctactttgtttccttttcctttcttctttctggttctctcaatcaacttactcactgtgtgtgtgtgtattcttgttgagagaa

SEQ ID NO: 2888 - DNA, 308 bp, Xanthophyllomyces dendrorhous
cgcataacgtaatttattctgtttttaacgacagtatcagctcaacgaattgatgatttcaattgcatgatagcgatatgtgcgtatgtagtcacagtgctgttctagttgtagtgccttttttatacggcaagttgatgtaaaacaacatcacaaacttgtcgttgacaatttcctttcccctattgcacacttcaaattagtctactgactgaacatgaggtggacgcaaatgtggcgcattcaaggttgaattcagttttatctacactttcagtaactgagtatgctcggagtagacaccatca

SEQ ID NO: 2889 - DNA, 667 bp, Xanthophyllomyces dendrorhous
ttgacagattgataagatctgggctagattgttatgttcgctcaaccagccaacaacgataaacaaaattgagctggtttcatttgcagggcttgtaaacctcagttcactgcattcaaactatcttcgttgctgaattgttctgaagtcctttgatggtacactgccgttgtctctcctacatactaatcttcgcacgtacatacaattgtttagtcgtatacagagtgagcccttagtgatggagtcaatcttcattacgacgtagtataatttgtttgatacgtatagcgttttcgcagatgaattgtcacaggctgccatcgtgcgattttaagagtcaaaggcgataatgactgcgttaatgtaaagcagtgcaattttcatatgggctttgttcgtgattcaacaagctgtgtgatttcgatgaatgtttcttgaaaacgccatagtcctaccgtgatatgagcaacagccgatgtataaacaaactttttgttctttatgctgatacgtgcaaacagcttgcaaagtaaaatttggagaaacttataaaactaatcaattggaaggagatcgaaacctgatgatcacgaacttctcgtgcgccaacacatttttagaaaaacccagcgcacgctattcagtcatgctgatatcagtatat

SEQ ID NO: 2890 - DNA, 6669 bp, Xanthophyllomyces dendrorhous
aggctgtgtaattccaacaacatatgtgtgagggagcccaacatgcttagatgagaagaaagataagaataaagaaactaaaacgatactaagagaaacagccaggatggaagaagatatctgccaagatgtccactgagatagaatcagtcgaagatgaaacagaaggattgtaggaaataaacctaacatactgaattcgaacgaataattccaacatctatgaccatcttgttcccatctcatttccatcttggtgatctcgtatataccatacccagtttatttttctttttccttctcttttctgatcctctcaatcaacttattctcactttgtgtgttaacatttgtttgagaaaatcagctatttcaataattcaatcggggaataaagaataaaccagtctgagtgaaacaaaaactataaactcatcttgagttaagaatgatgttttattttgatccagcacatggaaacaatactctcaagtgctcttgagatttttacgaccgcgtgggattgatttacaaaattgacaccttccactcagctttgattcatcttgctcgacattatagcgcacatcttatttcattatggtcggtactcatgcatcttattcacttcttcgtctttcatgattcttcagtgtatttttccatctttttagtgtcattttcttgactacgttttcttgcttgtatcttcatcggtatttcggaatttattctacccgacgtttcttcatgatgttgacacgcgtgccatactgggtatctcaagtagagatacttctcaagactttgaaatatcattcctcctacatccgtcatgtctctcctttcaacagcttacatacacaccacttgagcttcaatttttttttgtctgagtcaattcatgttcagtgatatgtcgatagcttgggcgttgtccgcattcgaactttcatcacacctcgccgggtgaaacgcaccgaaagtcgtcatttttttgtgcattttaaggtgaagacattttgagattttcttcatcatggaagtgataggacatctagaatttatttcaaggataaatattgacgtatttcttcatgtgtgcttatgtttgagcaggaaaagactggaaaatatgtgagatatgtaacgggccactaattgaagtttttgaacacagctgacgagtggttccagattcgatcaaaactgaagatgtttttcgtctgatcgtgttcaattgatgagatactattcaaatttttaagaaagcaaatccaactcaagccaagacacaatgattcaattgaacatactttagcgcctagaagtagtttgtctcatcttacgtttgaacattgaaaaatgagacaaactggagtggttttaatacatgatgaacgaactttatcagatgcataaatacatacatgatcgaatagatagccatacatctcagttgtcaaatacaacatacatgcatattacttaccacagatgaagaagtccatatgttgatcaccaacgttctcacacgtgcgaatttggcttgaatgacttaagctgtgaatggctgatcgagtttgtgaaaacactgtgatcatgagtagaactcgttgaggtgttttctactttaagttcactcaacaactacacgtcggccgttattgtgactcaagctggcccacttgacgattgacaatgcaaaagattcccacaagctacgccaagcattgaaaaactacattgtctagctcatctgaccgcaagtaaatgagagtgattcaataaacaacttcaaagctcatgctcagccattttcttttctttacattggactaatcgtgtttcagattttgatatcaaagttagaatgcgagaaatatttaatcagcatttgtggtgaagcaatgatgatagctagtaaattctttaattgaagtcatatgcttatcgatgtaacaacaatactcgtagaacgcagtcaatactgaaggacgtcgttaccagctctgatgaagatgaggagacataataaatcatcaagtcgcattgatctacgtttcaggcgatcacaaaccagcacgcaacatacgaaagacatggtgtcagaaatcaaggtggaggcatgagacattaggtgaatgtttcgatgatcgttttgtatgccgagagattataactgatatgaattaattttcctatggaataagatactgtactcatatgccttaccattctcaaataagcacctgcttagctcgtcacctgattgcctgggtaaggttcaaactcataaactgataaattcaagtggatatcgacacgtctttcaaacgtttggaaaaaattagcaaagcactcacttgcaacagttgtgcatacgacattttcataaaggtataaccttggcagtgctgtaacttatgtttgcggctggggcgcctatatagtacggaaacatggctatgtagaactaggagctattggaacggctgtttattgcttgactcctctatctttgattgaaaacaaccgcgaccgaacaatctgccacaactgaaagcttggcacccacttgtcgcatgatctcagatatctcgccattattttggcatatgcaaatgtcacctttccaactgaaactgagtttgactattgaattattttacataccttgatagaagattaacaatatgtgactgtccttttcactcagatactaacaaacaatccgacccctacatcattgtctggaaactgaatcttttcccccagatttcgcctttacttcgatttcgagtttaagctaaagcttaaatttgaaaagtttatcgttgagtcaagtgagtgtatcatgggatttttgacagagaaatcatcaagtaacttgtgatgtgtgcaattttccggtgttttcaacaggaagtctttgtaataatgataaaatgttgagcttgggcaatactctatctcatgcgattatcgtgtcatatagggaatcgccaggtcgtacttgcacggataacatatcacaagatcgatgacttgacatatccttctattctctttatggacgtatagaaagcaaattgcagcacaaacttttgctgcacatggttcaaaaagaagaatggcgaactacaaagctagaaaaaaagatgtgttcgaccctcaatactttgtttatcataatcaggttgtgtctacttcgatatgagcttaaagattgatcctatcttttgtttatagacaacataccttcaaagacatagtacatgttcgtatagcatttcaaatatggttgttgaattcatattttatttggtgggttccagatgcatacctcgtaatgaaacctgttgttacttaagcaagttcaaccactacgattttaaattcgtattgtaacaacaccttggtctcccgctcaatggaaaagtacacctcagttccaatcagcagctgagattataatgtgttaccaaacgtacacaaatagacaaacctggcaattttgacgaagatataaggtgttcagagtttgaatgccaccaactatattggcaaccagcagcctttatttgtctcaaacagtatcaaagacaaacttttttacctcctctatgatggaaacctcatagtggcactactcaatatcaaggtggaaactattcatgaatcaacacgagaggaaatggtagcaaactaaaagagtttgcaatagattgcgtctttcgtatcgtttttgccatttatgaggtactttcgttttgactgcgaacgtgtctatgacatacacgactatttgttattctgtacttaataataccctttaaaaagatctgatggtcatcacggttgtatgttgatattgacaattcgatgacgaaatatttttaacatttcagcttagaattatatatagaatctcatcagttgacaaacgagaatcttggctaaagtttccttcttcggtaccggacctgccaccaatgcacatcagacacctggttcttttactttttcctgtccctgcaagtatgaccgtgaactctcaagggcttgttgtacgcagtccaacctggtgtttgaaaagcaacccgattcgtttaatgtatatattccgtatattatagaatcaaattcgtatcgcaacggctttcagaaactaatgttatgaaatgatgccttcttcaaaaccaaacataaaccgtcgattttagatccatgccggtcgtttgtcagcttctacggctcacacctccctctacgattgccgatacttcgtgtgtcattgcttcttgactgtttttacaatgcacgcagctcattacgcccatttcaaaaaaggtaaaacaccaataatggtacggtatcaagttacctatcattcaggcgcaaatcttcattaaatgatcacagtgaaccatccaaaatttacctatcagtaacaatataaaaataacagttccatagctcaaaacctgcatatgtccgtgttgacgagcttttccgaccttttccaaaatagttgacaagggtgagcttcatctccatcactgatttctgaagtgttatatcactctaactccataatacgcgcaaatctcacattatgaataaaagagtgacatcaatacctgtaattggtctgggcaatgagaacactttataatacatattggcatcaggtatgacaatcactagttcctttcagttgggcacaagtcatacacaaccatcaatcaataaacttttttatatagactaccaaaataatttgcaaaagctctacccacaatgagttgtttatatccaagtaagctcgagtcttaatctgtaaagaagattgttggatacattttttggatgagcttttgtgttttatcgatgatatgttatgttcattctgtatgatgatggtatattcagagaatgtaaggttgaacgtaataagttgttgatcgtcaatcagtcgacaaagaaataatttcaaactgcaggtctagtgaatcagaagatttgcgctgagcatacttcaagcctagaggtcagagcatatgatgaactggcagaaaacatcagttcattcaatcatcaaagtagaagacagatttgagagagaagaataaatttccacgagtgagaaagggagttgatcattcagttcggtatcaaatcattgccaaatacttcttcagactcaaaaaatgagaagcaattatcaaaagcaagtgaacggagaacattgaatggatggtccgatgtcatgtcataacatataacaagtaatccaatttgatgtaacactgctaaacataaaagtgcgaagctgtcagatttttgatccaagctggtatataatatcatgacatattcaactttgtattcgttctcctttgccaactaagcgctttgaaatatgttgatacaagcaatccattaatttcagctcaagcaaaacagtatggaagagtacatatctcatgtgagaaggtctttgacatctacagtttacccacacccttatatagcattgtctacatggtttatatcgctcaagatttcattttcatcataaacatcaattggaaggtgcgaagatgaaagtcgattgaatctgatgatgaaatcgatgtttctcaaacacatacaaaagacttgaactgatgcttcaatcttattgagaatgttcaaaaggattcgacccaggctagcttagcggacatattgcaatatatatcatcaaattttgaattcaacagaaataacgacacttgcccatatccatggagtgagacatatcatcgaacaattcaaccttgatgactgttaggttgtataattcataaattgctttctaatctgtgcagcgacttcgatttcacaattctttgtctcgaacatttgagacgatgtctgtcaacaaatttttctgagcaaaaacccactactatccatagatgatatattctatttgcaagatgactcagcatccagcacgttgcaacttactcaataaaaccagttcgcaaatcaatacaacggatactgaagggtttcactgttggccatatacccatctttatcgaggcatgtcagactcttaacgaagaagcatgagggatggtgaagagcgatgcaatatctttctcaaagtgaaaacttgtgactaagaagaatcacacttgacagcattgaaagtaaagacaggataccgagtacgaagctctgagatagcatgactattatttattgattgaacatgctagatgaatgcgactttctttcgcatcgtattcctccccatcggacgggaaatttcaactgtttggtggtagagctatgtgcctcgcgggcagtgtatttgaatagtaccgttcgagaagggatacatggaacgtcggatggatatgcatggtcgatgggagagccagtcgaaatgcggaattgccgacggctcgaatgatcttgaaaggaccaagtagcttgaaatcgagtttgtcactcggacggtcaggttttacattcacccgcttgagaagcactagctcgcctggcttgaatggaggtgctggtgttctatgttcgttcgcatacttttcctggagatcttgtgcgatcgacatgcccgaacgacagaacgctagcgtcttttgcacatgc

SEQ ID NO: 2891 - DNA, 676 bp, Xanthophyllomyces dendrorhous
acagcggcaagtcgacgatgtggtcaagtgagatcaaagaccaaggtcggtctggaacaggcagtgactgcagaagaccatacggccgatgccggcgaggcttcgatcgctggcagatatcactgttgagaatacttgaatatggtgcattggtttctgcttgtcatctatgtacctcagccttagctagcgcactctgccagctggcattcttctttttttcaagagattcacagtttgttcttttaagagtctccacagcaatctgtatgaaatgataccaaaacacaacactcagtatcacagattgcgtatctggtgaagactgagggaaaaggaatgagagatggagaaaagagggtttatatagacgagagaaggtgaggcatataagtcaagtaatctagaaagagagggactgagttggcccgagctggactgagttggcccgagtcagatggaccatgaaaagacacaaaaggaaggagaatagaagacacaaaagagaatcaaaccaactacgctgagcaatcaaagaggttggtatgaccagaagtgttagtaggattggattgtatataatatacaaagatagggaacaatgtagtagagtgctgtagtagtagaacgctgtacttttaacacatgtttcaacatgttctgcaagatagaacag

SEQ ID NO: 2892 - DNA, 430 bp, Xanthophyllomyces dendrorhous
atatattctaactcagcacacaaacagtcttttgtgatcacttatcatgatataaaataacaaacctgcaagatagaacaaatacattctaactccagaacacaagtaagctatcgatgaacacgatacaaaacaagagagaaagaaaacagaaaaatagatatggaccaacctcagcacacaaacagtctttgtgaatactgaggaagggaaaaagaaaaagaaaaagaaaggaaacgaaagcgtcgagcacagatatatgtgagagaacccaacgtgcttagatgagaagaaggataagaagaaagaaatacaatagggaacacttggtgggaaaatcgaaggctgggatgtatcttgatcctctcgattgtttctttgagacgatcgattcttcttaaataaacctaattataattctcattataat

SEQ ID NO: 2893 - DNA, 781 bp, Xanthophyllomyces dendrorhous
cgagaaaccgaagagatagagagtcaaccaactcgaaacactcggtggttgatttcgagactgctatatccaatagaaagaagctaaaaaggcactaagagaaacagccaggatggaagaagaaatctgccaagatgtctactgagacagaatgggttggaggtgaaagagaacaagtctaagaaatgattccgacataatgaattcgaacgaataattccaacactttccaccctccgaaccatcctgccaacgactacggtgtctgggagagccgactccggtttgctcttcgagacatgaagctctggacgatcgtcactggtgagaggccacggtcatctgccagccatccgagagcgcaggatgcatgggaccaagacgacgacacaaccatgggctggatccacaccaagatcgacatcgcggaggctaagtggctgaagccatgccggacatcggccgagtgcctggacgttctgaggtctgttcatcgactggaaggggtctcgggcgagtttctattgtatgagcgcttggaccctatagagattgattatactcatgaccttcgtgcacagctggatcagtttgtggacgtagtgaatgatataagaaatcttagagtgaaatgtgaatgcaatacaaatgaccagtcgtggagctttactcttcttcgggcccttcccagaactgcaaaaggcaaacagctcagaagaagcatcatcgcaaacgcaccgaaagacacacagggcaaagcgatggcaatgacactcgagta

SEQ ID NO: 2894 - DNA, 421 bp, Xanthophyllomyces dendrorhous
ttcacgtagccaacggccagccgatgaaagtcgtcggtcgaggccagatcagcttgctcagcaagccagcgacaggtgacgaacagtgcggattcacactgaccgatgtgttccatgtgctggggatgtcgtccgacatgcttgtatctctcgtctctcagccagctttgccggatcaaaggcatcactttcagcggcgacatggatcggatcgtgttcagagacaagaacggcatctttctcaccgcttcaccacacttgcaaagcctgtggtcgctcgatgtgacggctcggccgccggcattggctgcttcggtggtgccctgcaagccggagatcgagatcgatctcgttcacagacggatgggacatctttcgagatcagctatgcatgaccttttcgcttattctcgtgtgttca

SEQ ID NO: 2895 - DNA, 5773 bp, Xanthophyllomyces dendrorhous
tacagtagctagtttcttttcttttctttcttctcctttctggttctctcaatgaacttgctcactgtgtgtgtgtacaattgtttgagagaatgagagaattagagaattataatgagaattataattaggtttatttaagaagaatcgatcgtctcaaagaaacaatcgagaggatcaggatagatattaatttgagagggccagagaccagaaaatatagtctgagagaagaaccggactctcgttcaaatgacttcaccgataatatatcccaaagagctccctattgtattaagaacgaaaagtccatttccccttttatttcagcgattatcttcaccaacatgtctgggttgagattgatgatggttcaaatttaatgtaaaatcaacacagatcgtatagtatagtggttagtacttccgcttgtggttcttcaattgaaacgcaaagtcgcggacgacgggtgttcaattcaccctacggtcaaattttacttttcttcaggaaattgcgcattttgaaggaacggcttggctcaaaacatgcgtaggcacacatgactatgtataaccagtaacatatgttgagtaaacttgccataatatcgagactacggccctcgcatgagattaatcacaaaaataattgggggtacgccaactatcatagaaacattgagagcatagaaaaaattggcgtagatgtcaaggtcaaaactccgaaatcatgttctgacgtatcgatgtcgaaagaaacatattctcaagaacttcatggtgttatgttttcgaaaggtgagagagcaatttttggcttagcgaccaaaacatcgttgacaaagtcagggtcagtgaaaatagtaatgagaaggaagaaaaaaagaaaagacgggaagaaagaatgagcaaagagatgagttgttcacgaagagacacaaaacgagaggtagtcaccaaaacgaagacagatgggggtatgcagctagaatgaaaagaagctgtaccaagaaatccccgccggaacacacgacgaaatccaaacgtcttgtgatgggtaatctgtcgatgtcgacctactcaatcggataactcatctgctcggtcagccgctctttgatgagatgaatgatgagtggagacaagagttaatacgatttggtcagaaaaacaagaaagagatgtaccagacgacagcggttatgcaagtcctaaggttgtggtacatgaagagaacagaaacagtggtatgcagatgtagcatcgatcggatatcgttgtcggatgcgttcgttatgaaggcgaaacaatatgcgatgaacaacttttcacaacgcccgattctacgttttggttgacgcagaggatacgagtagcttcgagcattaaccaccacgaagcaactaatatacatcagcggtgaccatcatgaaaaaagggggctgttccaatcttcgacttggcctttacgttgatgataggatatctgatcgtctagaagaagaaaagtattgaggcgatgatggtaagtgggttttatatcgatagaagcactattggctataacgctttgcacaaagacgacaagtagatttatagatgtcgatattcgtacatctagtgaagctacgagaatgttggacttctaaaaggctgtcgatcactggaccattcttccaacagtatatcgacttaaccgtcgctacattgccttgctattaccctatcaatattccatgcatctgttcgaggttccgtgctgaacactccatctcaggctctcaagagttccttgagagcatttggacaatgttcatcacaacacttgagatggttgcacaaacaagaagaaaatcaataatatgtagaatacttgaaccggaccagaattcaaccaccacgaaatggttggtctatgtgctgctcgctcgcatccttaaatgctaccaatcagctcgagtatcaacagcattgagggaaactgaggtgtttccagcgtcaatcaagacaaatcactgatataaaaaaataccgacagaaataaaggatgaactatctcacaaaattgagggtgagagatgctggagtcaggaacggcggacgatcctgatgagtgggaagcacagcagatgatagacattgatagggcaaagttccagataccagtcacttctctcgaacaacatgagaaatacaccgccaatttagatgatgatgctcaaatcgaaaattagagaagaatgattgttctttgatgtcatcagcaaaaatctgtgagtgagggtttgacacgcagcttacagaagaagagaccatgtgaatataaatcgagacacagagaacattttcttgtatataaattggagatcgttttagcgttcgaaagttccgaaccaagaggacaaccagattttgatctggaatcgtcgaccgaaattttttgaagtcttgacgcatcaatgatggaaaatgctcagatttgattgcacattctgacgattggtcgattgtttctaaagatgaggaatccattagcctctctcttctgtctattgcgcttgaataaatacctttgagccaaaagcccatccaggttgcggcgaatgacaatcttggaacagacagatttcgattggccttgaaatagttcagtaatgactgataacgaaatcagagctctttgttccggcttgttaaggaaggtcactcagacgcggttccgatcttctcgatatctagttctctaatccctccgaacagatataaaccctgtcaaaaggtgtaagtgagttgattggaagaatcggaaagagcacagggcgaaacactagctattgtttgtacgagatcacgaagatgagaagagatggaagtgatagagaaggaacggatcgattatctccttggtcacttagataacgaaaacgtagattttatgttcggattattaaattccatacctgttatacattcgccacgcttgtggtcttggttgccaaggttatgtaaacaataggctatgtattatacctcttgccttgcaaagccatccatccatctaactagttgttccactctcgtacccatttctcaaaatgttccttgccccccttctgcttgcggcttcgatatcccttgccgtcatgcctgtggccaaggccgcttccggaaaggatgacacgagtacgtatagctctgatttcgaattttcatattcatcggttgtacaccggtgtcccaattgattttttgccctggtgtggccttgtatatcaaacaggtatccttcaatacattttcagcttggaaaagtacgcacatgtcttctacgagattacagacaactctctggaggattttaaaagaacatatggtatctgacgtttttttttcgtatcgaatgcagcttccagaacgcgttttactctcaggctctcgcaaacgtcagcgcttctcaatttgatgcttcagggtatgatgactgggttcgatcgagagttgttcagagtaagaccattactcttctgcttgacttgttatatcatcagctcatgaactcgccttggatgttacttaaaagtcggtcagcaacaagccactcatatctctcagcttcagacactattgggtgatgcgtccctttccccctgtacatactccttcccctctttggatcccacatctctcctccagttcgcgtccgacatggagaacatccttttcgcctgtacactgggctcgtttgttgatctgcaggggaagaacgccagagcaatcgttgcaagcctggttggaaatgaggcaagacatgctgcctggcttgattcggccgccctaaagagatcgccatggagtggaggaaaggatactattataagagatctttcggtcggaacgagctggatcaacccctatatcatcgaatgtccatcgagtaagttaacctttcttctgaacgaccgtcgtggatggatcaagacgcctaaagtctagatgctgattttcgatgacttgttcaactccatagccaatccgtccatcgctgcaacgacttacccttcggctaccttgcagtccacagccactgctttttcaaatcttactatctcctacacctcttccaaccaggcggagtcttgtatgtttcgtccacgcttgacatttatcttgaatattggcatatcaacgcgtgctgttcgctttgctgaatcttttttttgtatccgatttgtagtgatcatctaccaaggaacctcatccacccttctctctataacctcgggatcgggcactggcacagtgactttacctgcagatctgacgggaaggtcttatggacttgtcgtcaagactagtacgtgttccgttcccttggtctttttcaccaaagtccttcgttcacgctcttttcgcttactaacatgtttttccatgacatctcatcgctcatcctcaggtgctggctcaaacatcactgattcggatgtggtggctggtccaatcattttgaacctaggggtttcttccgacagcactgacgcttgatctgtatacttttcagccagtttgcctttaatctatcatactaatctgcttttagctacccaaatgcttcaatgacttctttcattcgctcatagtgttacaaatttcgatttttgatttttctatcttcaccccagcttatcattgtttttatgtctctccttttgcaggcccgttgaaaatatatcatcagtttctaattatcgctgtgacctctcgcaaatatgctactgcccctctatcatttaggtatcacaatgttctcaaatactgagtttgcgtatgtcatttgagaaggaagcgacataacccatataagactgaggtagagtagatgaatgaggagagaggagtgaggagtgacaatcgatccgaatcaagatcaaggaaaacatagacggattttattcaatatgggaaagagaagaacaaccaaaaaagaaaaccgaacttgacccataaaactatacaaaccgccagaaaatagtacagagaatcaaacatgaagaagagaaagagtataggacaattagggatgaatatcaattggtctgagacatgcgttctctcgtcttctgagcgaaggcggcggcctcgtcccgtgtgaaaccatataccgagcctttagtagtggcgtctggctcggctatcgcaaacttatgtgatttcgaaacagagatgaatgacaggcgaatgaaggtttgagatttgatcaatctataagtttcagtcgaggacgcgcagttagggtttggaaggtctatacgaactggattgaagtctttcttagagtccaggctggcaaatgtgtgattcacgaatcgatgagtggcctcatctgctcggatggctcgcagtgtgtccaaaaaggtagcatcgggaggaagtcgcctgatgaaggtgatatttgtgagcatattgtcagtaacaatttacatgtcaagacaaatgaaactgtgcgactgaagtcaagcagaccagtaagatatagcaatctcgggagcgggaagcttttcccattcaggtacatagccgttctcgatatcactgataattcttgtgctgatgaaatacgaaaccaatcccaatcgaatgattaacaaactaaaagactactcgagcatgattgcaacgatcgatcttactaagtaacgacagcttcttcctccaggcaggcaacgaatcgatgagccaccggcgtggaaattaaataagttatgaagaac

SEQ ID NO: 2896 - DNA, 15219 bp, Xanthophyllomyces dendrorhous
gcatatatgaagaccctctcagcacatggtccgtgatcgtctagagagagaaattaatattaataatgataaaaaaggctgacccttgagctcccagtatcaaagctcggaaccagagaggtggattagccatgctcatgaacgtcagaaggtggagacgttcgttttcagcttcagcaagaagcgtgtgaatccaaccaccatcccgtcgcactgaacgaatcaagatcgaatgcgtaaggactatgcttatcaacagatgatgccaaaacgatgatcaatcgagaagaaagaatgaaacgaactgagtcggagagactgaagatggcgcaagagaccgccaaccattccaggaactaggttgagtataaatatcagtatcgaagaaaaagtgggtattatcaagaatggttgtgttggtggatgaacgaactagcagctgttgtttctagaaagatgaacctctgtgaattttcagaaaaagtaacaaattagacgaaatggacgtgtgcacttgactagatgagcaatatgttgccatgaatactgacgacaagagtaagtaatactaaccgtcatccattgatcaggcgagagaagacagcccatttggcgcaattgagtgacgctgagttctttgtggtttgcgggaaagggaacatgtttgtagttgctgacaaggtcgaatccccatcggagcatcttgacaagcttggtggagacttggtcggacgtgttggtggggggacgatgaacgacctgaacagcatctaactcagtctgtcagaaagggagaaggaccggtgagctgtagctagcgcaggaataattgaagcgaagcgttcagagacgtactcgagtatagacgggattatgcatcacccaagatccgttagtgggaacagtcaaatcttgtatgacggaagctaagggatccgtatgagctaccgtcgttgcatctatggacagtaagcatgtttgatgagataaagaattgtgaataagaactaatccatattttgatacgaatatgatagaggacagaagaacggaccatgctgatgcatgccctcaccgccgatgacgccttgaaggtgcctttgtttgtcggtggtgagaggaacattgtccgcaagatgatgcgttgattgttgaccattagatgttgaaaggcgggtgttcgacgttgaatatgacctggagcagctccttgagattgttgaggagaagaagtgaactgttagaggtgtgagataggatggccgaacggtacgcgaaagtgaccgagttgatgcctggacaagacatctagcaagagacattgttggtagttgggcaatgtatatggcaggtattgtgatatagccagtatggagagaagcgtgcaatggtttgatgcaatggtcgagcaaagagtagatatgtatgtaggcaggatcagaattaagagctgttggtctcgaactatttataagtcagccaaatgataagtcatgttagtgtcagaaacctcagatcaacaggcagtacagtcagcagattcaattagacattgtgttgaattcagtaaacgcattagtagagcatgaacggaaactcgaagaagaggtgggaacggaaatctaaacggactgccgtgttgatgggtttggcgagttatccgtcgaccgagtcaagacagcaagtgaggaagagacagtcaagtcaggccaagcagtgaagccagcagggttagtaaccgaccatcgccaatgggcttccgtccgtccgcttggctttatcgtccagagattcatgcggggatgtctcgtctttcggagtaatgaacgccgtttcttctgtgtctttctgagccattttactacttgtgttcggcatacatatcatcgtagctgaatatcgcagctgaacatccaagcttgatggtcacctcggaaggtcaaccagttcgttgtcgggtgttgaacgggttatatctgcgcagcgtgcggcagtgtggcgtgtgtaaccatccatgtggtggagcatccacccacgcctgtttcctcgtgacagcggctagtccccagctggggctacaggacgactcgaaaacaaagcaactcatcttttttcgggcccaaacattgcaacgtcgccacggttttctctagtcagatatctgctcggtcgttgtcgtttcttgtctctttatttgttcttgtcctatgtctggtcaatcagcagcttcgagcccataccttcctaaccttcttcggaatggcaagtacatcgtgtttggactattgggcgtccgccattggggcgtcggagacagcctaagaagagctcttctcgaatccaacgccggtggtttgggcatgtgagtacactcctttacgtttctcttcctctcttgttattgcacatctcctggcggaaagataaagacgatccttagaagcatccatcatcactttgatcgcgagatactcaagcaaaagctcaatatgtcatgcttgccttgaccgtgtgttgtgattgaatccaccttctttagccgagcgttgcaactctccttcctattttcggccgtgaccgtcagcttgtttttgtatctggtcgtatacctgcctcggatcaagggagtcgtgcccaatgtatgtttagaaccatcgtctttactctcgctgattgcttctggttccatctcttcaccttgtcctttctcatttgacctgttgaattcccttctatctcatccaatctattcacagtactcgcgttggcaagcttcaagctcgttatccaccgtggtgccgctgctgacggtatccattatctctggctttgttcttctgatcgtcggtttgactaatgagcggtcgggtcggggtgaaaccggaggaaggctcgttagtgctatcgggggaggtcagttgctggtatccatctgacttgatgacgtcttgtacttactcactgcttactgctgcaacgcttgttttgttgatatctttcttgttcgtcactgttgattatcccagctctttctatctacgcaaccacattcggtgtcatcggcttgatccccagtccgaaacccgttcgatcccctcgagttgactgatcttcctcggtggttcgctacgtttttgtctttcctatcacttcctctctttcgaccatgatccctacctcacatcaaatttgtatctcttacttctgtctatcatttgttcttcactccgtccctccgcatcctggtgttcacctatgagtcaagattcgatatagatagacaatagttgagctttgtgatgaaacatagataacagaacgtataccacaggaccaacagacacgatcatccattgttagactcgcgaagatcaagatattttgatagattaggtctgcggacgaaaagcttctggtgtaggagagcagaaagcccacacgtatacgtatttacgacgcggagcgccaagatcgtggcaacacttctcctaacggtcctctctaaagaaacgagacacaatttgagtttcgatagccaccaagaaatggaatgagaggagtcaccgattagaaacgagcgacctcgacaaacatcagagagagatcccaagagttgaacgacatacatgcgtctcgaattttgcactctgatatacaaccaatctaccacctctcttacattcgttctgtttgaaagagggaaattttcgaaccaacgtgataacaaagtatttgacatatcaagtatcagttcactcatttgaggagcccagacgtatcgaacacaaaatacaatagaaggactgacccattcaatgcgctcgcacccaatacctccaaactacccgctctgccctccagtcctacgacctgtcgttcgtgcaaccctccacctaacgcgtccgctcctgtctctagtgtctcgttatcagctcttgccgaagctgccgttatggaagcttgtagacgagcttgagaccaccgttcgtaagactcgcgaatatctgtcgaactaagcgatcctggagcgtcctgtttattggcgagtaatagtaagggaagattcattgtttgaggagattccaacacagattctatgaagtcaagataaggatcaaagggacaagatgcattcagcttcctgttaggatattcaagagaccaagcatccgtagggatctgtaaatctgtgaaaagatacaaaccgaaaacttcccagccttcttctaatcgtgcttcgtccgcggcatctaccacgtacacgacggcatggcattcttcgtagtattttgaccagattgaccggatgtctcgctgacctccaaggtcccagaattgaagaattgtcgacgggagtgagatctttcccactaaaaaaatgcatcgcaaatgggagcccaagcacatccaaattcaatcactcagttctgagtgtaaagacttttgtttgttcctggcaaaggaaagagagacagacctccttgaccaacagtaggcgctatcttgctcacatctggactaggagtatttgggttatagtgatgctggctccacccgataaagccggcaaagttggaagtgattaggtgccaaagaaaccaggttgattaccaaaagaagtatgataatcacagacgtaccttgatctgctcaagcagtgtcgtctttcccgcattatcgagtccgattataatgacagagtaggtctcctttcgagtaagatgggtataaagccccgataagagatggtacatcgttcaaacgctgagtattgtacaagcagaagcagcgtatccttagtttggcaggagacaacgggaagatgaacgaatagaacgagttgatccaacccgggcggcgtgataattaaatatgcattgcacgtttaaactgtaatctcccatgcagactaatttatttaccgccgatcagtgtttgtttacacctctcttgtctgcaacttgcttgattgcttgcttgtcaaacgaacttcgtattgaccgtccttggttggtccttcttccctcccttccttcttttcttcaattgccgcatccagtcttacactctctcattaatcatcagtcgtggcctccttcgtttgagatgcccccttctcttttcctccttggcgcgttcgtcctcttatttggatcccaatcgttggctagcaccagcacgacaccaactggcaacacaacatgcgttgttgactctccacgagtcgaatggttcaataacgagctggccgaaaccccttgtaagtgaccatacgaaaaactgtctacctttcgtctcatgatagtatttcgacgttttacacactaaatactattggaacggcatacctgaatggcaccttcaatctcttcaaaaatcctaggtcgtatgtttgaaaagctgtacagaaactgcgatccgactttcaagatgttttcaactcatataggaaactatacgtacttcgctcaggtgggtcgttgagccgctatttttgagcaaagctcactggatctttactcaattttaccacactcttcattcgcggtggatttgagtaccctttagccggatgtagatgcttcgttcgtcgcacaagtcttttttccatcgtcatggaatcatcgaaaaaaccctcactgatatagtgcatcccgattcatcttcaaactgttaccgatggataaactcgcgtgtgtgtaatcagggatgaatgtgcttgcaactcagtcagtccaactctcactgttactgaacacgttttcaccggactgagagttgatcatcatacttcgcctttttttttgggagggatccgttaggtttcgttcgcgcttttccaagcatgtcgcgcgtaagttacagctctcttcgtattcgttcccctcctttctttgaatgctcacttaattccaacgacatggttgatcttttgatcatcagttgtcaatggggtcgaacaaattctggctcggtcgccgctcagaactacagctcgtggcttggttcatgctccgccgtctcatcaatcactataaccaacggttctcttccttcgacgatggcagctcaaaccataccaccttatgcgtttgctacaatcgatgaagtcacggatttgtggtcttacgcgtcctcttatgtgaatgcgactgccgagaagagctttgttgccgcgccagtaatcacaaacacaccaagcatcgggacgatcgtaggagccgttgtatgtttcgcctctgatatccgatcaagtttgagatactgctgttggggcaagaagttgcagaaactgaccgaggtgtaagacattgactcttaggtcggatccatcgcgggacttatcattctgtgcgttctgtacgtaaagtgcatacggtccagacctcctcggttcgttcttttgaatttcctcaatgtccttcgaatcgttatcttcttctgtagtcttttcctctttaatcaaccataggaagtcttgtccatctcgttgtacgataaacaggccaaagaaagctcctcggaataccttcaagccgctcaaagcatcagcctcagcattttacctcgctgaagcatctaccaaagcaaaccagcctgcttccgaggaggaacagcagcaccgacggagcgttcgagcaagcgtaataaacctctttagtggaggggttgatagccgaaaccaactgcacaggaaagatcaggagatggtatgtagaccgcttgtcttgtccttggtgtacaccgaagccagcgcgtaactgatcttcttcatcatgaaaaccttgcatgcaccaaagtactccatgtctccctcgacgcataatttccacccatcattccaaccctctcctctctcctcctcagctctctcttactcgtcaccaatcgttactaacccattcgcggatgcggtcgaagaggtcgctcctccgaataatgcgtacctgccgaattcgtctgagacctcatatcagcaagggtctcacacccgccagcgatcggtatctaagaaagcatttgaaacatcaacctccaaggacgctggtgtcggagattcatacatgcatactaggcaacggtcgacccaaattcatgttctaggtgaagctgatgaggaggacgaggatgaacacttttcccatgagcagagagaaaatcaccaggaacagagagaacacgtagagagttacacaactggcgttcatgacggacatggaagagcgagaagtttcggaggtggaggagttaacggcgatggaatggtttgtctctgtttttctgttttttatctctcgtgtccctgagaattgagcttatatcacactccttctctttgtcatcgtgatctcctctttcctttatcggttttgaatctcaaagtataatgtatccgtctagactgaccttttgtcccagtttcctgatcttgagttcaagcagctcgaaagtcaaaacctttctactatgaagtccagcgtgcttcgtatcaattctgtcttcttcctactcaatcgttcttgtctatttataccaaaagacacacgtctaccatctgtacagttatgttatcatatcggtctgttcttgcctctctcgtagagttttctttaactactgaattgttctagaattcactttcataatgtgagagggaaatgctctataattgctataataaactaacacatatcttgcaaacacgacgggttttctactgaagtcggctgagagaaccgacaacgaagctacctccactcccagcgacaaggccactgacaagtgagaaaacggcaattgttgaggcaagctcttgctccgaaaccttgagctgaggattcaacgatggagacgaagccaggatcatcacatttgatctgttcgaaggtttcagaaaggtcaataagaaagccagcactaaattgtgttaggaaggagagacgaacgtaatccagccattggataggcccaacaagaccagtcctgtcaagaacactccgtcgccccagggatgggttcctacaggtacttggtttccaaggggattgacgttgcagcccaggaagagaggaataaagatgaccgcacgaagaagagaggcgaccaatagttgaatgtgagatcgaatgatacagaaggatacagccaaccgccctatacaatctccaactgtgtttcgattgaggaaatttgaaatcgtgtggcagaagggatccgacgactgagttcgagcttctttgacggttcagaaaagaaaaagaattggacacgagacagacgaacaattgaagaggaaaaagcctattggaacccagacatcgaatgatttgccccatccggtccccacaggccgaaccgtgcttgtcactgcagggaacacactgagtgtgacagcgaacacaccaaagacagcaacattgagcatccagttggtcttgaacgtttcaaaagctgacgatttaggacgactagtgggaagaggaagcgagggagataacgatggcgaggagagagtattttgatgttgaaaggttgtggtcaagtgcttctggacaaaaagcgcgcctgttgatacggtgaaaaccagaaaagcaaccatcgtcagggtatcatagcatacatggcaactcgtgaatgagatcagaagctgtacttactaatcaagagaaggataccaacaaagacaaagacaacagtggaatgcttcatggaacttccttcatccgttcggttgccttttgggccgaggaacgatgtaacaacttgtacgaaggacaccgtgattgcgatcatgccgttacctaattgcgttgcaccaatctcttttggtccaaagaggctgtagagaaaaaagaaacagatagacatgagcgtggtcgattctaggctaatgagttgatcacgaagcttgtaaaaacatgaaacaatacggacctggaataagacattacgttggtttggagataggacactagaatcatggatcccactgtccaaattcctagtccagacagaataccccagccggtgcctccaggacgtacaagcaagacggccaggaggaagagtacatgtaagagtagaagcccaactaagctgatctggatggcgcgtgcttgagtgcgcgcttgatctttcggagggagaagtgtaatcgatggtgagggcagagaggtggttgaggcggtagccgcccgataagtcaaccagccgagggcgaagaggtttgtcagagtagacactaggctaagagttggtatgagtgaggtaagcaaaggggacgatggagagaggagggagattgcgtatgggaaactagaaataagaatcgaccatggaagcaagattgacgatcctaagatggcaaagggaatcgattgagaaggcagagaggtcaagacagaaggcgagagagaatcgttatcctctgaggaaagggagctgtagtgagtagaggaggagacgactcccgatgtcgaggccatggctttgctcaatataatgagatggaacgaggtggttagaagacgaaagcaatatgtttgaggacgcgttgggattcgatggactggctgaatttacttcacatccatccgttgaccaatgtcttggtcggaagcgttgagagcgtacgctctcgtcaagaatccatcggttgatattccaaagaatgtctacatatcatccaccgagagattgttcgtgtgattcaacacaccatgcaaagcacataggtcgaaagaactgacatgacagtcttggccctcgattgtcacacagcattgtcatcaaggatgggtatccaaaatcaaccttccactatcttattttgcccaggataccgttctccgcccatgtttcaacatccgaggtcacattaggagctgaggagttaaattctctccgatcaacacttcaactagacaaagaaattgtgttggatctactggacggaatggaagatgttgttcgagacttggaagcctcgatccagacagacatgaggaggaccaaaggccatgagtgggacattctggctggcttccatgcggtgccatcaatgaagtgtgtccctttcttcacttccatgaacgatttactctagttttatactcatgtatgaatcggcactgaatcgaacagacatctgcatctacatgtgttttctaaagatctatgctcggacatgctaaaaaataaaaagcactactggtcgttccatccggaaggagggttcttcctgaatttagaaaccgttcgaggttgggttgaaggtagtttgtatcatctttcaagcgcaacactgatgcacaaatccactgacagtcatcattgcttgatctggctgcatctttagaacaagacaaggaggtgaggcacatgccattgtaaagctttgtaaacttatcgattcgagtgctgagacaatatctctttattcctggactgctccaggttatggcacttcctgcttccaagtacgagcctattctgaaacaaccgctcagaagcttttggacgggtgaagagttcaagacgattccgaagctcaaggctcacttggaaagtaaattaaaagcgatcaagggagaaaaacggacggatacatgacccttcgtcgtgactcttgtggttcccagtcttgagatttcctgttcaacatattgtatatttaagcctgccagttctttcatgcctgctttcatcttaactagatagctcgtttggatcatccttgaccttttgcctgttttgttccgcttctaatggaggtgattgaattaacgctacacacgcgtcataccaaagattcacgggtgaagcctagcacagctctttacaaccctaactgcaaatgagttgaacctctcacctaatctttggaagccgtatgccatcagttgtttttctatgcgatctctaccttgcaccttcctgtgaatacagcgtgacgatgagctacgagcttctctcttctgacccggcgaaacattcatcagaccttcaacagctcgaatttgagccctctgatcctcctgggcgggctttacaccgaagatctaactcgaccctaaacgctttctcattcgacccaggtttcttgcctctgagtctgagtgctagcacagaggagagcaatcttgaaaggggaacaaaccaaagacaccttggattcttcagtggtacgtgtatataataagagctgaaacttcactcctggtctgtggctgacaagtcatgaattgcgttcatacgatctcatattgatgtgacgctcgggatatgttcatctgtcgaaacatcttaggtgtcgctttggtcgttggtcttcaggtcgggtcagggatattctcctcccctgtaagtagaaccgcctaatacactagctgtgatggaagaaaggggtggggggattttgatcgataaaatcgttttctgcggaattagggagtgatcgtccacagagtagatagcgcaggcgccagtctagttgtttgggtcgttgctggtctcctcgcttggaccggggccagttcttttgcagagattggatcagccatagttcgtcataattctttgttttactctcttaatgtattatcagaatggcgtcaagcttatctgtctggggattaatttatattgtcatggtagcctgtcaatggaggtgagtcgttgtacccttcatacgtgcagttccaaattcttgacttcaatcgaaaacgatatattcacagccctggtagttagatttgatcagtagactgatcaggatttcttctcttcccttctcttgaacaacctgattaggtgctcaagcgtatctagcatgtgtgtcatctatcatacaaaactatggtcaatccgtattgactttttcgtccgcgacattcctttgaacccatccgtcatccctttttcgtcagatgcatacggaccgatgatgtcgtatctgtactcttggacagccttgagtttgctaaaaccaggcagtgcagcaattatcgctctcatctttgggtaagctcctcttcccttcctgtccttttcttgaattcttatgctgatactcaacctaattttgaatgacgtacagagagtatatttgcagactattgttccatgtttcagtagttaatacatcttcgagtacgacgaaagctacgtctcaagaagatgtgcctgatattccggaatgggccgtcaaagcggcagccattggtgcattagcactggtcactatagtcaatatctcaaatgccaaagcaggatcgaacgtgcagatcgtgttgacggcaataaaagttagtggatttgttgagtatatgtagagatcatgggacgtgttccattctgaccttcttaatggccttgatcgcacaaaaatcaccttcaacacgcgcgcacaatcttcttccttagatatgcaccctactctttgttcttctcctaggatttctagtcttactctccccttcatcagaatcccacttgacggtatcgactttcttcatgggcacatctactaacatgggtgactgggcaatcgctatatattcgtctttgtggggttatgatggctgggaccagttaaactttgtcgctggtgagatggtggatccggcgcgggacttacctagagttattcatagctcaatggcgcttgtaataggactgtttactgtgcgtctgccctcacactttgtgatgtgttttcacgtaaaagaacgtacagaagcattgaaggactgaccccctgtctggatggtttcaaatcaaaaggcagcaaacgtctcttacttggtgacgttatccaaggaggtcgtagcatccagtaatactgtggctcttgtaagccttttgtatcttgttgattcctactgctcttcaatcagccgtctcatcatgtctttcacgccttaaatacaggattttggattagctaccctcggaccggctggggcaactgttttttctgtccgttttgtctcgttttcagccagaattctttaatatctacgataagtaacctaacgactggaaaaagtatttgccaaacaggttttggtggcaatctctacaataggagccttgaacggctcgtccttcacgtctgctcgactggttcaaggtatttttctatcataagaaacagcatcaagcgttgagatgccaaattcgttaaacatagaatactgatcacctgttcttgaaacactcactcctatgtttcttcagaggccgctcgggaaaaattcttaccaggtttcttcggaagcagtcatccaactcgaaatactcctgtcaatgccctacgtacgtttatctggtccattctacggacatctacacttacacaataatgtatatttactgacacgggcatctcctcaactagaaactttagtttttcaatccgggttaacggcgttattcgtgttgtttggaggaggctttcgaacattagttaatctattcagcgtagcgcaatggctgttttattttcttacaggtttgttactatcttcaattgccctcatctctctaaaggttgcatatcatgaatgaaagctccactgacatcgaccaagttgctcagttcttggcttgatcatcttgagatatacagagccccatctcgaacgaccctataggacttacatcacgactcctcttctagtatgtctttgtttcagtatatttttgtcccgtctgttgaaaacttccctcgaaatcagcccttgcagcaaatatcatcaggtccaaattaactaggtattatcttaaacattcttttgaccgggtgacatagttctgtacggtcgctctgtttctattacttatgccgatcgtggcggctcccaaagaagctatcggcgcattttgtttgtctcctcgtttcattttacatacactctatcataaaaaacgttgcctcaattgtttctcctcacttttcaacaggcttcatctcacttggctttccgatatatcttcttacacaaccatcgacaaatcatcccggagtatcccggacggacgcactcgtcgaacgtttacgaggtttctggcgaccgaaacatcgaggagttcagccagttagatcgataagggaagagcgtgaggaacaaacgggaatgttggagttgtctggaggcccaagatgatgtttgagctcaagcactacttagataggatttcatacagttttgagttccattgagtgtttatttaaattgcgctgagggcaaaggccggatctctcgggcacctatgtcatctgtgttgtacacatgatgcatatattatattaatcgaactctttatctccgaacacgcctaggccgacgaggaaaatatggcaactacagatatttcaaaaatgaagacctgatatacatctgatgaccgagcgaggcagatgatgcaatcaacatgttgatgctcacacctttgtccggagatagagtctggagatgttgtctacataattagacatagttatagaggataagaaggagaaaaaagagtaggagaaagagaaagaaaaataactaagctgcgtcctcaataacgaaagtaaagttcaaaactacgttctaggcaacgacgagatcttttccagctcctcgacggattcgaacgatgtcctctcgggaaagatgcgccttatcacactgtggtgatcaaaagaatcaagatgttcagtaccggtctatcggatcatcgtatatggagagtgagacgagcatcgatgagagcaaaggacaaagtaacgcaccatgcctcggaagatagaatccgttcggtcgaacaaagtaagtggagcatcgaattctgctacttgtccttggtccatctttcatatcaacattcaaaagaagaaggtcagtcattggtctgcttcagtacaagtctagaatgagaatgagcacgcacaacaatgactcgatcgcttcatgattagatatatcgaggggaaatattagcagctatatgcgttactggttcttactgactagtttatgttcgacgtactagaaagcaattgtagccaatcgatgggcgatggacaacagagaagattgcgagaactcggattgaattgctcgttgaacggtctggtcagtctcagcatcaactacggaaatgaaacacgactcagctgattaactctcgacaacagatatctcgttaaagaaaaaaaaacacaccgga

SEQ ID NO: 2897 - DNA, 3325 bp, Xanthophyllomyces dendrorhous
caatacgatgactttagcgttcttgacaagcgcacgagacaaagcgatcaattgtcgttcgcctgtgaaagccaaaataatgcgttgagatcccgaagcaagaggaggtttttagacgtcgcgaatgtacttaccgcctgaaaagttggatccctcgctgatgatggcatggtttcttttagtatgtagcttttgagtaaccatgtggagtggaaatcaactcactcattgactacggaatccaatttaaacttagagaagcgttcaacgacctcatcagaaacgtcattaggagccgtaagtcctgccttcttcaaagccatgttgagaactggatcctcaattgtttcagttggatccagattctgtgtgaccaaaggatggtacataagtcagaagatacatataattaaatcaagtataaaaagcgcaaagagacaattcaacatacctgacgaacagtccccgcgtagagcaaagcatctgtaagaatgagagtttcagtcagacatatcagtatgaagacatgtggatgatgtaccataaacgcgcgtgaaaacattacatgccttgaggaacgacagctaagccttgccgaagagcgtcaagtccaatttcgctaatatctcgaccatcgacctcaatgctacctccagagagctcgacgatacggaatagagcttgcacgatggaacttttaccagcacctatcaaatgcgaacacgaatttagagtaaacaaactatccactttcgaggtgaaaggcagatgattggagctcttaccagttcgcccaacctggagcataatgccaagagaagtcgtcagtgtatgcctcggaaatcgataggtttcaactatacggatgatactgacaattccaaccttctcgccaggtcgagttttgaaggaaacccccttaagtatttctggaagtccctctcgatatcctgattttcgatcggatttgattaagcatcttcagaaatttcaataacgccatcaagaatagctacgtactcattcggacgttcttgaattcaacaactccttgctctggccaggccttgggaggatcattggaggtctgcacagctccttctgggctgaggtgggcataatgagacactctttcggcagtattcatatcctgctcgacagtggcaaagatggtgacaagttgagaaaacacctgcgtgactgagagagaataggtaagaacaactccaagtttggaagggctgatagtctacgccatgaacaatttggagaataatcggaaatcgttagaacgcattcattcgagattattgacagaaaggaataggcctacctctcggaagccgacaccgaagagcccgattcctagaacgaggatatttcctaggaagtccagtcttacaccgagccaccgttgcagtgtgatcgtcatgaagtttgctcgattttggtctgttttggtcagatatcaatacagaactgactcagatgaggagcctcattgcagttgacgatgatagagtgtatactaacagtcaatcgcctcttctgtcttcttagtaaacactttctgttgtctgtaagcccggacactagccagacctccgagcatttcaccataacttgtataaacgtgactacgcaagttagaatctagtcgcttcacctgtaaaatgccagtcatttgtagtgagtaacacaagacagacgaggaaagcttgaccagttattaaaatactgacctctcgagaacttcttcgatagaaatcagcgaagatgtagtagagtacagccataggtgcaaagatgatgccaagataagggaacgtgtagaacaccagtccaattgttccgaagacagagaataccaaattgagaagctgattcaactgctgaggcagctgattatcaagggtcgtgactagaagagacaagcaaccagactcagcattggtcggggcagtaagaaaaccttagagtgtacgtactatctttagagagccgattgacgattcgaccctgatgccaatacgagacatagatcgatcaacttcagccatcacagacgtcagtggagtccaggtttcgacttacgattggcgtggtatcaaagaatgaaattcgactccgcatcctatatacggtgaattatgagaaaatcagtcttgtcgtaaaaccaggtcaaagtagattcagaatagactcacactccatgaagggcctcattgaagagattatacgaagcagtgattcctcgaagatacagcaagaaggtgccggcgaacatcaaaatccccgaggccaaaccaaaagatgcgtatacagcctgttgagaaagacaatgagaataatcgaggtatcttcagttcaagttgaagcgttgatcgaaatctatctgaacataccatataatctccctcactaaatcccccgatactctgcgcggaccagaacccaagaaagatattgtttccaactagagaatcaccaaatgctcagataaaatcagcctcacaccgttagcagtggatcattgaattacccgagaacgaacctgtagcgacttgcgccatagcgaagaaggacaacaagattggtgcccaccaaacggatcccatcgactcagcgtaatgctaaacacaggacatcaagatcacccatgcacatcacatcgaactattctattagcttcattaaaaatgacagaaagtattcagcaagttgacgaaccttgtacacttggccagataccgctcctactgctcgatcttcatcttgcatcagagcaactccaggggctgctggtgctcggacctttcgttctcgttcggccttgataacaggaatctccgacgcgtcattctcatcggttccgttctccttggcaatagatccgaagtcagcaatgagcttgctgaaggcttctcccgattgcaagaggtcctatcagacagaaaagaaatgaaagaaaagggaatagttgtttgaaatttagaatttggtatcatattggtttgacggcaatatagctatatgaaagaacatgactgacattgtaggttccttgctcaacgatttgccccgcatccatgaaaatgatatgatcggcgtgaggcaagacatctagatgatgggtcaccaagctggaagaatgtaaaaattcaagttcaatatatgccatgttttttttctaaaatccaacgagggacagtactcacattcgagttttgtccgacagaggaccgtccaaaaggcagtcatttaagatatgttttgatactagaacaagctcaacaataacatgtcagctaaggaataaagcgtt

SEQ ID NO: 2898 - DNA, 19327 bp, Xanthophyllomyces dendrorhous
atgacctttcaaaaccctagatgataagatgacacttcgacatacctttccacttccaacacttccaacgatacaaaccaaatctcctgaacgaattttgatatcaatatccaccagctcgaacggaggtttctcttcgttgattttgtccagtaccggcaaatcctctagagcagaactgccgttctgcttcttcagcttggcctcctttttcgccttcttggcatttgctttcttctccttttccccagcaaaattcctaccacctctaccaccgctattcatgactgctccttgagggccagaagtctcccagcggaaccttccataagcccgaacggcatctggagcatcagaatctacttgaagatcatcagatagctcttcggctagcatagtggtagcgattcgcttgagagcgaccatggcatcggtacaaatctgcacattcaaagagagaacagaacgaagaaggaagatatgtcaacagtcgttcaagttaaagagacagaggagaggacatacagtaaatgccatcttatatcgatcatgtttgagagttagacatcgttaaacataagattgtcaacttttgagagattgacggaataaaaacgtacaggaagcatcatcaatggttgtcgaataacattgaacagttgaagagagctataaacaaaaagggtaaaagaacgatcaagtgtgattcaacggacaagtcctgcgttggccacaaaccaatagggaataacgcacgaaaagataacagcagcattcaactcatgacctgaaagattataagtgatgaaggtcaatacagcagcggccacaggaacaaaggacatgcttgcctaaattactccataatcacatatgttcgccgataagaaaaatcagctcatccgacgtgaagcaggatataaaggaaagagaggaaagtagtgggggagctagacgaacagacattcccgctcttgtccgcgcgattgttttgagtttggccatttcttggccccgaagttctagcactcgtcctttaaagaaggcttcgtaagcgtataacttgacaacccggattccgttgagaactgataaataacaacatgaaagagtgtcagacaacggtcttcaatcatgtatagagctgagaacatgacctcaaccaaccctcggacaggagtctgacacgctgatcgacgatcttgagctgtccttgtcgagtcgagaacatggtcttgacaaagaacgtttgaataggtgtgttcaaaaccagaatctgtgaagtagtggagaatcatagaaggagacaaacttgctcagtaagaatacaaacccagataatcaaaactgattgtgtcaacgacatgaacgacaacgtacagcaactcctactaaagcggaatatcctagattgactatcaagaggatgacaccaatgacgatttgaatcgggaagacctaaagatcaaagacagtcatgagctgctcttgtgccaggaagcttctctcatgcggccgacttacccaaagtgcgtgaacaagaaacgaagcccactccataaaacttgtatcactgcatacgaacgtgttccacataataagatatttagttttgatcaaccgtcgcttgattgaagatttatttctgtaaaagacgaacctggcaacgagcgtgattagatgtccattagaatgtttggctctagaagcacccgaaagtctcagagacttccgagagatgttggcgatgagagaacttcttgcttctgagaaaaagaggatcaaaatgggtcaacactcataccatcatgaaaaaggaaagactacttctccctcattgagtagaagagaagaaggaaaaagacgaacgaagtcccaggacttgaccccgctgcatatattgattttctgtgcgtttgaaggaaataggtatagcgtatgagaaactcatgcgcttgtttatgggcgatttcctcttggtcacggaatagtacgaggtaagaacatacggcaaagactagcaacctcttgcatgacgaacaaggcaatggtaagaccgataccatgcccgattgcacggggagcgacgagagatgctttggtggcctcggaagccttggcccattcatagctggaggtgatataactcaacagttgtttggtcactagcggtgatgtcgtctgtagtaaggctgagataatgaagaataccgcagctaacgtagatcggggaagaagatgggttagctagagttttatcgaggcaagggtactcgaccgaaatgtcgatactaacaaagccaaaagtcccaactaaaagttttgagcagcgctcgaatcatgctttggtcgtaaacctttccatctagtcctttaaccttgccgccctccttattccccgtcagcttcttttcctttttagatgtctttttattggtggaagctgttgctgggctgggaagggtggcaggtgttgacggcttgtccgcattcttttccttattgtctgactcgacaagcgttgttataggggactgtttctgaggagctttgtatccctttggtcgaaggaatcgaggccggctttctattgggactcgatcatagaagttctgatcaagaggagaagaccgaaaggaagatataagcatgtggatagatattcgcatgtccgaacagaatacatcaacttacgttctccagcgcacttcccgtattggtactcagacgagtctcatccagcttccagagatcttgatgagagatattttgggatacggagcaacgatgacagatacaaacaagcagtgcaggtcagcatgtgcacagtacaatcaagccacccgatcgatgtggtctaagcaatctccagattgataagtttcgcctctgttcgaaacgcgtgtgcgtcctcggcttgatccgagataacgtacaacgtcgtaaacaccacatgtaggccaaatttaacgatgatctctttcgttaccagagatcctgtgggaacaagtactcatgaagtatacccttcaacagaggatgatcgaatgaggtagagaagcacagagaattggggaaatctcgaatggaagcgacacagaataaacatagaagaaacgtattccttacctccagcctccaaaggtcgggtgtagccaatcttgagaatcgggaaacaccaactgaacagccatcgagatacaatatttgccgtgacatctggcatcaccttagcctccacctttgggtcaggcaatgaggctggctttggcttgagaaatttcatatgtggatgtgtgaatatgtgtgtcgtatattcaagaagagtgttgaatgtggaatcggcaggtttcgattggttcgtggcgatgtccgatgagatcgataatgacgcgtcaaacgagaaaaccctgaaagaatatcctttgggcttccttatgagttgatagatgaagactggattgcaagaagtaacacaccctcccgagatctatttaacacaccgaacaagaggaaaggccggacaaggtatggatcaaatcgaccacctggttcggtcatggccgaagacctggatcgctcggtcatacgattcggccatagaccgggctgagaattcgattcggccatagatcacggacgtagtagaatctatcgtctggactagatggagactacttcagattcagtcaagtcaagtcaacctccttgatctgttctttctttaattgccctttcttcatggctcggttccgatatctcagtcattagatgtctcatttaactttcagaccggtcttagctgatgttcatatattttacattgtcaaaccggttgatttcatattgtcaatatagtgaatactcgagtcatctgcggacgagtcataaaagagatcataacaaagggcagtgaccgtcagttggtatacaggtcggcactggcacagcaacgaacggtcgaagagtggaagaagacacagactttatcggtatggttcgtgagtatgatatggtcctcgtccaacatcactccgtcacacctcgagccaaggtttccactgacgacggcctcgttgaaggctaggccactggcaacatcatcagcaaacaccgcgtgcgaaccttctccgcattctgtcagcccaaatgttgcatcagtcacaaaagggctcggctcgatcggtctgttcttaaattctcccgattccaaatcttcatgacttggttctgcctcgatctcagtctggaaccccacacgagcagggttgaaatcaagcaactggacttcgtaagtggctgctgggagaaagccatgcgccagtcgagcaggactccgcacgaagattgcccgataaccatgaacaaaggtaacctggtgaattggaaagtaaagacatctcaatactcagtctcgtcccgatacatatacggaagcgatgaggagagagaaaagtaagacctacccagtgacgacgaagggtcacctcgataatccgacattgatccagcccccattcactccattggataggatctgggcgtttattcacatgtgaacatttcaacctagaaacgggttaatatcgaccgatcatcagtcgcagagctttcgggatatagtatacgttattcagccagttgagatgattgaacgactcggactgacagatcgttcacaaacatctctttgagtgtatatatctgaaagcctcgtctggcagcaatcatgtccaccacaagtacacctttagacgggtcggtagaaaagtatctcccttttcgccaaccagacggaccatgaagaattgaaccacttgacgatggtggatcaggtcggatgtccattgagactggaatcgcatcctcgtcgtttgcgagctcgggcaagttgtagacagataccagttgaggtggcaacagacctgaccgaaaccgataggtagttaacgttggactttgggagtgcatcggtagggatgagatcaagtatccatcaggcgtcaggagggtgaatgagatgattatcctcgacattggcacttgactttgctgtataagtccgaaaggccatccgtgtacgatcaaaggacgatcagaataccgacaggataattctattccaataaatgttgatatctgaaattagtcaaacgtggacgtacacaaagaatttctcctgtgaggatatcccatgccaaaatcaagtcttcctcgccctcctgagcatcgatcagaacaactgccaatgtagattccatgatctggatcagaaaccttgctggagagatcatttccctatcaatttccgtattcatccattccggttgagcagagcgaatttcaaatacgttgcgtgcgagaccagttttcggagttccgtccattgataatagatgaacctcgtatgtcaacaaggtgcttgatatagatgtatgacgccgctctttgtttaaagggagagaaaatggtaagtcatgcgcaaggaaagcgcagatcttaaattcatggtttgagagaactcactttgaggacgtggtcgacggatgactgcgatcagatcttgcgcagggtcgagtgtcagatcgaggtagggccctatattgaaatctacagtttgcttagtagcaggtttcggctgagaaatcgatgggaaaggatgaaaatcaagacatgttggttttggtgtttgcaacgtatccgaatagttggctcctcggacaaataacccgttctgaagctcgtatattgagctataggaagagcaaccaagcaacaggagaagaccgatatcaatactcagtttcagcgtaccagtataaacttggagaaggatgcctcgaacctgtcgcctttgacttctatctcagaccaggatccgtctctgagttcccagtttcgctccctttgtcgaagtcgctctagcttgatcgcggttggtgttccgtcgttcgacggaccggtacaatcgattacgccatgtttccaacattcgatcgagtactgaagctgctggttctcgcttatcgcagtgttaaagagtttgcaaacaagtcgtagcggaatcagggtttgagccggaatatacgtgaggacctgtgtgcgtcacgagaacaaagcaaatatggttagacgtgcttataacgttcgaagcttagaaagtaagaatgccttcatatataatctgtatcatactcaagatgaaggtatcaacacaaacctttgtgacaatctcaggtggtagatccagcagctctagcatttcaaacatgattgagggaaacctaatgacaactatcacaacagggcaatgccagaatgagaagtgaaggatgacgagaatgatgatgatgccgctactgcttctattggaatgtgttgaagaatggtgaggaagatcgaaccaactcttgtaaccacggttactctcaattctcgactgacgaataacgactaatagccatcggccaccacactttctattgtgaagcactcacactcatacacccacacgatccttttctctctcctcgtttatccttctctcgtttgaattcgtcaatagaagagattcaaaaagatgcttggaagagtttcagtagcctgcaggagtgagttttcatgactttaaagagcttgttttcatatgtgcattctaactgttcatctgctcgcctgtcctctccaattctacttctccttcgtctcttctttctgactgctttcgattctccttttttaatctctttcttctctggatgtatcgctcgcggaaccttaacgatttgctgccatccttgttcatcttttggattccacaggatctggccgatcgctcttcaacatagctcatccgtctcctgccttccatgtccatgcatgccaaacccctttttctcgattcgcatcttccacttcgcccgttgatgtcgcgtcatcaacttctctcaatgtccctttgccttcctcacctccaaaatcccgaaccgtagacgaaaccgaatgtgtttctgcatcccttcatcctgcctccgccgagactaagccagagccaaacacccgaatcttgaaatctccaccggtgatatcgaaccgaaggctaaaagccttaaagtaccgtcttaaaattccagagccactcatttttctcaatctgactggtttcagacgggtcgtcattcctcaagcagtcgccgttcgagaccaactagctaagaaggcaaaaaaaggttcaatcgacccagcggaattcatagacgagatgaacaaacttgagaccgaaaggattctcaagatccctcaagacatacacgactccatccggtcgaagcggaagttttggaagtttatcagattgccttctttcggccctagatcatttaggaagctcatcagtgctgccagagctgcaacttccttttttatggtgactggtgaccgaccaaacctcgtcaaggccaaaagggaactcaggtttctcgaggaacactacatgttatactttccggatattgccatccgtacgaactctttgggagacgcgttcagcacgtttggcaagaaaaaggtcgactccaaacgtttagtgcaaatcatggagactggcggagtagaagccatgattgcctacaggaaggatcttgatagtgggaacgatacgtccccggtggtcaagacggaggtgccgaccaaaacaaattcacctctcaacaaaaagagagcaaagagcccgaccgagtcgatcccgactcaacgggaaactgttggtgacaggagtcagaaaatgattgagcaggctaaagatggtgtgatggacgttgtgggtagagttcaggaaagtgtcagtcaagcaatcgaatcggtccctacatatacttctgcctcgtcggccgaggtttcgaaaaacatggttggagcctcgtccgataaagacacaccgacgtcaacaaaagagcagggcagtagtgaacagaccaagcagtctcggtcagacccatagacaccctcatgatgtatgatatttgagccttgacatattgatgtctcatcaagtctacctggatcaggccatcagttctagacgacgagtgtccctcaatgcttttattaggacagatggtggactggtatatttggcaacataatcaaaatatatacaaaagggatacatcgagagctgaatgaatgggataacaattgcaggaggagcagagatcgatgaataaaaggttcgagaaaaaaaaaacagaaatacggaacaacactatagtatgactgaacgtcaaaaatcaacaagagaaaacaggactactaagaggagagtttttggtagaaaggccttaacaacctgaagaagcaagaaagaaagtgaatgcaaggactaaagaagaacacagagcaccaatctgtgaatagcatgaggaatagagatgttgaatctatggacagacgacaaagaaagaaggtaagagtggagagttgagtaagaacaaaaatgatgcacataaacaaaaagagagggaattcaagaaccagaccaattttcattttgaatgcaaggtcgtgaatgaaagagtgaattcttcatctcgcaggtaatctccccagccacaccttacttcttgtttttggtcgccttcttgccttttgagttctttccgttctttttcttcttcttcttactgccggagcctgaccctgagcctgaaatagacccgttgggtgatggcgcttgtccggtcgcctcatgaagcgcaggcgaggtcaagccttggatcgattcatcttgtagcccaggcggaatgcggcccgtggatgacgcggaagatgatttcctagtcagtagagcaaaccgtttggcgatggggcttccaggagtgcttccgctaccagcctcctcaccttgagctgtatctgatccgctcagttcgatcgcatctagctcttggggaagggagaggggtgatctggatgggctcgcgttggctgatccgcccgggctggaaccagatttagtcttgttaatcaatgaaattcggcgaacaaatttgttggattcatttgaaacccggcggcctacgtcggcgagcatcgtgcctttcttcttagatttttccttgcctccgccattgggagagaaatcggttgaatcagtagagagctgaggagaatcttcgaactgttgtgatggtaagtcggatgagactggcgaggtagaagtgggaaactcaagatcagatttgacagatgggccaactgtggataccgaggtgaaattttggttagtctcagattcagaggaggtagcgagttcattcgattgggcgtagtgagcagccgcgtcagactcaccacttgaatccttgggtaaagatgaagccacagttgatttggatgcaaacctctcctgaggtgcagtagtgtctgtggtgtccattgaatcggacacattttcaatctcctcacccgcttgagggccaggtggagcaggatgggtcacggcttcggcgtatgagaacggtcgagacgaaggcgatgcagtagtttcctcgattgtagaggttgtttgagcggagtcgttggtcaccttggaggcaatcgattgtttcgatagggcttgctcgtcaatttcgacggcggttgatataggttgtgtagtcacattcgacttgtcgctctctgcgtctgtaccagcaaggtcgttggccgaagtttcagcagacttctttcgttcaaggtccaaagtagatctttgatcatgaacatcgaagaacaacgcccttagtaaagcaaaacgatacccagattggcgagcgtgataaacaagaccaaacttactcggactcaggaacatctgtaaatgttccgtacgaggttccttcttcctgtacaccccgctcctcaacgccgttgtgatcccttccttgatttagcagaggcgcattttcttcatttgaagcatgtgcagacacattcgttgtagaacgtctgacagcaggcacgaagtcttgagcggggttgtgcagagcccaaaggataagaattaagagtagtagtcgaacagaatagatggacaggagaaggaaaaagggtagcggaaacgttgtttgaggatctttggtgtcttggactgaaaaggaaatgttgacaaagtacaaggatcaatgtgtgctcgatgtaaaccggctttatttaatgaggatatccttcgcttggaaggtggcctcatccgacatatgatggactcctcagatttataattttccgattagaacttcaaaggaaggagacaagagagagtctacttaccaaactgggagattctctctgaccctataagaaccgtgcctataagaccaacccaacacaatgcctttgcccaaacaaactcgccagcggtcttgttctgcctgatccaaactaaactagcggccgtgccccaaacaacaagatttgatgatgaaaaccatacagccagcacaggaggttggccatggtagtagatcaagtaaagactcaaggagagaacaaaagtcaaggtgaggagggccaggagaacagaagtaagtctcgagcgaactcggaacactggaatgatgacaggaacctggatatgttccgttcgatattatagataggccaagggagcagcgagacaaaggcgaccagataagtttgagattaacgtgagtacaggaatgacaggccaagttcaggaaacacccacaatcccagttgattcgtcagaagatgaactgtttgccctgtcactccgttcgatgaaggccgagaggagaaggataagaagaaaggcgggaaacacagtctgaaggacaaccaggaactcttgagagaggtgggtcatgtttggcgtcaagcgtcgttctctttgactaagataatcagacagcaaggatcgactaaagattgagggacaaagaaatggaagagtgtactggaattgtggatgatgatggtcgaggatgggttggagagatggtcggacggtaggacgacttgaaatttctttcagcctcgttcgtcagcatacacacttccatctacgccgactcattctatactcatcacatctatctctgctatcgctttcactgtccttcggaaaattgggctattctcaacaaaaattcatatttcgactgtaagtatatcaatagcctcagcacctttgatcgctgtcatatcaaaatcgcatggatttgtcgtcatccacgccggttctacctccgccgatctggccatatccggtcaccattcaaaagcttctactgcaaccaggtgatgctgtcaaacgaggtgatgtacttgtccgtagtccatccttccttcctgactttgaagcctgggctcttgaaggattgacattgcgacttctcttggggtccgaacactccctacgtgtccttacgaccatccaccagcttcattacacctttccagatccggagatcacgacggacaaacggacgtcttcgttcatttctcctcacacaggtatcgtagctgcgtactctgttcgaccaggtgaagttctccatcgaggagaacgacccgacggtctcatctggattacagaaaattgcacccatcctgttcagctcggtggcctttgcgcggtgtgcggcttggaccttacaggcacggatcatctggtggatggtccgtcggatacgagtcgggccaatattcagatggagcactcaaccacatcgcttactgtgacacgacaggtttgaattttttactccttaatttgaccaattgtgttcatccgtgaactatctcactaacagccatctcatcgacgcgtacaatctctctggacacgcgtcttcgcgcgagtacaggaagcatccagagtttctaacctctctaacgaagcgctgctccaatccagacgactctctttgattgtggatctagatcaaacggttgttcatgctacggttgatccaacggtgggcgaatggatgtcggagtgcggcctgtttggcggagactcagacggggtcaagaatggaaagggtaagaatcgatcgcgaaacccgaatggcaacgcgctgagggatgtgcagcgattcaaactggaagatgaaacggctggcagaagaggcagaagagaagaggatgattgttggtattacatcaagccaaggtatctctgcatcttttcttgtattgggtcgtgatctattgctttccttgcatgaacctatttgactgacccgtaacgtgttgagagtaggcctggactcaaggaatttcttcggtcgctgtctgagctttacgaaatgcatgtatatacaatgggtactcggtcctatgcagaggctgtctgtcgggtgattgatcctggagggaagatctttgggggtcgtatactgagtcgggacgaaagcggtagtgagttgtttcgtttctgttcatctattcttgagtggaaatgtgctcgctcacacattcctggctgctgactggatataaatctcattccaggtttaacggccaaaagcatcgagaggctattcccagcagataccagtatggtcgtcatcatagacgatcgatcagatgtttgggagggaagcaaacgcaatctggtcaaagttgttccttgtaagtagtcgtattttgtcaatagaccattcaaccgtccaaccagcttgctcatacctactgtgttcgattaccaatgcgtgtttgatcgatacaatatagatgacttttttattggcattggagatattaactcctcatttctccccaaaattgcgccttctcttccctcgccttctctagcttcgtcatctgttgtctctccatcacaattaatcaattctcaaatcggggcgagccttcttaaagaggcaactgaggttcaacatcaggttttggaggatcaactggaagaacgaccgcttcaaaaactgcaggacgagatcaggcaatccgaagatcgatcaccggtgccatccagagcatcatccattgacggaacagccgacagtgatactcagctcgatgaggaagaacagactggtgaagaagagcacaaagcattattgagagatgacgacacggagttgaaccgtatcgaacaagtatgccccatttatattgtcaagcttagtcaagtagatcagtagggcaaggactgatgtacttctccttttatggacattgcagatccttagagaggtccatcacagatactactctgccatagacgccaaagagaagatcaaaccagacgtcaaggtaagcgatattcctatgataacgaagacacgaaagagtctgacgttagcttgtcctctctataaaatctgaaataccaagccaatcctggactacatcaagcgcagagttcttcgaggctgtcgaatagtgttttcaggagtaataccattaggaacgaaacctgaattgtttgagtcccgctcgtcaatgttctgtcttagagcggtgtatcatgtctgattgtatcactgaccggggaatcaatgggtttgcttattattgtttttataacgaaatagattttcactatggagacttgccgttcaacatggggcggtttgtgagaagaatctgtctactggctcgacccacttgatagcacgagctgtttgtctctatttcttcttagtttattgaatgctttattcatattcacatggcgctgactttcatttgtctatctttcttgaaacctcacagtccggaactcagaaagttcatgaagcatcgcgtatggatgggggaggaactagtagaatccatattgtcacaccctattggttgattgactcaatagcgcagtggacacatcttccggagtggatgtatctcctgattccgccatcgccttcaaaacagaatacgcaagaggaaaccacgacgcctccaggaagtcctgtgcgagatctcaatgagggatctgactcagtagcggacacgggggaggaggagagtgagggagttgaaggggaagagatcccgatgttggaggttgtcgagtttgatagggacgcggccgaccgtgagctcgaagcgtttctagagggaagtgatgacgatgaagagcaagatgatgatgtagaggaagaggaagaggacggcgcgattgatcctcaggatgtcatcggcggtgaagaaggggcagtctcaaagcagaacgacgaatttcgatcacctttagctgaggtttcgacgcctggaccatccatatcaaaagccaagagacctcgtccgagtacaccctccgactcgagccccggcctgcctctattgacaagctctgacgcggactttgaaaagtcaattgattttgcatcacggtcgaataagtcggtattcagtcctgtgaagcgtgcgcgggtgatagaatcgggagaaactcatgtgggtaaagagaacagctcaaaccaggaggacaacattcaagaagaggggcaggagcaggatctagaccatagtgataacgacgacgatgtcgatatcgaagatgataacgcgtcggacggtgatttggacgaggaagacgaagaatgggcgaaagagtttgccggtagtcttcttagcgaattcaaacaaggcggcggagatttatcggatgatggagaaaatcggggccaaggtgatggataatcatgaagtatttttttcttgtgattcatattcatcatcatcattcattcagatatccgttgaagtcgccgtgatggccggacaattggcggacccggtatgcttaatttatccgatggctgtgttcagcccgatcggctcgcctgtgcttcagtcgagttttctgacgatatttgacacattgtctgcgacgagaccggattgcttttgatctgactgactaacttgttactgagctgcttggcaaactttgaaaaggcttggatgatggcctttcgacaagtcgttgaagggaacacccgttgtttgatttttgataacctcgaaccagacgtctcaatctctttccttctctttcgtttgacgtttatccatttctcctcggaccgactgacctgatcagtatagcaatggtgattcggaatatcattcaaagcgctccctatgacccgccggttagtatcccggttagcccggctcctccacccacactccatgaggttctctcctcattttcagcttgcaatgatagagatagggacatgttgatccagctaatagttgagaagagccaacaggttcgttcaatttcaacagatagcgaaagagtctcatttcatgttgtctaatattgtccttgctttatttatatgcacacgggctctcttcttggactatctttacaggaccaactcattactcggaatcaaagagctcagtatgaacaactcgtacaatccaatttgattcttagggagaacctactagatgcaaaggcagcctgcgaagcgaacgatcgtttcgtcccctttgccaacgtttctgtccatcaaccaacaactgagccggtacgatcaacattcattctcaagacaaccgtgcagatggatgtaccatccatttcctcctcttgcgcttccacctcattcttctcaagtcatctcgcgcaactgctgttggatactccttcatccgcctcaccacgcgcgccactccgagatgctgcgccccagcttttccctgtgccgtccgtcaaccccgaaaaaccatatgttcctcgtcggctgaattggggcaatctaattagcgagcctgcgactacatgtgccgcgcaggatacaagtttgccaagggataatgaggcaggagagaaggtgaaaggatcttctattcagcaccgacatcaagtctcgttccttgtagagaagtaaaaatcagtagttgatctactgcaaacggacaacccttagatgatctgatagagagaaaccctgatttatctatctgcccaggcggctctaccctctttgttccattcctgtattgtgttgtatcacttgttctaattatgtatacccatgttcttatgtcattcttttgcaaatagaggatttcgtcccaggctgagcagaggttccgtacctaagggtcggctggaagaggcttaggctcgggttttcgccttcacctttctttttttttctctcgcaggtgctgcacttcacttccatctgtgacagacttcgagatgctgactgactgtactgtaagtgttttctttctgtgtcgtctattgtctgtagttctttctcttccttcccacccgtgtccaaaacgttagagctctcaattatacctccaaagggtgtctctgtcaaatcgcgggaaaatcgacatcttcttttttctttctaaaaaaaaggaaaaggaggcagtcttcacctatcgatcgcctgtttggtctcttgctcacctcgaaaggggtttgagcgtttctttctttatgcgaataagggaagaggagactagatggatgtgtcggcaggagagggcgtgaagctttcttttgtctgccttcccgattccctctatacgggcggaggaggcctttctagcttagacatctctcttctacctcgttccctcttgtttttttgtccgtcttttgccgtggtgctttgtgttcaagaagcaagaaccaaccagttgaccatgcattgttttggttttttatccaccttctgacacaggaccggctcatagcctgaaacaacattgatctcacttttttcagattttcttttcatcgttgttcatatatacacttctcctttccattccaatcttcacccgttttaaaatccagttacctcacctgacaaaggattaacccatgaggctatcgggacagtcgacgggcagaatagttcatgaacaaaagaaaaccatttgttagttttggccagtcctgtgcttgctctttcctcggagggagtcggtacgatgatggagtgtcagaacccttcccggtttcctaaatttcctcagttcttttttctttttttcttttatcgtagataattgagtaattggtgatatgataatatgatatgtcgagtaagaagaactggatcagcaatatgtgcccattcgaaaagtgacgcgagaatcgctctggggaaataccttatgtccgtcttccccatcatcatcatcatcagcatcatcatcatcgtcaattaacactttgccactccaatctttgagcttgatcttggatcttgttcgtgacaatcaccttactcaatcgcgcaagccatctttgttctgcattcaattaccatcatgtccaacccatcttctttccttttcgtttgtctagggtaagcgtctagatccattcttagaagatgtcttttctaggcctcggacctagctatcagatgctgagcataatattgattcatctttgtcccaacgcttcgtgctcaaccccagaaacatatgcaggagccgtatgttctttatctctttggcgattgcttaaagcgttgaaagctaactccaccatggtaatgctcaaactcgccgttgtacaccgtccatctttcatcgtttctcggcttgacttagctatggccgaagcggtctttgcccacgaagcctctcaacgaggtttcgatgtaaaggttgattctgccggttagtctgatagtgtcattcggttttctcgaacgagctactggctcacaacccggctcggcccatcatggtgcctcgtgccctcgacggacataggcacagcagcgtatcatgtcggagagaccccagacgctcgaacagtgtcgacctgcaaggctcacgccgtccccatcaactctagagccaggcaggtcagatcgagcgacttcaaacatttcgactacattttcgcgatggacaagaacaaccttgaaggactgcagagggaagcaggcaaggtgaaggatgggaaagccaaaggtgagaatacatcttgatgttaccagtttatcttgttctatcttcgagcagcattgttttagaaggtggtagaatgcctcggcggccgtggcctggatagtactaatagctaccgtacctgttgaatgaaacctactggatagtcatgcttttctctgcatatggagacaagaagcctatagctggttcgttcatcttccactcgggtgcttcacgagtggcctaattgactgataaatatttacatatcctacgccgacatcaaaccgtctagatccttactatggcggacaagatggatttgaagcgtcctacgagcagtgtactcgatattcgagggagatcttagacaaggtaatgggtcccagcgcataaagaataccattaaacgtagaagctcaggtgaagccaattgtaataggaagctcgatagaaggtcaacagaagctcgatagatgattccgtgcaggacgctcatccgttggtttctctcatacgcttcctggtggccgaacactatgtcggctgtcaccaaagagtggcgagacggatgttcgttgtgaggtgtatagaacccaaatcatcgccgcagacccaagtatgtgtcatcaaagtacagcatacatacagcaactgagcagacaagcccaagacgaaaagaatgtaggcaaaggaagaagcaaaatcgaaagaagcaggctacaaagacagcaaaataaattgagtacagagaacaagagaagaaacccaagtggtcagaagggatatatgatgaggatgagctctgacagaactcggtgagccgcgaccggtgatacagaagaagatagacttggcgagagaaggaggatgaagggcggcccgctcggctcatgatatcaccccgtcgcttagaagcctcgcaatgttttctttctcagtcccaaatattttcttcgatcctggcggcatcgatggagcgatctcgttgttttggcctggtccaagctgtatgttgtgcgttcccatagggatcaatgtgaacggggtagccaccttctgggcagctccctttgttgcccgcttgggcgtctcctgcttggatccagacgtaggccggtgcaactgccgagacggtgccatcggagacatccagaaaggtccgtcgacaggcacaggcggaagaagagactggaccgtctggcggtcggacggagagaaaggcggatgggagaacctgtcgccaggctggttgactggcccatggtcgggagtggaagccacgatcacctgtgggtttgtgagtggagtccagtcgttgccgttcgtcgtctgagtcaagcccaggtgggaggcagaaggaagtgggatgacaggtctagctggctcggcagct

SEQ ID NO: 2899 - DNA, 17307 bp, Xanthophyllomyces dendrorhous
tcctcgatatcgcccgcctccatctcgctgactgccaggctgacgaccctcgaccgtttctgccggtgatcatccaggccggttgcatccatgcgggctgtggagaaaggcatggagaaggccgcggaagaggggatgggagtcgggagtgcaggatcagacaaaccggacgaagtgggagttgaagcttgcctgtcaggataagacctaccaccggtcaaggtagaagacacaggcgcagacatgtcgaccgtgtttctagcacgtttgcccagaacctgctcaacctgctccgactgcctctctaggtcaagcgacaagtcagagaccttcattgcttccggctgagaagcgcacgtctgggactgacacagccgagcctctagcctgtcctcgactgttctatcagctttaggcgggactcgatcagcttcaggcgggactcaaccatctggtcgaccatcgcttcgatgtcctccttcttgacagacagccgttcggcccggctggacatccgcccaaagaccatgatctccgcgccaatgaactcgacggtggcatcggtgcacgccagagcgtcgtagacagatcgcttgttgggctcggtctcttctcgtgtgggcaggtcatcaaccctggctgtgagttcggcaagagcatctcgtagctcggctaacgccgtacaaggacggcaatatcagtctcaggaaagagtagagaaacgaaagcaggacaaaaatcgacgataaggaccaactttcaagagagccctcgggcgctatctcagcatctatctgtgaagcattagacaagctattctcctcagagggaagacttgcagacgattgcaggcctgatgtgctgaccgagggctcaacatccgtatagtgttggagtatacggtcgatgaggttctttgtcttctggtttgctcctttgatgccgagggtctacgtgccaccggaccggagggatgaggcataccagatggtaaaacggaggcacgtgttgagtacaagtgtgagacagagagaaagcgcgcgcgcacaggagcagagacagaccttgcatagtttttgtacgtcagcccgctttagtttgtgtaattcagtagaggtaggtgtcatggtaatcattccatggatggttggtgctggaatgggtgtggaagattaagacgaggaaatggcgaagcgagctgaagcgagatgggtcggtgattaggtgagtgttgttggtgtcggttataaaaagagcaacattgtctgctcagccattcgctcatactttatatagtacggacgggaagtgaaaggaagcagaagtgaaagcgggaaggataaagaaatgtcatccaggtatggtgaggatgttgagcggagaaatcaggcgcgtctgccgtcgggttctgatgaagatgacgtggccaaattgggcacgcgtcaaggcggggggctcgttcggctcacgacttatgctagttgtcgcaaccctaggcctcaactcacaataactcagttgccaatgctcttatgctttcttgtcctgcccttgttcctgtgaacctcctcagtctctgctcatcacgtgctcactcgttatcttataggattcaattttaaaagcagaaccaaggagaatacaatttctgttatgtagccatgtaggagaaaagcgccgtgactgaatgggtcagggtggcctgcagtacgacgaacagctcggcaaacgtccgggaaaagataacttccaaaatgaagaaccaaacttgtgggatatcgtgtgatctttctacctgcgcctacaacagctcaccaagctgcgtcagatgatagcctccaatcttaacgaactggagaagggacaagacacggatgggcagaggagccgatttagagcgccaagcgctctcttgtgaagtactatgctttacattaaactctgatggataagaaattattatcaactctatcatgaaaaggagactaaggcttagtttctggcgagacgaaaatcatgaagagtcgtcattttagaacgcttcacatactagagggaggaaaaaatatagagtagataaagatatatctagaacagcgatgaagcaggctcgcaaagaaaatttattcatataagaatagagacgcaagggcatgaagtgtgaggacagatataagccagttgacaagatagagcaaagatagaatgaatacagatcagataagacgaatgattcagccgagagaccttgcacgttgaaggcctgtacacgaaaagggggtgatcgaatgagaatgagcaggaaggcaaccggattggaaaggtcgctctaggtctagaagaaatatgctgaaggatgtgagaaagaaagtaagaaagagatagagtcgggtcgtgccctacaagcggaagaagagtacaaatataggcccagatagaaaggaaggaagaataaagtagaataaggtgggattgattcttgaagatcaggacagagaacagagagagatgttgtgaagcgccccaaaggagaaagaaaagaagatgagacagaaggaaggaggagatgcttcaaagagcctcctctctttcttctttaaggacttcgagtcgaccttcggccgagcatcttctcttgcgttttcggtcggtctgccaatcgtccctgtctgaagagttacggtcgatagggcgaccgccagaagtcaacagagtaaatgaacggctgtccggtctttcgtcgacatgctcgtgtagaacgggcagtatcgagattgacatcgatcttgccttcggtctattcttattcggatgaagcacggtcgacgaagtcgtctctacgtgtttgacaaggcagaatagaataagaagtggagatgagtgagatgaacatgaagaatagagagaggagaattcaacataccctgtggaaacgatgtcgctgggacaacatgggaggagataggatcaacagaggcgaccgacattgggctggtcgagcgagcgcggggagcggtatgagacggaccgaacgtggacgggtcgtccgagccagtcaccggaagagggcccgggagatagggcgagtgaaggatggtaggtgggtatgaggtggaaggcgagccagagggaccggatgacagagacaagacggaggaagaggaggacgggtttgtagacgaagtagacgaaaaggacgaccgggatgatctcggtgggctgtttgacggcgacgtaggctcgtatcccattcgatcctgagtgcgtgagtgaaccaaggcaaggtaagaaagacgacgcaagagaaaaggagctattcaacataagaaacagacgaaccaatcgtctgagtaggtcaccgagggaaatctctattgacggcctgctcgaatgatccgatttgggtcgtgagcgatgttttctgtgagtatgagcgctgctcgagtcaacttgatgtttgtagagaaatccttgtcggtcgtcatcctcgctactctgttcggcttcttcgtcgctcgaactaaacggatcgacaaatcggactactctagagggtaagataggaataactatcggccgggcgtctgaaagaaggtccgacttgaacgagtctccacggcagacagagattggcatattatatgtgctgatgagagagttttctgagaagggaatgggatgggaaggaaggcaagtgggagaagagagagactctccagccggctgtctattgatgataaagggatggcgaaaggagcgagggccacaggtatgataaagaatagcagagaactaagtcgaacgaccaaaacgatcgactttggggtgagaaagagatagtgggacgactggaatgaaaccgaaaacgatacgatggggaacttgaggaaagactggggcgaggtcaagaccaataataccaatggtggtgatgaggatactaatgatgatgagaaggatgagaatattctggtcaaaggagaacagacgaaagaagaacatagaactaaaagaaaattacacgcggtcaaatgatcagctgaaaaagtgaggggtaatctttgcagagggacagggcaggtgcatattaaacaagaggaacgcaatagcaagcgagccttggaacgcttatcgttttatcgttcgttccgtcgcacgcccagagctcagtccggtcgatgcactggttggcgtgcatgcctggacgttggtatgtgccctggctggcccttgaagaaagctctcaagggcacacagcgtgcaatcagaggcttgggcctggtcgattgatatattgttccgcaggatggcgtctggctgttggcatctgacgtttgatccctgggccgctagcccaaccggtgtccctggggatgcaaatcccgagcccctgaccccgctgcccggatctaatcatagaggccgcagggctgaagagagatcgtcttatgcctgagagcatgtgacgtgttccaagaaagtgaaggtaagaaaagataaaataaaaaaaatgataaaaattttagaaatcatagacgataaactatatctatattcgctcttgcatttagatcacctcccaggcccagcccagcctccgattttatctgcagatcatccctttacttatgtacctatatagttttctcttaatttttgttcctctaatttcatagcgtaaatgcttcccggagcgcgatcaccgccatcacataatgacatacattcggaagagatttactgcgcacatcacatttcctgcgcactcgtcatccgatcaacccatcagataagattgtcttctgtgcccttaattgccctactgacgtgttaccatattaccctgttaccctgtcgcccggctcctccatcgtctttcgctagtgatacaatctaatagtcttttcaatctcctagtgatttagtagtcacatcaccggcctatgctgatcatgtctatcatgctttcttgccaaccggctctactcctgcccggcctccccacgctctattttccactcggcctgcccactctgtctgccagccaagctatcgtcgttcatgtcagcctcctttgcaacccgatcggcctcttcctgcttccttttcgaccagtccagtaaccaggatctttctgccgcatcctctcgttctaaacgcgctctccaatcgtcatcgccctccaccgttgcccctcctggatgtcgttgttgacgacgacgttcggtcgtgattctgatcactcgacagagatcgcgctcgagaattttgtccctaccaagcggtagccgtccagaaggcatgtatcccaacgtcacatccgcgcatccgtcagtgctgaatccaaagacatatgtcatatgcttcttccagttggtggtgtacaacaagtgcgagttccaagtgccttcacacggatccaaatgaacccagcgctaaaatcgcagagacaccagagcgaaaaatgaagcatcgtttcagcgagtgactgaccgcaaatacaacaaagcatctccatcgctagaggatcttgtcgagatagctcaaactttctaccaatgttatactcctcaacctatcacataaagaaagaacgtacccctatagattcagaatgatattcgttccagacatgatcttccaggttccacacgtaccgcgctcgaaacccggcggcccggaggaagagtgtgaatagattggcaaactctccacatcggcctttccttgtcttcattaacatccggcaatcactatgaccaaatcacaagcagacaaacagttcagacaagaattgaatcgctctcggtgcgcgcacacgcaaacgcttacgtttaggcatttcactcacttgtaccgaggaaatcgttcgatcctcccacatttctggcatttccacaactccactctgcccgccccgccttccacctgctccattagagagacttctccctgaccgatgcattccatcttgaccttactgctaccggctccgccactgccatcactatcagttcccctctcacacaactgacatcttatggggtccacccagttcatatagctttgcttaaaccagctaaccaaaagttcggccaagtgatcttgagagtgtcgacctgaggatcgggcgagcatggtcgctcttgaacgtaattcgtccaacggcatctgtgtccgtgctaatctctatagacgattcattgttcatcataaattcatattagacaaaagaacaaacgcaacacttacctgcagatccgcatcctcataaacatccattccattgtccaaacgtcggatcacaccgacgatcatcgactcgtccgcccttcttggtttccaggagagtgtgtttgccaggagcacagatgatcggaagagctcgctcagattaggttctcgaggcgtcccgtgggtgatgtgatgtgttctcaggtaggacacataagccggaatgaatgtcattgtttttctctttgtgatgtatgtttgtaggttgatgtttgaacgagataaccaattggccgtataatatccgaatcaactccttaatatatataaccgcctccaacattttctcgccttcttttctttcaccacccaaccctcctggtcgtctttccgttcttgcttctattgctcgcttcttcgtcgttccgaaccatcacagagatggacgtccaggaacagaaaacgtcgcccaaacgacccattaatccccctagaccgctcgtcctgcggtcgccaacacagattccttcgccctcgccctcgccctcgccgtcaacatcatcgtcatcatccggtctctcgtcccctccgagctcgatcggttcggccgaccacccggattctttcgagtcctacaccagacatccacccgtcatccgtgcttcagatgtccttcctatatctcctctgcctacacccaccttcaaaaacgagacaacatcggccttacagaaaagatgtccttcgtgtgttcacgaaccaagcaggaacagtccggagggcatcatgatttgttgttcaaattgtacgctatttacccggccttgctccaatctgttctatcgatcgtcgtcattcgtcttcccttcacttctgctctcatctttcttttgtctcgccttttcttttagtttcctttctttttcacttcttgtctgtcgatcaaccgagttgaccagccacctttcttcacgttccgcaggtctcgagttctaccactgggcttgtatcacagcacagcatcccgaatgtcttgatccatcccagcaagtcgatcaacattcgaataagccagtcaccgcagcgccctctggcacgaatcagagttcaagaacgcagattgacaggcccgaacggtggttctgtccgaaagcaagctggttcgtcctcagtgtctcttccgttccttcctggcccagacgcacagggttgcacagtcgtcgatagaagtgcgaaatgtgtcaagagagcctgacggaagtctgacaggccgtgcgtatccgtcctagttcatcgatagacacacccgatagaccagtgctcgaaaaagcttcctgcctggacaattcatatctctcgccctggccgttttcgaaacctctgcttcgaccggcttcccagcttctaccccgactgtcgtcttccgacagcagaccttccagaccgggcgtctcgccacccgagacgaccaaacgacccgtcccgccgcggtcgtcgagttggatcccacggttcgcctcgttcgagtcagtcggactcatccatcaggacgggttcaacaccatggacccatccgagctaggctcgacatggaggtcttttctccagggtcacccgccaggcgatgtcttgtttgagcgaccgaccgtcgtgcgcgctcagagagagctcggaaagcagggagaagagagcatcagtttaattggcggaaggatgccaaaaccaggtttaacgttgtttgatatctgtcagctcaacggtgcgtgaatcctcttcacactgaggctaatttcccttccttccgacacgaaactgaaatggcatcgttctatacctccccctcttcacttgcgtggtctgtctcttcaggtgatcaaactcagctcgaagtgatcgatgtcgagaccgccgaattatcatcctcaccgccaaactcgacgaaaccctggacgctcctcagttggcgaaattactttgagctttcacctctggagaaggaatccgtgggcttattcaacgtactgagctatgaagtctcagattcacccttaggtaaacttgtcaacccaccagaaatcgtcaggttcgtgtttaatctcccgagggggtttctatttttctgcttctcgtcctggtgaggtagatactcaaagaatgagtgaggggtctgtttctacattctctcacgtcaaacaggatgttagactgggcgaacgttgtctggccaaagatacgcaagacgaacgatcagaaaccaagggtacaggtgtactgtttgatgtctcccgccggttgctttaccgtaagtcttttctccccttcttcttctttgctcgtcgatcatttgaataagtcgattaatgcatcgtcctactcgtccgccctgtcttccttatagaactggcacgttgatatggcagggagtagcgtatattatcatatcctccgaggatcaaaaacgttctatctaagtgagcacttccctcgttgtattgttccctcctcttggtaggagaagccactactgacgctcatattccaaaattgtcatcatcagttgaaccgacggttggcaacctgaatgcatatcaatcgtgggcgggagcggaaccgacagacgaatggtttggacatggagtcgacagagttcgtaaagtcacgatctcttctggggatacactgtgagtttttctttcccttctttttctttcatgaacgaagatgaaactcattcgccatgcgctcttgtatttctttcacgctgggtgtgaccgtcgaaagactgattccgtccggatggattcatgccgtggtatgtccgatgagctttttgtatatcatcccaatataggtttccccccgccaacctgaaattgtgatttctttttatatcagcatacgacggaagacacgatcgcgttcggtgggaactatctgcattcttatgatatcggcatgcgtatgtaccccttttccatgctttgtcctgggagaagaaatctcgtggagaaaagtcactgtgtgaattgttgtctgagcgatctttctatctttcttgcatcttttcttgtgtccgtttcgttcaaccgggggttctagaattcaaaatcaaaaagatcgaacaagacttggggattcaagcaaatcatacttatcctcaatttcacaagttggtctatccttattctgccctcctttctttctgaatccgagtcttaaatcaatcaatcctgatcacgccgtttcgaaataaaactacatatataatctttggttcgtttgtgcaatcgcgcgaaacagactttgctggtacgccgcgaactactactgtacgatccttcgcgatcgaacccgtctgtccaatcgatccaaacctgggccatctccatctagcactcgttacaacccccactcccacttcctgtctccctctccctctcactcatcgtcctcgttctcattccttgacacacccaatttcacccctcggttattaagaaatttaagcgagctggcgtccactttactgctattcataagagaacgtttgaaacgtcatcatctaggatcacccgccggaaacggaggcctagaccaaaagacagaccagtcacaaggcggtggaggcgaggagaccgagtcaattccatggttccgaacgcctgacccgttcggactgatactcgaattcgcaggcagaatcgactttcagtttgagcttgagcaggctcggggatggcgatcccatcttgccaacgatgggtccgggcccgaggatcacagggacgaatgtaagaatggcgaagaactcgatctggacgggaggaggaggaggaaaccagaggaaagcaagattgacggatcggatcgaccggtgaaggccgcgcgaaagggacgtcagactgagagagcagagagcgagccggcgagacccagaaggaagcctggaccaaaatcaaagtccaagaagaagccgggaccagagccaaagatgaaggctgaggataaccccagtaccggaacaggttccaaatcggtggttcgtcgaagagtcggccggccgagaaaaaatcctctggtcccagaaccaacggtcgtactagaccgggaatcgaatactgaatgtataacaaaattgggaccaggaccaggaccgaaatgaacaaaacttggatttggcaggaaaggatacagcagggatgtatttcaaattcaaaatgtacgattactatataatctcctgtttctgatgaggaagagaaaggcaacgtgcatctctttcatcctcttagcaacctggggagagaaagtctgttgctctatgagaacccatcgacttccctactctctgggcgcgtcaaatccacctttcgaacagatcctcaataataagaccactgaaaagtcatagggactaggtctggagaagacgctgaagatgtgtgcttcacagaagacgtatgtgtgacttgtcaatccgcgtgccatcaccacgccaagctttgtaaatcgaagctctctctcaaaacgtttcgataatctcttttggatcaatcgtgcccgaatttctgtgatctcatgtttctgcgtgtccctctcttcatctcgatcatgaagtctctgttcttctcagtcaaattgtctgaagccgtacgtatgggctgacatgaagcaagcgaacttcgatacagagtttgcccttcgagagggaaacgacgcgtttggtagtctgtttctttttttactcgaccatgacgcgttataccctgacttgagaaaccttctccaatccgatgctctccaagaacgcagcgcgctatatctcatctctttcaaatgatctcactttggtaaactggcctttcacaggttctcgtccaccctcatgatcataagtcaacagggaaactgttcgtgaccctctcttgtttccttcttctcgatccaccgttgagatggggttcagacgagattgctttcgtcgaaatggatggagataatcctacacgaaggctgaaacaatcatagcggcgttttccaataacgaagtttgcttcagttgttttttttgctcttcaaatgatgatttatgagtagacttcgggaaggtggagattagaacatgaaaggggagagaggggaggttggaatatcgatgggacggaagaagaaggagaaaagaatatgagagaaaaaaaaatagaaaagagggactgaccaagtcaagcttcaacgctctgtaaagatcctttatcgatcccaactggaccatacagaaatatcttctcttgagacagaaagccgatggttcggctgacggcaaattccacattgtgtatattgggatagggacaggtgcgtatgagaatattgattggaggtatgtgtagtctagatgctgatttgatatgatcttttttcagtttcgaaatttggtcaagaaggacaatggtgagtcatttgttggtgacaaagacattataggcagggtggaaggatgaaaacgatacgaaagaagagagcaggaaagctaccttgatatgacagccatgggagccaattggtaacgtattgatgggatccgtcgtcggtaattttgtagcagtcggtatcttctcgaattctacatcatcttgctatgtgtgatttgatacaaagaaagaaaagaaagaagcagcaagatggaacgttagcatgtctctcttttctgagcgcgagagtggaaacaacttctggaacactcaaaaaggaccaaacgaacgaaatacagttcatatgtcgaaagactgatgtttttggtgcgattggctttgagcaacttgtttgttttctacccggtttcgaatgaatttaaaattcataatcagaagaaaaagaataatgtcgggttcaacaccaagaaagagggaggatgatgagaaaccaggaaagtaaacgaccaacactattagaaaagccgacgtggtcctcggcgaggtgagctgagatgatctcgaaatgaggctgtccaagatttattagacatgtcagcttgtcgaaagtagattgaaagaaacagaccaatacagcaacgacaagacgagacgaaggattgagcgcacccagtgaacgccgacagccatagccagattcatgagactacttaactcgacctgaaagacaaatcggcccagatcgaacatttcatccggtgcttgttgactcagtagacagacggattttgtgcggatatccaactcggaaaaagtatgatcaatgtattccctagtgagcggaccgtttgctacgatctgcgtgagagaaggatgatatcggggtaagtttgaattgaaggggtcttgcttgaatgaaaaagtgtgtaccttcaagtaaggcgttcgttcgagagcttccggaaacttcacgagcagctgtccaggttttgtcttatcagtgcaaacccaaaaattgcaatgagaagaaattgtcatgaagaaagcatgcaggggaagggagaaaaggaaggatgaacatccaaattcaactttgcgctataggaaagaaggagagtcacgacgacgatagcgaaaggaatgacaaacttacgccgatatttgttctcaatggttcaccagggaggacagagggtttcacatatacgtatggcctgtgatttaaagcattcagagcccggtctttgtacgcttgagcctgtagggaaggtcaggcattcagttcatcattgacgatgtaagggcatgtagatcttatgaacacacggaaagagaggctcacagcttctagaaagaatttgtccaagaaggcaaagttcccagtctggtcctttggtttatctggcgacagattttcagcgactctcaaagtggacgcaggcaaggcttctgttgaggatacaggtaaggacgaggacggagagggtttggcgagtggtttggtcggatttcgaaggcgtgtacgatggggacctttgagattgagagtatctgacaccgtgttgagctcccggagagagacacaactccttctggacgagctggctgaggaacgagcgatggcgagagtagagaacatggtggttcaagggatgaaccgttgagtcgtgttgtcccaaaatacgaggacgaggggatgatgcgtttctcttacgtaatcaacctttatctaggtgtcagacgttgtagcataatccaacaaatgtgaacggacgtcaagaaaagcaagcagtgacagaagagaaaagacatcggcatttacaagcaggctcgaagaaaatagggatgtacaacgaacagaggaagaagaaagaaagttaatgggtacatatgaaagagcagaatggtcgagaatacattacaaggctttagaagagatggacggaaagagtgataaaagaaacaagagaaatccctagtacgcctccaggaaacaggtagaggggaacagggaaagatgcattgaaggaatagaaagagtaaggacgatctctacaggtctcgcttaccgtccctaccaccggggggtacataaggtgggcagaggatcttgtcgaactttgggtagggcagcttggcagagtcgctaacgaacttttcgataaagatctgtaagttccgtcgcctgaaagcgtcaagctccgcttctctcttgtttgcttccttagaccggagcgactggagtttccgttcttccttcgacggcctgggagcgatttttttgaggcctttgcgggagggataaagtgagcctggccatccgtgatgaacggtaggtgatttagtgatagtctctggagacaagctcaaaacaggactgcccgctgacgaccctaatgaggagtaccatctgcaagccatgctcattgaaggtctgtacaaacacggatgcatgtgggtgtgagtatgataaacaaacaagacagagaaggatacacacaaggcagaagggcgaaagattaatataaaaaagcactgctcatacctgatggaccgagagatcactctgctagtttgctgagctcgttgcataggagtcaatgtggaaagaattgagggaacagctggaagatcagtgatagaatgggagatgattggtgagaaagagatgagagattagagactgcttgatgaagagagcaggcgaaggggttgctgacaaagcaaatagacacttgactaaattaggaacgttcgtcgaacacagggtttggctacatgaaccaaagcggtgcacaatatcacaaagcggtgcgataacaaggctcatcctcccacagcacgtgaaccgtaaccctcccgtgtgtggtctcagtgtttccccgggggagctttcgttcaatcaccctcacttatcaccttgaccatcctcgtcttcatccctcttctacctcgcttctctctgggttgatctcttctaggttctgtcttcgctctctctttaataccgagatcattccgtggaggacaatcccgcgtccactcaaaatggctccaagaaagatgctgctgctcgtcctgctgtcctcgggcatgacctcacttctcttgttctcgttctttcaaccaccaccgctccctctcccagagttcatgtccatgaatgcaagcccttggctcgagtttggaccagatgaacagtgtgtaagtctctttgtgtttcgttttcccgtctctttcctcgtttttggtccatacttgcccatgttctctccctcgtcccgctcggtcgcgtccgtgtttatgagcctatctctctgtttccttctgttctcatcacgatttttactgatcgtgtcctctatgatctgacaatcatcttctacttttgctctgaccgtgattgactctctctgtcgctccttttcctcggtatattctcctattctcatccgcagctgtttgtgtctccattatcggaattgactagcgcagaacggcaagccgcagagtctttgttgccatcaatcgattcagcctttgaatcacccaatggccttctctccttccgaccaacggctggtaacgcttcggtcgtcggtgaaccttcagctgataaaactgtgcatccggtattaggtctcctggcacagggcgaacgcagatggaaaaacatgatcgataaacagagtagaacgcttggagaggctgtcgaagaatacaagaagcggatgggaagacaaccccccaaaggcttcgatcactgggttagtctatcgtccttgttctccttttctgtttgattgtccttttcttggtatattgatcgctgctccttggatccgacatctcatctgcctcctggtaactagtgggcgtttgcaaccgccaaccaggtacttttcccagacgaggtaaacagattatcttttttttcctttactcttctcaattgatctcctctcttactgatctaccgattgtctcatctttctactcctgttcttgtctttttaaaagtacgacccaatcatgaattccctccttcccttttatgcgcttcctccggacgagatcgctcagcgcgtcactgaagcagaatccatcccagagaccttcactctcattgtcaaagaaggcggtaaagtcgtccttcaatggaacgaccaatattccagagacatttggtggtcagtttcactttctttctccgtttcttcttagccttccgtctgatctctctgacggatagaatctcaaacgtctgtctcccaggaatgcaaggacaagagcagatcatcagataaacctcatggagcctttcctggataaattgggcgagatgcggtacgtctgttgtttcctcattctgctttgttccgcttcgcccttccttggacgactaaccacgtttcttgatcaacagagtcacgttctcgatacacgatcaaccgttcatggttcttccttatgagcgtcgtcaggagctcgaaggcttggcaaaagggcgtgttggttcatgtgtgtgcttcttttactctcggttcttgccttcatgaaccatctcgtctcatcatacaaggggcctgcttccgtttgctcagatacttcccatctcatcgacgaagatattcatacggccgactggatcaatgcctgccctccagactcaccagcaagaaccggcaccgaggcattgttcatcggcgaagagaacggcaaggagaaagattcagttcgattcgtcgtaaatcatgagagcgcgatgaacccttgttcaaatccctcggtaggttcaatcttgtttcccaccttcttcttcttctcttgtgcaaatctcttgatctgacatacaatgcctctctctctctgaacagcttcttcaatcgcacattcactttttgacccctcagacagagtccacaaagccaaaaccacattctcggttactccctattctcagtctctctcgaacagaggtcaacgcagatattccggtcgctcctgttgggatcgtcagtggtggtttgaccagacaggacgtcggaaaggagatggatggtggctggcctgctcaaagcccaaagctttattgggtgtgttcgactttaccttccctctaacaatgtgacgcatagcaacgtcaattctaattgtattccaacccgaatttccctcttgtcagcgaggcgctccgacagcaaatccaaaagtcccgatatctccatcgatattcgccaactcgcatcgaacaagacttgcttcactcgcacaaggaaactctagtcgctcggaagaggagcacatgttgatgattccttccggagcgagagatggttcagtcgaggtgcagtctatcaaaggagatatcctagctcaaaagtttttggatgtacagttgcaaggatcttggacttgcgagggtatgccctgcttcttctttcttctttccctattcttcagttcaaagttggagctaagagaaagttactatcaaattctgaaaattctgaaaatcttgggaaacagatgagaacgatgagcaatgcaacaaacttaagtaagcactcttctttaaggtgtaccgtcatctcgccttcgctgacttccgtgtgctttccttttttttcttctttttttt

SEQ ID NO: 2900 - DNA, 1067 bp, Xanthophyllomyces dendrorhous
ggacggtttactaaaaaaaaattgctgatgttttcctatctaatcactttgcttaaatcagcttgattatcaaggccggtgtatttccagaatggaatatggcgactttacccccttggttcgcatacgtacccgccaacgtacgtccaattttcttctcgctttcttctgttcctcctccgttcgcgtccaagatagttgaaagctgaaatacatcgatgtcggtttgaactggttgttcaggttgatttctcggatctgtacaccatcctagcgttgtacgtccccctcttctctccaccctcactcttcgactttcactctcacttctttccggggttctacatctttcgtgattgaaaattcgctaactttctcgtcattatggatgatagcttcagaggatcaccgtcgagtacgaaagggatgcatgacagagtagctcatcggattgcatcaaatggccaatgttgggtggaacgaacgtggaggatacaggatatgcaggcttatgctttcaggcttttgttggagtttgagagagctgtcagtccagatcgggataccggaaagatggttcgttctctgtattcctttcatgatgtatccgttcgcgtggtggatacctgttgactctgctcttctatggcgatcgatgatggtccacaggactttcactacacacctcgctcatcagggaagaaagttccggtgcctgaggagtgaggggtgatttaaacactcatttaacatctgtgattttagaccagagtccggtcacctcctctggtcctcacccattctttatatttatccagttataaatttgtatgattatttggtgttggtgtattgtcgagtgagagatgtcaggcaggggttaatgatgagaagccagtcgaaggaacggagagttgtagaaagttccgtctaatctcatcactttctttgacaactcgtttcctagacctttcgttcttttctttttcttgtacatattcgtcttctactttcatgttcctgttcttgatccgctcttagatacctctcgcagttctatttctttc

SEQ ID NO: 2901 - DNA, 21049 bp, Xanthophyllomyces dendrorhous
tttctttcttcattcttttcatcatttctatttctgcttctcatctttctttgctcttcatgtcgtctcatttacttttcactcctttcccctcccccctcttctttctttcgagcatttagttattcaaattcgcatggggttttgaaccttttctcacttgccccgctcgccttggcttgctcacgctcacgcgcacattcacgttgagaacaagtcgattgcccacattcattttgacctaaaaacgcttgacacgaatcctagtctgataaagtcattgaacatgatccctctttaccctttcgtgttctctttttatttattacatgaagtcgagaaccccttcaagcaagcttcttgatggccctctcgagtacctcgagatctcgcttgatactacctccgatggccttaacttctaccaacgagtcagctccttcaaggacgaactccttcctaacgtgtcctacctcttctgacactctctccacctgcgctttgctcaaacctgtctctgcagaagccaccgcagacgacgatgaccgcttgagaatctctattgctgttctcaagaactgggcgatcggttcgactcgggtctcgagcgagaccgatcgggactgaccgctcagcccggtggtgggctctaacaaagctcttctggttgccccgtcaaggttctcgcaaacagaggagacgacatcgagcacggttttcttggcgaggatgtagtctggttgagttttgaccagatcaagtagtgcttccaagtatacgatggctggtcctaacggtttgaaatccgcttcgctcccagatcgagatcggagagcaaacatcgctcggtaaagttgtcgagcgacggcaaacttgatgactttttggaagagcgtagtgtttggaccggaaacgttgaaaggcgctcgtctagcggtcacagttcggacaacgaggtcgaaagactctttgaacaagaccggccggttgatcttcaaggcgatctgtcggaaccggtcggccaggtagagcatctccagttgttggtaaaacatttggtccttgtggaactcgaccgtcttttcgaccgcgtgcaagaggttggatggctcggcgatctcgtttgtggtggtggcattggacaaacctgtaggacgagtcgagtcgaacatgtccgattcttttttgagtgttgctcgtcgtttcttgatcgtcccgttcatccagcttaggaacgatcgatgatcgttctccagagtgagcatcttgttcttccgagcttccgacacatcctgttgactctcctcgagtgacatctcgagttccttcagttgtttcatcgatgacctcaactctgcctccaacatttgggtctcttcaacagctgaggaaactccatcagcaatcaacaccttcaaccgatcggcaatctcgttcgctcgttcttgaatcggtcgaatctgagcagacgaagcctgtttcatagctgccaattcggcatcaaagtgtcggttccaggatttcttgttgtagtcgatgttgtactcgttcgaaaagtacactggatcgaacgcaggtatcgtcttgagttgcttcaagatcaatcggtatactctcatcgcatccttcaacgtgccttctgtatttgaacgaatcgccttggtcgaagtcgaccgatggatcatattgggaaacactttatcgtccccatcggtttgaatctgcttggcgatcgcgatcagtgagtcgtcttttgtgccgacggtctcgttctcgtaccttccgatgaatgtcctcaaaacgttcatgaccgcttcgtcgtcaagttcaaacttgttcttcaccattcggtcaaaatatgcctggaatcctcccgccggcaggttcgtgttgttgagtttgaattcggcgtaccgagggatcgagcgagacgaccgacccgtagactgaagttgttgagcagtctcccacggaagagcaagaggcatctgacggggcgcgggcacatttcgagaaggaggaaacggaagagagttcgttatcgaccgggagtgtgatcgaactgaaatgttcggtcgggcgtgtgtagccaggactgccatatgaatcgtgtacggaaattgaacgtgcaagaggagaataaagagaggacgaatgtatacgaccaggaggaagaaagaggtcggtcaggatccgaaacgaacccaaaaaaaaaagaaaaaaaccacccgatgcgttctggaattatgaacttacgtctggacgacattctttctaacgagataagcttctaacaggcagataaaaccttcggccaagaactaccaggattgatggaacgtatgaggatagaacgaaagagtgacgagcgagaagagagaaggagtaaaagtcaatcgtgtgcgtacggaaacgaaggagcgaagggccgtctgagcgtgacaacgaaaaagactatgaaaatgttgaggatccattacgaaacttcctattgcgttttctagcttgttttctgtgtgttcttccctcatctatatctctacactacatgtgattcactattcaatctggaacatcaaaccatctatctctatcaacgacctctaaatctatttagatccaacaggcttggcgcccttcgcagctatcagcgcatcagcagcggccgaggctgctttggcttcctcctctccctcgtatccctgctcgggttgaacgagagttgaagaatagatcgtcagcaagtgtttgatttctaagtaaaccgtgctgagaaatatgagccaagacttgtaaaacgaacctcgacaatcatatcgttcagtccgagttcctcgttctggtcaaagtctcgatcatagtcctcgaacgacatgtttgggtcagcatcgggagcatctaaagtgatgatcgtgatgaaaagaggatactagtcagtctatgaaatagaaagaggtttgaagacctttgaaacagacttacaagtattctgcaagtaggaatttgctaacggatcgtcgagaatcaatgtgaaaggtctgcttgcattcatgacctgattgtcattaaaataagaaaaaacgtcagcttgcgttcagcctactccggcttttctggatcgttcttccacgaaacgacttacccccttaaggtcctgcaagaacttttcaaaccctcccatctgaatttcctcgcctcctccagctcctccacccttcaaggagtttcctcctcctccgctagcaaagaccttggtgcttaactcttcgtacacctgggtcaagataccttcaagagtggtgaaccttcctccaagtgttccgggttgaagcacaagctcgatctcggggatttcaagaccacaagtctcagacttaagaaaaacaggaagaaaaaaaaggaaagatcaatcgataagtggagctaggtggctatagagaggatgtcggctcgagactagactaaagcgcaccttgagaagatctcgggagagatcctcggcgtcctctactttaagaatgatacgttttccttgggcagatacggctcctccagacttgacctcgttgtctttgtatccacaagagtggcagttggtcgacatgatgatgatatcctaaaagaccatagatgtatgcgcgtgaagacaacgttcggtgttcagcgtcttcgttcaaccctcatatgaaagataagagcgtagaagatccttacctggaaataaggaatgttaaccttcttcatcagcgtgtccaacgggtttttgcacgaatggcaatcactcgggaagctgaacacctcttcgttttggaactttccggcacccttgtcaacatattcttccccattctcaccttcctctttgacggtctccatctgctgatcatcagcctgctcttctggtgctgccaacccgattgaaacatcctgctctcttgttcggtcgtacgttcggaatgtccacttgggatccgaaggcgaacccaagaactggatgaaggagtttccagcaggatcgtccaaggtgatcgtgaacggcataaacggtttctcgccgacagctccggatgaagtaaagtcctgttcgcccgtttttcgtcgcttgacgtcgtccctaccaggcaactcgtccccctcctcatgtccgtccttgtactttccgtcccagcccatctcttcctcatctcctccttccagcacgccattcaacttggtgacgagctcttcgatcttctcgtacgtctcagggtcggtaatctttcggaccggctggtcgagagccaagtctcgcgcggtatcccggatgattccctcaacgttagtgagctgacctcggctggaaggaatcgttaattggaactgaggaatatggatggagcaggtaggcgacttgacgacctgtcggtcaaagtcttctcgagatctgatatgagcggtgtagatagatcctcgttctagcgatatcaatatatagtcagcaagtctaaatgatgacctagggagaaaaacgtatcggagaggatgcgaaccttggatttcaccagcactttgaatctcagtgttgttttctccacaatgctcgcatcggaaggacatgacgacgacttctcggaagaagggaatcgaggtcaacagcagtcgggtggttccctagagacgatcgaaaagatatcggagtttagtatctatttggctcttttgtcaccacgacggtgtaggatggaacaaaaacggaagctgacaaacattcttataacagctcatgcataaactctcgatctcctgaacggctctctcctcctcctcctggtcaactgcattctcgacattgctctcttgaatgttatcggtatcagccgcaaccgaaccgatggtaggaaagaagctagacggaatcagaaaagaaaaaagaacagagaacggttcagtttgacgtcgctccaaaatcccttggtaagtcaagaatgaggatcttcttacggatcttgaggttttgaagacattgctaatgatgatttagtctgacgagctctgcaagatgatggatcgataggaggagaatagtaaaacgacaaaatgttgcccgcccaaaagatttgggggtgactaaccggaaccccggttggctttgtcatgatgtctctctctgtgagaacgactggtctgacaaaggtcgcacggagaacaggacatacagaaaggacacgagaggacacgaagaaagcccatgaatcaaagaacagaaaagcctatacaatcccaaaacaatgtctctctcttgcccttcaccaaacttgctctacagacgcgtcattataagtcaatctcaaagtttcctatagttcctcccgaagtttgctatgtcctaatggctctctctctccgttcactaacgacgagggaaacgatgcgattggagcagcgttctcgaaaaacaagtccttgaggaaggcctggtaagacggtcgatcaagtgagttcaaagccaccttcttgtccgtgttgatatcttcaatcagggcctctgttatagagggaagaaagagtaaaggtcggaccagataaatacaggcgctgcatttcctcgacttgagaaagagaggatcaattccaaacgaacccttcgacacatagtttaattcgggacggatatatcccaagacgacgaccaaaatctcgtgagagtagaaatcgctggcatactaatcatccagtaacaaacgaagctgtgaatctaactgaatgagccagataaaagacgctcttaacatacctcatgcataacatgaacctcctggaagacgcaagaaatgtcggtcagtctcagatcccaggatacgcgaggaaacgcgattcccctttgataagcaggatggagcaagagcagagagctgccaacttacagcagtcagcctttcgttcttgtagtacgggttccatcctacgctcatcaccatcggatgaatcttcaaatcctgatcctctaactttgttgacggggtatccaatcctgactgagacgctccgtgggaaggctgaggaagcacgcgggcatagccgtaataaacgccccgtaaagaaatcgaagcaatcgaggcaatcgagtgatccggcaggttggctgaagagtgaaccgtcggcgtgaaacggaaggaaagagaagtatgcaagacagggtaacagaaagagaaacaaattgatagtaagcaggtgcaatcagtcgggttcgatgtagccaaatcagagtccctccgaaatgaacggaagatcaaggggatttacaatacacgatggtgaactaagaaggaaacgaaacgaaaaaagagagagagaataaagaaggatgacgaagtgacatcgactcaccagtaggaattcctagctctttgcttcctctaccaaaccctttctggacagctccttggatgtaaagtgggaacggttcggacggtggttctaaaccgacgatctgaggtctgtccgctcgtgagatcggggcgagttcggccatagtcaagttggatgatggagcagtagtatctgacatattaggcttatgtacgtatgtgagagtgggcgttagtgtatgtctttgtacgaaactctatgtggttctggatctgatgatgatgaggaaggatggtcggtggaggcagaaggttacgacccaaaagtgaccaacttttttttccctctgattgctcatcgccatcgatcaccatcttgtccatccccggtcggtcgtacaccccagtcggccatcgcgatacgtttctcagtattggatactcatgctctcatacagaccgctggcgttcgcttccaacctctcggtgaagaatcatctcgttctggcggcgttgcttcggctcgtcttctttgccttccttcccggctttgttctggccttcctcggcagtcgacccgaattatcgacacccctgacatcattcagacgatgcaagtgtttccttctctttcttcctgtttcttagactcatattcggcctgtcatcatgttctaacttcatctggtgacgacaatacttctggaatatatgtctcttttgttgacagaagtgagagaaggcttgtttctctgggcttccggtcaagatccttatgatggaggtgttttcaaccatgtgggttcatcttctcgtctctatcgtcattgaccttctctactgcattaagactgatagtttgtcatatagtctcccatttacctatacttgttctcaacatgcgcttcatttcccgcattcacctcgctctatttcatagcagctgacgtctcggtagcttgggcgctctccagtatatggcgcatccgctctagctcgaccacaacatcatcagaaagaagaaatcaaaactggagcgctgtcatcagtttcctgttcgtattctcttcgatcgttctctctgtgatcgttctctctgtcttgccaaaccaggtgaaattgacggaagcaatcctggtgaccatttttcttggtggacatgccgatatagatacttgtggaacccacatacgttgttgatgtgtctcgccaaatctacagccgccatcgataacgccctggttgttctttctatctactatgctgtagtccgttagtatgggtctttgctgttcagaaagcgcaagaaggcagatcacttttgggtactaaactcacctgattgcgtttcttaatgcctgtgatcgcctgtcgatttttagaccgcccaacagcgtctcttttgttcctagcactgtccaccttgacctctgtctatccggctcttcttcttccattcattgtcatgattctccttgactcgaccccagtgcttcgactaaaaacggaccaacatcgaaccagcaggacggtcaggcgatcaatcaagctgataacaacatatgcgctcctgttgacaggggtgagcgcggccttgcgaggtataacaggaagctgggaaagtgttatgaaaggtccttcgataatgtaagctgttcgctccgtttggtcgtgtttatatcttgttatctatactcgttcagcggacacggagaatttacctttttgtgacaaattgtgttcgaatatagactgggtattaaagatttgactcctaatgttggattgtcatggtgtgagctccttgtcctgaatactctctgaatatgttccatcagattggcttgagtctctacttaacaattcgatgtctcctctactcttcatccgactgtcttgtttgcgcagacttcttcaccgaaatgtttgatcatttccgtccattcttcaccatggtctttcaggcacaccttgccatctatgtcgccccgctagctttcgcatttcagtacgtgcttcgccttgttctcatatctcttttatatttctcatcatttgtcgatgttgaatccttgcttgcgctttcaacatgtacttttacccggccttacaatgactcagctccgaccctctgttcggcctcttgtgccagagtttcttgatatccactctcaagacatatccaacagtaggcgacactgcgctcagcgcatcgttcctgcctctctttccggcaatctttcctcgtgagtctcttcatgcacacagtcctcgtcctcgtatgctcttgctctcttgttcgcgttctttctggttcttgtttttttcctccttgttataccttcttgctcatcatccattgaacttgccactgtgcttactttactaggcatctcctactccgtcgtcatcattggcctccatgtctattcctccgttctcttcccgctacttgatttcctgtggctccacgccggctcggccaacgcgaactttttctacgcagccggtctggtgtacggtctggggaacgtcctcctctccgtaggtgtcatctgggccggtcggacggttgaattcgagcagtccagagggatcatggataagtcaagatggaaggtcattcaagttgtcgattagaattcatatgatacttcgatctaaaacaggctttcgatcaggatcggtccgttactcgggcaaatgggaaatgactgtgttcatacaatatagcaaatagagtggcagattgagttgagaaggggagttgaaaagagagatttcagttgttctcttgtagtctacatgtggcaacgaaatgtacaaagagagagtgaaagacagaagagaaaaggaaagatctctctaagaagaaaatctattagagacagtatgccaaagatgaagtaggaaatgaatcctaaagagaagggaagagaaaaaagcagattggatgatattcaaagacaaagaagagaagagcatgcactagagtatctaaacaaaatttaattagaaccgtctattgacaccaactctaaagttaatcagactctgaggcgattgatagaccaagaaccagatcttcttgtactcatacaagaaccaaactttctgcagctgtttgttcctaggtggaggagtagcggataggtcctgactcgtgaagaaatcattgtcgtaatgcttgtatatcgagcaaacccgtccgaccggatgagctaggtctcttccatccatcatgtgttctgaatttgtcatttatagtggtagagaagagaaccgttcagcgtgattgatttctctcgacagacccgaaagaagaggaagaaaacagaccgaagagttctagaagcccatttgtcgcatcggaccggtttgatacgtccgtcgggttgatcgctctcacaccctcctccctgaatgttgatcggctgactaaagccccccaaaacctgcttgatgcgtcgagcttccaatatgtttccggcgggtccgagggaacctttcggaagaggagcggagagagctcagcgtctgtctgggcggagtcttgttcggcttcggttaaggctgctctccatttgaccaaagcgtcctcccatactttgacagcatcggtggaccgttttatgtaaacctgtacagttgggttttcgtggatcggtagataagagaaagaattagataaaatagagccacaaaatagccaatgacggcaatggttgagaaggcttaaattggaagaaggcaagaaacttcgaatgaagacaagaagactgacctttttctcgtcatatggaagctcctcccatgctttcgccataaacactgccatgctaccttgcggccgttcctgcaaaggtatcagatgaagctggctcagacgttccttggcaaaagtcgtgaatgctgtatccctgggtctcttccggatgtctggaagccagtccagcgatacaacatggacaatagcatttggattcagcaggccgatccaacttctacaatgcagaccatgggaaagatgacaagaacgagaatctatgtgatggagatgatcaagatcttcttacctatgggacccggaagtttggcaacccccttgtttcgctgacttgcataaaactcctccagagctctaccacaatcaacgtagaataagacgagttcatagatcacggtaatggtttgagacacaacataaagcaaagaaacaggagagagttattgtgggtttagtacggatcctttgtcctcttaggagatggatagggaggttgtatgtgcccaagaagacttcgaaaatcaacatactgagatcgaggtttcttaaccgggcaggtacgaggcggtgccttgggcttgaacaagcggaaagaagagagagaaaacctgggagggtatggcatggagacggagatgaatgaaacccaagaaggagagaagtgaaagacgggagagacctatccgttatatggaagcaacagaagatacgtgagaggtaagaagaaataaaggccgagaaacgagatgatggaagaagatctgatgtacttcctaatcactatcaaagaatatcgggatcaacctcattgcgcgaattcttggctcattctctataattctaacagagatattgaccatgtctactgcttcgaacgtttctatcgccagacaggatatggaatagtagaaaaagaaaaagaaaaaaaggaatataatataaagaaaagatagattatctccatgtcgtagatggaaccccattgagaccctctccgtgccaactagcctgctctctgtcgtcactcagtactcttgcgtactctaggagaagtagaagcatatagctctgcatgtcttcccattgccattgctccttcacaaactgtctaccggcagcagcaattttcttggccgcctccggccgagttttgaagaaggtcatgatgtcaatcagatccgagctattatcgacagcggcaagagagatagaaacggacagatatcagcctgatcggtaatattgtgatgattaagtaaaaatagaaaaacgaaggtagaaggcaagacttactacgagttttgtaaggggacatagtggtaccacggaataaccacactattgttttgtgcaaccccgatcaactcaattagtcagagatacatattcctacgcctcaagtaaagccgcaggcgatgacttactcagaataccactacaatcaataaaaagcagaccaagtaagaagaggaagaatccagaaagaattcatactcgagtcagatgggacagaaaactggatggatatgaagaactcgagacaaacctctgaatagactgtggacttgagcacgaccgcgccatacaagagggttcgtctgaacctggacgaccatccattgccgtccacatcgataacgtatttatacatgaggtgccaattgacactcgatgcccaacttactcgaggggcaaacttgatctcctttgcaatcacgtcgcaggttccgtctctacatatacccagccccaattttgatttgacaatcgacatgataatcgatgcaagtccataggtcaatacggatcatacgaggacatgctgattgcgtccaacgaacccggtcgcccgcatagcagatatgccaggaagaaagcaaggacttacgtggctgagcattgtacaggaccgtcaacaaggccaatatcgaataaatcttctgcgacgctgaccaggttatgatccttaggcatccacttttttgtttttgggtccaactcaagaacagaaaccttctctgtcgaattgctgggtggattagcaaagtggtgcagtcggatccgttgacccgatcgccaatcgactttggcatcagcgtaagaacctataagaatccaatcaaacgatgagaacacccaagatagtcgcgtcagatctcttgggatgcaggtatctctgttatgttcaatgggccttaccggtcatcagaccccgccagaatgctttttcaatcgtcttttcctcccatggaacgtcttctacctcatgtttagttgcttccgtcggtatggcaggaatatcggtgttccaaatagtctatcataagcaacggacgtcaggacctgctattgggaaacgttttgggcgataattcgttgcgtcgtcacttactttgcacgtcgagaatataggagttaggacgctctaggtttttgagaatcccaaacccggttccaatctcgttttgtcagcccagagatcccgttcagcattaaaattcagatgacagaagaagatgctcacaggcgcaagacgagagccgatgaataagctatgcgcatccaataattccggagattcgcaatagtctatagcctgggtccaaggatgaaacgatatatgctgtacatgagtgcgatggtcgaaaacacagtgttcatgttgattagatgactcttaaacgtaccttcataaagtctgcaacaaatgatctgttccgatggaggtctgaaacggcgtctgatagattatcattattctctatcagtagattgccctcaactcgatgccatctaggaaaaatttattaagacagggaaacttattcaatgctttccatcgatggtgagactgaccagattttacttcgtgtggtgttaagatgatgtccgtggtcccctggagggaacgggcgttttgcttgcagggggacaaccatgaatttgccctagcgacctgaccctcctcgtgtcgtactcgatcatcttcaggccacactgtttgcacattgcccgcagtttggtaagtagggaaggacttaagtacatacaacgacgctgatgaaaaccccgaagcctagacataatcagaactaacgttctcctctagaagcataataggtggtgcggtcgatgacttcgcgcgaagcgatatagaaaggcgagtcgttgatgttgaagaagatttccatagaaggaagtaggtgcgcaattggattgatcagatccgtcaagtctctgcactcgtatgaaaatcgcagacgatgcaggtgagtcttcattctacggtattctctctaaatagactccaggtttgtgtattcactaaccgaggtcgctcgccatcaagcccagaacctttgagtgcagtcaccttgccgtttcttcggcaggaaagaccccgatcagctattgagaagattccaaagaagagcgctcagaaagctacatactgaagcttcatagaaaaaatcgtctgggcaacatcaactctggaaagtcgttctctgaggacctctcctttataggccaagaacggaagcatagagtcgtgggctgcttgataaaggtgaggagtgactttggaaggaaatgccgagaaccttatgagaagaaagcaaggaaggttatgcacaagacgaaagaacaaacgtcagccctaagtatctctgagtgtacgatgcctcgagcgagcagacgaaaggtcaccaagcgtgcgcaccatagatcaaatccttttggaggattcttgtggtattttgatcgataggcagcgacggcttgttccaaagaagtcaacctgttttccttcatctgttgtactttgaggtttgcactctgtgaatgcatgttacatttgtgcatgcaagatgaccagcatcagtaaagagtgagacacgtagatgagcatcaatcaaacaaataagcttacctcgatcaacacttcgataggatgcctgtccatgcccgttgactcgtgcaaatcccttgatataagtaatccagagtcggctatccacttgggatcccatgttggtgatggaagctgcgagttcttctctccgatgccgggctgggtggacgccgctaggtgatcggtcgagcccgaaggatttcgaacgatatttatcttatatgatcgatagaacatccaaatgattgcagataagatgagaaaactgctgagctgccttctccgaggaaaccgtagaaagatgagacgaggaggaagagaagcgaggttctgtcctccaagtgtacgcgaattaaatgccatgtcgagcttatgcaagagcagagatataagggaaggtttggccagacgttgcgttggttccctttcctccctatgtcgaagaagaggcaatgagaatcgacaaaagaagcagacgagaactaaacaagcaaaggaagcaatgcaagatgatgtatgagttgaacgtggttgaacccgtctagccagctcggttcaaaaaaggattgaagaatacctaccgagtaggctgcgtttaacgggtaaaggtctatcgctcagtctagatgagctcggtccataatgaagcgcagtaatcaaataatgttcttttcatgaaatctctatcacagcggctgttctatatcgctttctatcgccatcttgtggtggacgatcactgatgtattatgttgtgtcaaagtttcggaactagaaacacttgtatcaagatagattccaggcatatgggtttctgtatatctttcctttctccttttgtcgcagaccggccaacaccctgacggtttcgacattccgcactttctcttttatcgccttgccagtcccatcgtctcttatggtggttcgcgaggagcatggcagtgagagatgacgcggttgaccgtcgttgttctcttggaggatattggaattctttctcagcgcgtttattaagcatatacaatggctagcatcgagaccgttaggcgtctgtttcggattgatgaactatgacgaccaaacatagtgagcagcaggtgtggatccagttgtaagacatgttcccaaaagatggttgattttggcaaggttcatcaaatatggaattttataagttgcgcggaaggttggacctgatagagacgaagcagtcgacaaaggaatgagcacagtgagcataactgatcgcaacctcagaataagaacccggcctatagaattgataagggatgtgaacaaacctgttcatcatggcaactttgtgcctctcatctacctgcttcagtactgaactcgttccatccagcactgccagcaactccatcgcgacccgcttatcaaagtcgattgctgatctcttgtcggcagcggccaatatccacttgattccccatcgagttcgctgacgctcggtcatcggtacgggaacgatcatgatctttgctcctttcttgatcgattttagtcgaatgaagggtgaagcagcgacgatagcggatttaaagatagggagaggtggagatttggtctgtcgatgactgtgcaagtaagaattcgatgcgtgaaacgtgtcgagcgagtatcatgaacgatgaggataacgatgtcagcatagatgaactctgaatagacctaagcggttgctccgactgacattgcttcgagaattttatggaagcttatgatagctctaagtcgatgaccgttcttcatgatcaagttgacaaaaaagtctgagagaggatccgatttctgagggatacttcttgttgggtatggaatcgtcttgtggacgtaatcttcggaggacggcaccgacacaggcgcctccaactcggcagagatctccttagcgaacggcggaaggggctggcgttgggtgtcccgggatccgagaaagtcgaagagggcttggccagcattatcagttgatgccagacggatctgcttgagagtggtaggaagaggggaagagcgacgaagcacctggcgagcaggttgccagatgaaggacatgatgggtagtatgaggggtttctgctaagatatttagatgctgagaataagacgatgactggatgcagataagttgaaaaggcgagtaagaacgagggatagtagaaggtggtgacgaggcgacaaaaaaaagacagtagaaaagttacaaagatgcacaatactcaagatcagtatcagcatctcctgatcaatcatgtatagaggtagtcaaggtgtggagagctctttaccttgaggtcacagatcaaaccttggagaaggttctttgatgggttgattgattgagttgacctggatgggattaactgagttgacggaactgggctcgctaccggcctgaatacttgcctggaaaaagcaaggcaagagaggccacaatacagatttccctaatgagccaggaaaattacactaggaggatctatagtcaaatggaccggctaatcaggattgataagggtgggtccaactgacttggtcatgcacctccttcggatcaacctaacagaaacaaaccaacattagaaagaggtcgaagctgggactgaaactcgagttaatagacaacagattgatatttcgcttgtttagtttcatctaagaggtaagtctaggtattggcagatgtgttctgagtcgagtcattccttttcagaaaacatcttgagacaccccatttcatcttacttgtcacaacttcccatcataatcgagcagagggatttcacccagatgttttgtcagcatgtacgcatcgaagattgacgcttatttatctcgatcttcagcgggcattgaaagcgagagacagtctaccgaaacagacatggaaggcgatgaaagaaagaagactttacattgttcagaaagtatgtgtcgattgttggggatctgtcttctctatatgcgcctctctgtactcttgtttgtgcaactaaaacgtcgtgttcgattctttcaatttctttcgaaatcatgtatgatcctcttattttactcttgtgcctggcgcatcaactcgatattctgacgcagatacattgaagattcaaaactgagaaaaggtgtacaagcgatacatatcggctgtcttcgcagtagaagggcatcggtcacaaatcactctcaactgtgtcacccatacggtttgctgagagatggacttacgaccatgtccttttataccaccactgtgctatgtgtgactagccccgtcaccggcgatatgccatcttgactcgaggaaacgaaaggaaaaaaagctctaaaaactcatgatcaacttacaagttaatccaaaaaaatgtttcccggtctcttcattgtactcgacagtctgtgttgggcgtgactctcggcgctcaagacatctcgctccgatctaaagacaggatggatcagcaacctggccgagtccagcgcggacgtgataacatacatggtatgatcgagaataaccctaacactgttagataaatcggttgatggcttatttggcaaacaatcccacacccgatcggtctttagccagtaattcattcctctcgtccttttcaacctatcgatcttcctgatatacgatgctcctcaaggccattggaagacccatccgactgtctctagtagggaaggcgtattctgtacttccttctttatcaacacttgtaagtcattctgacgtcgaggtgtccttgttggtatatgagtcctaacacttttgcttcacagacttccggcacgcttcaagaccccaaatcatccgtgctacatgtcggttccaagtctcaggcttccaaaaaagtatattataagataggggacaaagacgtttcaagagtaggaatgttcctctgccatctctgataaggctgtgaacgttgagttctgatttttaatcttgtttcgcatgacctgttagctcaattcctatcagctatatacattgtacaatcccattaaagactccaaaatccagtttgtcgatgaattgtcgtttggcttcaccaaacatgcttccaacgccaaatcctccaactttgaccgagatgcattggttgaaaccctttcgcaccagattgagaccaactcttccgcgctttctcctctacagctctcgtcttcattgaccaagaagtactctgattctatcctcaacctctccttgacggccactcgcagaatcaacaaactctggagtgttgaatcaaagtgctgggttcctctgtctcctccagacgatctctatcatcggatggataaatttgtgattggtgtggtcactgcttctgatctcatcaacggtctgaacaaagacaagcggtgtctacagaaggctgtcgaagagctcaaggctcactggatcaaccagcgggatttggttgagtctgatagctcactttccgataaacaattagattcttctaacggccagcccatagtggtgatatgcttggtcggatggggaccggccaagctgaagatgaaggcggacaaccaaatcgccgaggcgatggacttggaaaccgaaatcctcaaaacttccatccaagagggttgtctcatcagcgagggtcagtccaagagggcagcaacttctttcgatatcgattctattcctgacgtatttatttgactgatatgaatctattccttcattcgatgcagctatgaaccccaaagatgcttatgatctcatctggtccatgctgggtgatttcgctagaaaagtccaagtgtcagtacccatctatttgtactcttgatactctgatatctctcaaaccttacctcgcttttattcgcgcttcaacgatccttatcgatattagagacaacgaacggcagtccttcatacataccgatccggacctggtcgtcccgaaagggaagagtcaagaaaaggcatattctcttatgttgcagcaaattccatccatatcagcagccaacgtcaaggccatcacatcagcttacccaactctaagagttttgatggaggcgttgtcgacagaagcagggttcgaggtcccaaaggtacatcttttggttcccttggggtttcggtcgtttctgtcatactttccttatcatcgtccgctgatccttcttgccgatcgactcttcttctcgtttttaacaccaaagtttccaagcgaaaaagcagcgttgattcgtcgtgctttgacgacggaagacccgaatagcatcatagatgctcccaagtccaaagttcaggtagcttagcccgtgtcttgttgttgttgttgttattgtacatatcatttgattattaaaaaaaaccgaaatacaaaccagaacacctgtataggtataggacaaaactatatatagggaaagaagaattataaagatctctagggtgggacgataaagtcgatcaagcaaaagagatgttccatcccttttccctcgataactcggcccagtttatccaaattctaccgtggtcgtttcgctcccaaatctcttcgaccaactcgaacgcgttccggatattatcgattctgcaactgaacgatcaagggaaaagatagatgtagcacaagtttcacaccgtcagcggtcatcagcatacattaagaccaaaagaaggcacagaatgcaaagaaacgagttacgaacttgacgagcaaatcatcaaaatgaaccactatgttctcccggtcctcactagaaaggcaatcaatccccgtcaccgtacacggaaacaaaagtccactctctgctggtgtacccttgaccagtcgaatagcctccaacagatcagctacaagaacctggttagttagcgattgagcgttgctatgacattgtggttgtttttatttgatagaaagaacaggcgccgatcggttgtcagtttgagacaaaaccaaggttacacgaaatggtaggtgaaacatagagacttactttctccagacaacttgcttcaaatacagcttcgcagctaagacatagcatttgaacgcatcgtctagatatttatcgtcggccttgtgaagaggcttgcactcatctaacgaaacctccaaccttgaagcctggtatgacagatctctcagccgagccgctggattgtttcgcaaggggaatgatggcgggaggtcaaaggtcgatcggtaaacagccaaacgagatatctcgccgatgatctattattccaatcaacatctccgttagttggatcgcggagaaagaaagagataggcataaagggtagaatggagccttgcctcaaaaactggcatggaagatcccatatatgtattgagtttcccgcctaaaatctccgcatacgctcctgaatcgaagcatggaccttccaaacagaacgcgcttgactgtgcaactcaatccagacatacgatgggtcagcattcaaatacacacataaaccagaaacgaaggaccagatatagcgaaccataaactcgtgatagacatagttttgcattaaccattttcctggcccatctagacgagatatcattcctggctcatccagctgctcgacgacctttcgagctagcttcaacggagttgcccaagtcgatttcgatcccctacagatctgttgaacggcgccaacgatacaaaagctcaagttaaggagagaaagtcatggtggaacatgaacgagagacaacacacctcgattccacaaaggataaccaaacatgcgagaagagtctcgtcctccttacccagtgcctgactgtcttttgcggactgtttaggtttcaaacttcttgccttgagagcgcgttccacatgcgcgcatacctctctcgtggtttcgttagcaatgaactgccatggatggcctgtagtgctcaaatgggttgcactccaggcgatcagacttagatgctatcaaaatcgaccgcagcacatcga

SEQ ID NO: 2902 - DNA, 10477 bp, Xanthophyllomyces dendrorhous
gtgcagctacatacagcaaacgcgcgaaaaagattgacgccggtcttacagaaggtagctcaggaaaacgtatacccaacaatgaagacccaatttcgattgagttcttcattagcttcattctcttcctccactcccttctgtcatcgttttcgctcctcggacgcttttcgccagtttggtttgttgttgaaaggtcttcaatgaaagccctaggaggagacgtagacccgaaagagtgatccagggtttctacccaagccagtgttgctggagatagtcctggagacatgttcggtagataagaactaggaggagagaagaggccatttaaaaaatcgaaaggctgagtcgattgaatgacgccttgatcttgtaaaggtgggtaagcttgtgtctggattggaatttgggaaccatgagaaagatgcgtttgagagtgaatcccggaatgaggataataaggggaccgagatgattcggaagtctgagtgattggttgagagttgcattgattggatgtctgaacatctatcgaatcatcaagtggctggacaattggtgatagaaacgttagcggcggtgaaggtccataggttggaagaaagctggcttgtcgactatcgctggaagaatcaatagcatatccagctgatcctcggatgatgcctggctgatctgcgtaaggcaaaggaaagaacgatgaagttccgtcaaggattgactctgcgatcagtaatcacaaacgacacgaagcataagaatagactcgatctttttcagttttctacgactgaagctgtatatttaggaaactctaactgaccatcggttgtaccggattgccattgggggtccaccggaatgttaatcgagttttccttctcctttcctttcttcctgctcgtctggttttgatgaacatattcggatgcgccgccattcgtccatccagcaggtttctcatgaccatttgcaaaagttctgcttatcgtctcggtaccatcaacaggctgagagccaactgtattcacgtcatcggatgcaacgggagaagtagaggctttgagagatacaccaggcgcccaattaggcttcctaggctttcgttcgttcaattttcgattgggtaatttgacagtgacccattgaccagtttctggatctaacgtttgaggagggtactggcaggcctgtttcaagcgttgactgaatgcatcgtttgatagataaggcgaccgagaacagtatcgtagagaatgtcagacatacattctctttatccctacgattatcttggaggcttctcctgaaaggagagagatttaatccgatgaaggaaacaacatattaagacacaccaagacagacagataggcttctccaagtcgcatttcttctttcgggccctacagccatagcagccttctctgcttcgggcgattttcttattcttggaatcaactgtttcagcggccgtcgccagcacgaccgagtttacctgaggagtcgataaacccaagttcgccctatctacccgacaggagaacgaagatgacgatgaggaggaagatgaagacgaggccatggatgccatcggagacaagaggtgtccaagcagctcggcttaagatatcaggatggaaaaatggatggatggctgttagagaatcccggctgatatagcgccggttgaacccgacgcactatatgaatgacaaattacgaaaactacaccgacgagtctctcggtgaaataagccatgtatttgtcctgctcttcaactgcacatcaggtttgtttatcgtcatttttggcattggttgtacagatacatgagtaaattgtgcaaagtgaccaagtgaaacgagagagagagaagaatgacagtattcgagagataaaaaacagtggcgaaaaactaattcatgatgagcagctacactgaaatctgattagacgagaagacatataagatcgcagagatcgttccaaggggtcagaggagaggacaatagatgatcagaatctggactatccagtaatatgtagagtcaatctgaaactcacccgagcatgttttcagcccccaatccacagagtcttctttcttctttctcttccgtagaaagttgagcttcagcttcttcgtccgacacatcctcgcctccccaggatcggaaaggattgctggccatctgagaaagttgatagtcaaaacgttgttcgattagtctgggtcaatgagatacaagcgaaagcatcatcgactgacctccaaaatcctggcaagatctcgtctgcagccaacttctcccctctcacatttatcgattacctcctccaatatccattgcctcagaacgaacctcggattccactccttggtaccctttctttctccttcgcctactcgtgctgaatataactttagccaatcaaccaattctaccttggccgatcgttgatcgcaatgactagagcttgctagaagtttatccagcagaggagcatcggtggagaaagaagacaggttacccaggagagcaagcgatcggaagaaggaatggaaatcgagtgagtgccgctgaaggagagataacagagggttgatgaggtttaatttatcgcgatctgttggagaaggaatgccgagtcgctgtcgaagatttatttacatggacagctcgtttattaaaggttgtattctttgtgtatgcaagagtacagtaagaaaaaacaaaccttgcccatgatcaacagatacttttcctcatagactttccaaaattcatcctccagatcgttttcctttctgctggccagcgctttccaactatcaatggttgaattatccacctcgtcggcccaacctgcaggagcaagggcagaatgagattcttcgtagccgatcaacggtgaggtagctttgagaagtgcgctcatggcgtagaaaaccatttctggttgtgcctggtgagaatcaagtgaatcagtccatgagccatatggtattcattagcaaaagaagaagggcgcactcgataagaatatcgccccgagtcgtcagagtgatctgtataatgcagggtagatatagatatcagtcaaaacgtttcatatttggaaataagaatagaggatagataacagactgcagatatgatcgagattgaatttgtccataaaggcaaaaggtccatagtctatacagattcctaggacggagacattatcggtgttgataactattaagccacattatatggttatcaattggccggttcgaggttcattgatatttgaacaacaagaacagacgaacctccgtgcatgaatccccaagcctgccagccagcgaccatactagcgtttcttctagtgatttctctgaccatctcccacgtcgtcacctttggatcagatcctaatcggtctttaacaaccaaagtcagatctcgaagcagattccactcgtcaccagcatatgcggagtctcccatcaaggaaaacacaaattcattttcgggggggttaaggatttcaaatgagcctattcgaaggaacgttggagccaatcgagagacgatcgctcctttctcccagccatattctcgattgacgggcagatcagaaatcaaattgagggagagcgcgcgggaggtaggcagcgtggtttctggaaaggcagacgcatattcagaccccaaaactgaaacccccaatcaaaagactgtcagcaactatggaacggcagtttgttacaagtgggaaaagcatagtgtagcatacattctcgaatcgaagacctgagtacagctagtccgtcagctcgtcgactaaaaggtgttcttccggcacctttgatctgaatctcctggatttcaccagcagggttcacggtttccactgagcgcatcacacaaaagaaagaagggttgaaatgattaactattttcactacagatttacgagattggaggtaaacttacaaagagagatagctcgtccatcgcccaattggcctgcccactgtccgaactgtcttcctccactgtggaatgtcgagagattgagcgaggctcaaagatgttgtccaaaatagagagtatctgttacacttactatcttaacgaccatggatggtaactctcttccgtgtccgtttcgttcaaattcataatcacttccctgcctcccaatacgcctactagctcctcgcgcgccgagttcctcttctcttctacaccagtctccacttgtttgttgtaatcggctagcacgatgtgggcggcgtctcccgcgtccaaatggggaacaacctcgtccaggcatttctgactgaatccgagaagtaccaccggccattttctgttttcattagagtacagacccaatccatctttaccttcagaacttctctccagtggctcccgagacgttaaccacttctcgacatcctcagtcgtgtaagctttgtcctctgctccttccactcgcggtagacggtaaggaaatgatattggcaagggagttacgtatgagaggtgtccagattgaaaggttgttgttcgacgttgagtcgaagggttattcagcagaatgctgtggtagctaggctgactagatggacaagcggtcaaccttgtctgaatccgttgagagacaggtggcaaaggaagttgagatatagaggatgtcatgttggaagtccaacgagatagcattcgtacaggacaagacggaattggattatgaggacgttgatagaactagtgctggtcgtcgtcgtcgtcgttgatgtcatcattggggatctaggattgatacaaggtgaagtccgatcgcaaacaccatgtgtaaaaacaccgactgtacttaaccaaatttgtgaatatatcaataatcatatatcagatgcggtaaagcgcagcaagttgctagaggggcccttcaatcagaacccacctccgtgtgcttcaaccatcgcaccatcttccattgaaaccctgctgattcggtagtcatgcttccatttcgagctcttcgagcttcctctattaggatcccagccggccttctaaactctcagaaacgatacgttggtagcaactacgctccgctaaaccctcttggggattacgtaggcaaggggccagtcgttcccaagtgagatctaagctttggcctctatatgttggctgtatccgaattctattttgtgttggttgtatctgccttgtttcgtccggatcacgtctgacctctggttctgtcttgttgaaaatgaatccttttagcggaaaagaaccagatccgcaactgttcggttatccagagctgcccactgaatatacccagcgtatgtcttacacagttacccttgtctttaatcgtcgcatatagtgccattccttcactgagaacatgaatggaaatacatcggatgcatgtagtcagagatcctcgagctggatggtgggatcctcaggagcgacgaaactttggagaatttgtatgtggttgataacagtgttcgaatatatagaacatctctacatttgtcaatagaaattcttctgacctatctctcttcaaatccctcacaaatacattgaatagcttcaagaggaggatgaagttctaaacgtttggtctccagaggttaaccctcatcagagtccccgattcgccatctatactgtgagtcttcttccttttcagaccatactagatttgatgttgctgattgactgtactttgatctacagttcgcggggttctttggtttcctctatctttactaccagtatgcctgggctactttcgaataccctcccatggtggcccgagagtttccacatgtaaattccatcgtagctgtgttcttagattagattgaaggatcagcaaactaactgtatcatactcttcttcgttgacctacaggacggacttctgtctgccaacggagggcacaagaggaaccgatacaacgtttaccgaggaattgatgaggccgacgttttcgaaggctctcagagagaatactacttgggtcctaaggttgtagagcctaggaagtacggcgaccgagacgagtagatggaaggtgtacgaatacgtcagaaggcaggaaacggttgtatgttgatcatgttgtgttcttattgttttcttgtgtttcatgctagagcagcaaggcgagatgaaacgagatggaatgctgtttgctcggctttaatgacgacttgattcagactgtatcgttgtttgaccaactgacgaaggaccgggatctgctggattatctatcgatctggccatcgatctgcctgtcatgaacggccaggctgtttctcagacaaacagtatgctgtcacacaatatgctgtcaagaagcacattgctcatatatgaggctttcagctggtctcttcatatctcctcgcctttcactatcacctctcttactgttctcatcgattccattctctaaattgtttttagtaatggcacctaaacctaaggaaaagatagtatcagccaagggagacgacggtcagtttctactctgtttcgcttgttccttgtcgacttgagccattgatatctcctttttatatcgatggcacactgacaagtcttctggattatcttgtgaacatgacctgaatagctgagaaggttgaagcctctgtcctagtggtttttttttcttgttactcttttgttactgatgcaactctcatggttcttcttatacagatggtgctcgactacatgagacaggtacatcaccaacttcgttttcttgattcctttcaagatgcttttgactaatccctgagaccggttccataggtcaacagaccatacgcggcgagtgcgtaacgtctcccaagacatcacgacccttatgaacagcatcgtttactttgtagacactgacacgtctcgaaatttgttcttgctgcactaaacttgtagccgatatatcggccaacttgaagcaagcggtatcgaaagcggccgctcagaaagcgctactctcgctgagcgacaaaggtcttctccataagaaagaatatggtctgctctatttcaaacttccttggatagatgaatcatctaacgctcctgagctgactatatgtgaactcttgttggttgatggaatgaacgttcaggaaaacaaacgatctttgttatagaccaagtatctcatttttgccatccttgcacgatcatggttacatgcgctctctatgtctgacgcatatacccatttatcattaggactctcttcccgagacaacccctgaggcgatttctactcttcaagcagagatcagcgccttggatcctgttatagaagccgcgcgatcgacagtgaagaagttgacggaaggtgcgtctcgaactttgctctgtacccatgtgttcctgcaagacgttcttgtactcaagaacggctatatgtgtcgggtgtttcgttctcgttacacgtgtgggtgtgtacatgatctggacggattagagcttaatacattgaccgagtcgcctcgaacggttgacctgcctggcttgattgccagtcttgaagcagaggtatgctcaatgactttgtacatcaaacaccgcgctactcgctgtagcctatgtttgttcgttgctgaccatgtggtctcccgtttgtctctgttggtatgtccagaacgctatccaattatctaatctaaggtctctcgagtctggcgcccccccaatctcagctgagaaactagagcaggcggaactcgtgtggaagaaggagcgtgctcagtgggttcaaagaagaaagatctacaaagcgttagttcgctccgactttccgtttcctgacttgaatcgtgatatcaatctcttgagtttggattgactttcgttcattgtgtggccgtgtcgggcacagagtcatcgatcagcttactccggatatgaatgccgaagaaagagctgagtgggaagagggactcggaatcgagccgatgcctagcgtacgtaagcttgtactgtacagaaggtatctcaagagacactgacgtcttacgatgtttcctgttcatttgttaatgtttaccaggagtctcgaaaggtggaagaaagcaagctctgcgtcgttccttcagtggtcagggcgaagagacctagacaagggagtgatgcgtaacacttgatcctctcagacttattgaattaaaaccatcaagcacatgttacatgaatgagacaggtagagagcctgatggaaaatgtagatacaaaaagacaagatagaagtatgacgaccagaagaaagatacagctaacgttgcgagcgtttacaagcctttctgtgctcggtaggcctttgcagcagccttggtcagttccgtgaccttgtcctttcctgtgaagtcagaaccattcttggctcggaactcttgtaggaaaacaagccaggcattaactacaaagcaggtacatacacgatgtatagacaagatgagagcacaacaagagacatatagaaggaacagagcagcatcggtcagttcctcgcccctaatatttgagaatggtacaaaacataccagcaataggggtccgcgcgtactttcggaggggcagcagcgatttatcttgcttcaaagcctccttgaacgccgtcttgtcagcctcggttaaaccggccgaccaagcctcgatttccttctgccacgtggccttagcgtcattgtagactttgttatctttatcaaaggcctccttgtatgactgaaatttcgaagcaagcgagggtaaagaatgaagaagagatattgaacgagtgaccaggtcagtagagcttctgagcaccgagaggatgagtgagtgttggatggtacgatccacagagaagacagagaccaaaatagagataaaatgaagcaaaacaaaggaggaaacaaaggaggatgcacataaggatacacaaacctgtttgtccgtttcagtcaactgtttccagccttcagcagctgccgcaagagatcgtttggccgactctgttccttcgacgatgacatcctttccggcggcgaagtacgactgaatgtatcggttgtaggcatttgttggcctcttcggctgatttttcatcgctttaagatgagttgagccaagagagaaaaagaacatgacaatgacaaaagcaggtgggaatggagatggattagccatgagacgtgcctagtctggtcgtcgattgaaccacatcgaaagattacagcagacaagactgaacggaagccagaccagcatctatacttacgagacacataggtgttagccaaattctggatcgttttggtaacagtcgacttgggaggcatttttgatgatgttatagagaaaggacaagggtttatagagatggatggattcgatacaagaaggaagttgacacacgtatgttgtgatgtatctctgattaagagacccagcacgcgtcgcggaggcgaaaggttaaccctaactatattatatatgaaaagaaggataaccgtctgctgaccaaggctcaatctgtttttgatattccaagcaacttaagtctagcttatagctacacaaccgattggcacaagcagccgtaaccatgtaatgatctacagctttaattagtatcccacgtgcctctgtcaacagtgaccccatctaccaagccggggtatcaccggctgcacagagtggccaagcatagttgttccccagatcttcatcaatgatcggacctccacaatttttttccgacggctccactcgacctgcggcagatcatgaccccatagcaatgaccggagttgtgacccatgtttgtttccgtcactctcccgcatcttcggtcttattcccttcatgtgctggatactaaccggggttcagaagaagactccgtctggggctgaacgttctttgctaactgggcttacgtcatccagacggatagatagttgaccattccgcttggaacgtctactttgactaacgctttctgtagccactcatgcgtttcgttttatcgtttgactcttatgtcggtcagttgactgacttctccggagggtgccccccattcctggggctcaccaagctaagggcgtccgtctccggcaatttttttcctcatcattctgttttctctcagttccttatatcctaaagcgttaaaacaggagcagtctatcgacggcctttcccctcttcctcttcttgaacaatctttctcttccttctcttaacatacactcagcgggaaacccaaactagactgctagctcgattcattctgtcgacgcgttcagcttgacaagtgacataacagacaactacctgcgtacaatccatctttacaaccctcacattccccacactatgcaaagttcacacggtctcaagaagacgcctgttagt

SEQ ID NO: 2903 - DNA, 89346 bp, Xanthophyllomyces dendrorhous
ctctttctctagcttttccttttcccattcgtttcttacactgtgaacttttgtcttccctgcgcacttgtcaagatcaacgcatcgttcttccctaacgagaatgaacgggaagatgagcatttcgaaaatctcgaccactcccctactaccactgctcccgcatcggaggctggtttctcgggcggcgaaaagactgctgacgtcaagagcaaaaaaaagattatccttgtgcagtttgaggaaaatgatcctgaaagtaagctcctttgttcagttttgcaactgtcgtcttgatttcgagctaatggtatgtaatcttttcgcagatcccatgaactggtcgactggcaggaagtggactatcactattcttctcaacttgatgacgctcatcatcggtctttcgacatctgcttattcgtctggaattacttccatgtcggaagagtttggagttgctaccgttgtcggacaggtgcgattcccttcttcgtctcttcgcataaggtctgactcggctcaacatcaggctaacatgttgtgtactctttaaaacgataggttggcatgttcactttcaacgccgcctgtgcaatcgctcccttgttcgtcgcccctctttgcgagttgactggacgaagatacatctaccttggcgccttcctttgtttcactttggttgacttgatgctcgctctcggcaagaacatcggaaccgagattgtcggacggctcttatccggattgtttggatccatcggttggtctttttctgttttcgaaccgatcgtcagcttacattgactcacccaactctgtcacctcttctaggtacaatcttggttggaggaactttcgccgacatgtttgttcctcgggatcgatcggtccctatgtctgttttcaccttcgctgccatcttctcaaccatcgctgctcgttcgttcaccttttctccttaatatcctgactttggagcgaagtcgttgatctaatcacgctttgtgacactagctttgtactgtggtttcatcgatcagtcactcggttggcgatggattcagtggattcacatgatcgctgccggtgtccttctcattgcagagttcatcttccttaaagagagccgaggagcggtcattctcaaagcccgagctgctagccttcgaaaggagaccggcgacgatcgataccgagcacctatcgagctggagtcggattcgattgctcagcttttcagagagagctcacttcgagctattcagcttttgtacaaggagcccgttgtgttcttgtttggattgtacgtcgatacattcgtttttccaaggtcgtatcatgcccgcgagatctgattctcctgtcatgcttttcttcgtcctcgattgttcagctggattgcgtgagtttttttcctttgtcgatcaatgttgttgtcatccaaaatgtcaagcactgcgcttacaacgatgtatacatgcgtgatctacagtttggcttggggtgttgttttcttgttcctttcggccatccccctcgctttcgccggtaaccgaggatggaacactggtatcgctggtctcccttacctcggcctcattgtcggttgcttcatcggatttgctactggtttctggcaggacagcatgtactacaaagccatggacaagtgagtctgttttcaagtctgcttcttcatgtcttcaatctaacgtttccacccatgtgtactattgcgtttctgcaacagcaacaacggagtacctgtccctgaggctcgactctatggtgccatggtctttggtcctcttttccccatcggtatcatcatgttcagctttacccagtacggattcgttcactggatcgcccctgtaagttttgtttcaatgttcttctggacgattgttagaaatactgaccgaccttgtctgcacgcacagatcattgctctggtcttgattattcttggaatttaccacatcttcttggctgtctacaactacacctgtaagtctatcctgctcaggcgcaatcttaacattccttaactgaccaagtttcctgatgtgatctctccagccgattcttatgccgagtactcgtcttccgctattgccggacaaggtttcatgcgaaacatgtttgccgctagtttccctctattcgccactcagatgttcaaaggaatgggttatcagtgggctggttcgttctgccacctcactatcctcatatctcacatagcggacaccttactgaatccatctgtttacgtcttctctacaggcctcatgatcgcttgcatcggtttctgcctcgttccccttccctttgtgcttttcaagtacggagcgtccatccgggccaagtctaagtttgctgcctctaacaccggactttcagccgacgaggatgaacaaggagcacccaatggcaagaagctcaacggccgggccacgtacgacgacgagaaagagaacaaacagattgaagctcaaatgagctctcagactgataccaaccaggatttacagtccgccgggtttggtgatcaggctgctcagagagtatagacatcatagcccctttgccttctgccaagcctttccactaggtactcatcattatcttcctaatccttcaattcacttgtctcgttcctgtttctatcttagaacaaccacttttcgttattttcataaatcctcacctgcatcaatgaatcaaactgggtagggcccatctatggtttccttaaaaagaaggaagacctcatcctttgctgctgtattaattacttttacaatattgaaacaaaaatatatatttaattctctctgtgtgaagaaaactgtcgatagactgatacagacgatctgagagtgaagatcatggctggatatcatgtatgtggatcagaagaacagagctgctttattggcagacagaacgccggggctcatactctccacaaccttgcactcgcttgagtttcttcccattcttctttttcatctattctccatttcttttgttctcctccttttcgttccactttgctgcataccctcactccttcatcttcccattcattcatctccatactctttggtcttcacaatcctctgctgggcactatgaggctgatccctcgagctgtcgtcaaggcacaaccattacttcagcctgccctgatatcccaacggcagttctcctctggggaacaccctccgagtagacgatccaaagcaaagcccaaagagatagtgaagacgatcgcatccttccttccggcccgtcctcctttcaagaaccctttcgagctactcggacatgctacgcgttatggagctcaagaaggtaagccatcttctcagtccaatctagatcgcgttcctgtccttatatcgtgccttaacaatgtcgttcatctcattcctcacgtcgctcgatagccgacaatccgttgtaccctcggtacaacccagccaagatacagcttgtctcttccctcgtacataagcagatctttccggaaccaacctcttcgtctcccactcccgaggcgctagaggtcttcagccgagtgacaagcgaacagactatgtcgatagacgggcttatgtcgagaaagcagacatcactgccgttacctccccagctgggaggcgaccttcgttctcatttcgaagctatggcttccaaggtttgtttgaccattcgttgtatctgttgagtttgcctcccgagcctcatcagtggttcttttatacgcaaccatgcgatcaacacttgtgttctgatgaacgctcttctaggttgcggaaccatacctgaagctctcagaacaagcagcggcaggtttcaaaaatccggttccatcaacgttccctgacggctcagcgtgcgtttctggatggtccagatttgatgtcgatactgaatcctggattgctacgccccatccggtcgagcaggtcctcatcgtcacctatgataaaatgccccagaatcatcgatggccgctcttcgcttgcgcttcctcgccaactgatacttatatatgggtttctccgtggttaacaggggattcagatcacttcaaacatctaatctctttcggccattcagcagaacctaggctcatcatttccaatgacttggtgggcttccgaccttgcgttcaagagacctacaacattcaggatagcgcattgcgattccttagtatgggtggccttttgggttctgttgtaacacagggcaagaaaattccagaggataactcgaaagatcactctgacttcgaaccgtcattatttgaaggcgtgtacaaccagagctttccaaaatatccgattcgttttgcttctcaaatgccgtctgtagtccggactccagccaaagcaagagaggtaaccgagaagagcctcaaggagttatttgaaaggcttagaggaatgggtcggtattttcaacttcttttcaagaatttccggaagacctctccttctttagtctcattatccggccctctgagaatgggaacatctatccttcctgtcgatcacgagttcagtcggtttgtcgccaattctgagcaggccttagaagacaccctgcaacacgctcaaacggatcttgctctacttgccgaagaagctcgactgttatggactcctccatcagcccagtataagcctgattcgccacactcggaccccatcgaacttcctccccaaatagcgaacgacgaatttctatctcggttggactggacacctcaacgggctaagcatgtcaattggcccacagagttcactctcaagcaaagctcggatcctcttgcgatatctcaccgtcaaaatgcaccgatgaactatgacgaacttgtctcctccaaactcatcccaactcagattggacttcggttcaatggtcatcccatcgtatactctgaggaacatgggttcatctatttctctccaacaccgctggagaaccaacaaccattagaattttccgatgtcaatcacgacgtgcatctcgcgcatgccacgagcacttccggagcgtacttctaccggttgccgagcagaccaggacttgatattgccgtccgatcggtgttgaataaagattatttgaaaagatcattttcctcgcctctgagctgtgtcgatccaaaactattggatcttattaggaaggatgcggatacgagccttattttagaaacagtgtctcaagcaatctcgtcttacactatgtctaaagataagagtcagtttttctttgaaacttctgttcatcaatacattcgtaaagctccttttgctttgacctaatttctgacctcggttgcgttccggatttacgttctttcctccagtttcgaaacctttttcaaaacatctttcgaatactttgtcgcgctttgatgatacgcccaatgaccgcgttgatttaaggaacaacgtgacggtgcctgcccgtatcggtctcacttttgatggacactctgtggtttattccgccgagcatgggtttgtgtatcgaactgacgcgccaatagatggttatgaacccttgcagttccccaaggagagtgcagataacgtttttgctttcatatcttccgcttccgagggatacttttaccacatgcctaccataagatatgacggcaaggaagtccgatcggtactgggagcaagatatttgacgagagttgggttcaatcggtttagctgcgcgaattcagacctattgcaactcatccgagatcgggcggataatgaatcgatcatgaatgccacgaagagagcgatggccgctcaagacagactaatgaaagaggcaccacatttcgactatccagctccctcgaaatctgctctggaagcttattggtggccgaagtggttcagtgatctttttgatgatgtgtctaccgagcctgccaatcgtcttaatctaccaatttcacattcaattactcctatactccttcggctctgctggaaaggctatcctctataccgtagccgtcgtcatggttgggtatatcgggtgccgacctcgaggacgaaaggagtaaagctgcacaccaacatgcgggagagtggagaccattatcttcaacaattgggagctcaagaggtacggactatggagcgggacgggttccttcacccaaaccgtaaaccgaagagcgcattctttagaataccatcggcggtcaaaatctctcaagccgcagacgatatctggtcaggattcatcaggggagggcggctcactagttctcatccgaaggcccaagccatacttgaatctctggcctcagggacaatttggacattgcaccgcgaacgtatgaaaagcgctattgccatgaaggcatctgaagaccaccctatgggtttcgatcaagaaatacgaaacggaaatcagaatgaatggagcctgattgctccacgggtctcgcctatggcttctttgacaagacaagcagcggatgatatttggctggttagtttagtccctgcaatcatcttgtttttgtacccgaagctgagctacttttttctcttctcatggtctttctttgcaatctttttctttctgttgtacaaccttttgtgatgctatagaacgctcccaatccaagatctgaccagattggaactgaggttaaagcaatggttaaggctcctgaaggctatagaattgtaggggctgccgttgagtcccaggaagcatggatcacttctaccttgggcgacgctcagtttggctttcatggagccactcccgatagtaggaaggtcttgaacggaaatgagaaatcacaaacagacatacattcccaaacagcggcgatggtcaacacccaggccgccaaggttttcaggatttcggaacctgttttgagccgagaacaggctaaaacgttaaaccaccatcgagcctttggcggcactcaacacgacatggccaaacaaatttatctttcaatgcctaagccagatcaaacggtggccggacgtctggctcgatggcttcgtatcagaacaagaggttggcgctcgagagcttccaagatgcaccatttctggtgcgaaggaaccgaaagtttttcgtccaactcggtcgaaaacattgcgcaagccatcagaccggttacgcctcttctgggtgcatgtatcccgtataatatccaggcgtcaagattggccgatcccgcacactttaggccgatccgaatcgattggagtgtaaagtcttcaggagtcgactacctccattgcctgattacctcgatggactatctgtgcaccacctttgagatcaacgcccgcttcttgatctccaaccacgacgaagttcgatatcttgtcagagaggaggatagctaccgagcagctttggcacttcaaatttctaacctctggacccgtgcattgatgtctcaacggttaggaatggaggatcttcctcatcgtgccgcctttttcccttctatcgatattgatactgtgcttcgggcagatgtcaataatgactgtgtcactccttcccatccaacacctatcccggctggagagaccgctaacatccgagagattctcaagaagacaaacagcagtctcctccgggatggacctatacctgcttccgtcccgagcgacaagagtgggggatcgaccgagcttgagaggattcttgaagattggaagaagctttacgcggaccgtgtttcttcgtcgacggccttatgtgaccatccgaaattcccgtcacttgctcaggtcaatgcggatcccgactggagaaggttttatctttatgcgcaaacagggagaaatagagcagagctcaagcaactctacgaggagactggggagcctgaggattgggttcgtaagagtcgaggcataaaatgattgagaacgaagagcatgatgttttatttgtatacttatttaatctcgatcatgtttattatttacccgcatatatttattcctttgctctcattttcatatctcgcacatggctgctccctatcgcttgtgcttcttattctctgtttatctttgacaattcggaaacggggggcgaagtaggggggccgggcttgggtagaccatagaaaatcgaatatcatatagaaatgactaggctacaaaggatggagacaaagattcgaacgaaaagataacgagcgatcgatgcggaaagcccttaatcgacaagagaaagcagtgaaagtgtattgtgttgtgtgcagaatcaaagatggaaactgaaagatccttcaaagagagagggaatgtggagggaatgagacagagaaaaaaagaagaagaagagggagacgatgccttaacccaagaccttcttcagtccctccttttgagcgtcggtaagggtgagagggaatttaatctgccatctgacaagcaaatcacccttctttttcagactacctttcttgctgatcggcatacccatctcaaatagcctggtctccttgccgggagtgacgactgacggaggaacggtgatcaaggtggtcgttccgtccaacagagtgatcgttcgttgggaaccaccgggggaagtcaatgcgtcgagcaaagaaatctcctggttaagaatcaagtcgttgtcctgtcgcttgtatcggtcgtggggcttttcttcgacgacgactggaacgaagagcgcgaatgatgcataaagtgagcaagataagtcacgaaaaagcgaaagtagaacagagggaacaagaaaggtcaagcgacttacaaacgacatcagccgaaggtccgttatcaacctcggttcccatcgactcatacttgatcctcgttcccgtcttccatcctggcttgatgacgatgctaacgaccttttcctcgagcgttccattcaacattcgtcttgtaatcttgagcttctttgtcgttccggtgaagagatcttcgagtgagcaaggtaacggtcgaacgatctcgtccggctttggctttggctcggccctgggctgtcgtcttcctccgcctccaccgggcataccaccgaaccctccgcccatatcaccaaaaggactgtgatcatgaccacccatgccgcccattccgcccattcctccacctcggccaccgccgttcatgaacatactgtaaggaggaagagaagaccgacttgtcaaaaccggtcgactgtacacaacgcttcataacgaaaaaaaaggcagctcactttaagatatcctccattccaccaccaccacctcctcctccagggaaccctccgctgaaacctgctcctcctcctccaaagccggaaccaggaggaggttggttcttcagtccatcctcgccataagtatcatacaagtgtcgtttattctgaattcacgaaagacagcgtagaaagataggagatagtcaaacatgttagactcttttgcgccacacgattcataaaggaaagtgatagaatccaagacgtacgctgtcagagagaacatcgaatgcctcagagacctctttgaactttttgctagcagtctcgggactgagggaatatggagaaagacggtgacgtttgatcagcacaaacgccggatcatccaggaaaagaagatacagtcgtcgagagggtatcttactcgttagggtttcgatctgggtgatgacgcagagcagctttcttgtatgctttcctagaaggaaaagaagtgaaagaggagcgaaaaggaaggcgaataagtacaaagaaataggttgagtagggcagagagtgaggaaacgggaacgaacttgatctcgtcgtcggatgcgtcctaagagacgtcatcgaagttcatcatacgttgaaaatccaaggtatcatcagctttggctcaaacgtgaacggcgtaggccaaagtagaatcggatgggaagcataccttggagatacctaacagtctagagaccaccgaggtaagaggatcataggaaagattgtgttagtgaaacgaacacagaccaagactcttgcgataaaaaggaatggagaacgaagagccagaagccagtcaatgcgaccggacacaagcacaaacggttggaacggacctgtagtacttgtcgtcggccattattctatgattcgaaagagctgaatgagatgatctgtgtgcgtttgcgaatggatgtacgtgttgctgtttatggagggaagagaagaggatgcaagaagagaaaaaggaaaaaaaagccaacagcccgactatgaaattcttgccggttttctaatagaacatgctagaattctctagtcagttttcattctctccgcctccatctccatctctcatcatcgtcaccttcgatcagtatcatcgttgttggctcctcatcatgagttctgttcagaccagacacagagtcatcggcctgtacaaagaggtcagcatgctagttcacagaagagatcagctcacagaggtaagaaagctaactggtaacggatctattgacccatccctttcgttcagctcatccgtctaggtcgagactagttcgtcccgatcgactaaccgtgtatgagagactcatcctttctctttcttactgacccgttgttttctcctcctcctccttaataatactaactgatgctcttgtaaagcccaaatcctggatataactttgtacccaaagtacaggcagccttcagagcatccgcagggttgacagatcagaaagctatcgacgagaagcttgctttggcagaacatgtgaagaatggttagaacctccttctctcttttcttccttgttcagctccggccgtactcacgcgcgcttggaatcaatatcgacttgatggtctacatcccgacaccgccttacctcttctctctgtgatgacatccttcagagacactggctctgatatctctttccaaatatcgatacctccgccggacgtactgtgttcccattaaggatacgataccagatgtctcactggaaaacacaaacaaatgaggaacccctgctttatttgtctgctttcttctcgaacgaagcagagcgtccgaggttctttcgataggaggcagaaccatcgtgattcacgttcgagggtcctgccatctgctcacacgcccgagaccgtccgtattgtcgttctcggtccaggtccaattatgtatattgtctcttgttgtaatcttattcagtcattttgggatcaatttgacccattgatcgagtctcagctcagacttgaactgcatggcaaaaatctttgtcttcttcattagacaagtagacaagagcagacatatagatcagagagggaataaagagaacggatcacgaaaaggaagaagaaagcttcctgatcaagaggaagaaatgataaaatagagaaagacatggaaggaagcgaataccggacttaatgtacaagagaccaaaatcagagagaaaagagagaaaagaaaaagatagccagacagaggggaggggagaggagcggagaggagagtagaaatcaaaaaagagaccttgaagggaaaaaaatattaaaaagttatccagagaaaggaaaggaaacagaaaccgagacgagagaagaaggtgataaagaggagagcagacaccaacagatcgtatgctttctgagggtcttggaacgattctttgcaataaatttaattcggattttgacatttctctcttatcttttaagaatatgtcttttcctcgattcatcgccaatgcgtcggatctatcataacgggaaacagatctgtcagttccagaatcagctaatcaaacaaaaaggagatggtaccactcactacacagcccaacgttctacacatacacatcgctcctcagatccaagggtacgccccgattcccgacccttgagctgacgttccagaaccagagctagagccaacagagtatgtacctatctgcctctgcggtcccatctggaaggctcctccaggagcagatctgtagacgcccatcgagggtccctggacctgctggtaaacctgagagtgtggagaagatggcgatggagagaggggagaagatgatggcgaaggcgtcgtcaaagctggatggtacgctacagagagcggagcatggtgaccacccgcggcaatatttgtgtgcatatgctgttgctgttggtgagaaagatcaagttgatgaccttgaactggaggagcaacgctgatcgcctgagggataggatgatactgagtataaaccggatgctgaagatgctgctgttgttgttgctgctgctgctgctgctgtatcgcaagagaagccgatcgatagaccatagtagagtttgggatgtgagctcccgaaatcattggttgatgagcgacttgagacatcatctgctgctggtgttgctcctgatcttgatgctggttttgggggtggacgagagatgagggagtagctgactggaaaccaagagaaaatgaacccgcctgtggctgtaattgagtgttgttctcgtgcgaccaagggtttggtctagcagtgccaatgggcgccggtcggccgaccgtctctcgctgtgtcaccgggttccagattggatcgataccaggcatatgtaatccagccaaagggaactcgagctgacgcgacgtgggaccatgatcatcggtttccaatgaaggaacgagtgtaggtacaggcgacggtaggctctggacggcagcaacgtgtttgaaaaggggaacagtcgatagacgaggtgattgttgttgcacggtaggtacagtagcttggacaacggcagtggtgaacggagtgtcgataggcttatccacaggagcggtagaaggaacagcaacgagagcaggggcctcctcaaccttgacttctggggcgaccggaataaccttcacagattcgtcaacagcggcagtgggttgaacgacttccgtcgtgataggcttggggctgatgacagacagcttttccactacagacgacttggtttttcttgactctgaggaggaatgaacttcaaccttcttgactaagggtgcaatcttgacagccgctttgacgactggagcagacgaggaagaggaaccagatgcagccgccttcttggctcgtttggcttcggcttgtagatcagcttcttttttcttccgagcagcttcagcctcagccttagctttggctgctgtcgctacttccgccttgactcgtgcttctgcttcaatcttggctttagctttggcgaccgcttctgcttctgctttagctgcgacctctgcctctgccttctttagagacgctgcctccctgttcttctttgcctcttcctctgccttcctcgctgctgcctcagccctcctcgcttcagcctctgctttcctggcagcggcggcgtcttcagccttcttcaaagcggccgcctccctggctcgtttagcctccaattcggctttcctggcggctgccgcttcctccactttcttttgtgcggccgcttctttagccttcctggcgtcggctaccgctttcttgacagccgcggcctctctgattcgtttagcatctgcctcggcccttcgggcagacgcctccgcctttctcgcagcggtcgccgcttctttcgccgcctttctctcggccttttccgactggagcctcatcagatcttcccagctgatcgtccccaggccttgaccgatgcctccaccgggttccatgccaacgtttggtaccgactcagcccctccgaacatggcttgcatctctgcttcctcctcaaccgacatcatgctgacaacacaaccgtcgctcagagttgttcctacacccaaagccttggcccttgcctgtagttcggcgtccgccttcttctttgctttctgtcgcatccgtttcttggcgttgagagatttgagaggtaattccggtggtgccgatgatgctgtaccagaatcaacagagtcagcgtcctgttcggcacgcgagtccaaatcgtcttgggagtttcccgaggtcgaaccggatcgagagcgtatatgttgacttggatcagagttcaaccccgaaccggaagcgaccggttgatcaatttgggctgcttccggttcggctgcagagctagcggcggcctgtttcttcttgttcttcttttttttcttgttctttttcttgcctggtagaggtatctcgatctcttcggactcatatacgttttcgtcgtccgagtagtcatctggacccgcgataatgttagcctgaagagatggaaacaaagagatgccagtagagagggtaagcaggttcagagtcaacaggagtgagcaatcaaccagaaggggcgacaaagaaggcgagaaggaagaaagcgaccacaagagagacagagagggagagggagggagaaagtgtccgaccaacgaaaacatcgcggatgaaaggaccgttgaaacaataactcagcctgagcctgggaacagagagcaaactacaagaacgggcagaaaaggggaggagaaacaagaaggacagaactgacgtcttgaaggatctggatggcccgagcctgtgctatcggattcgatatatgatggtcttgatagatggatcgataatttgcttcatcgtacacgttgtggtgtgcctgaaaaggaagaaggccatgagagccatgttcggtataagcaaacccgcccaatgtattgacaaggtctctatggaaagccccggcggagaacgtggcattgtcgtgcaggacaggttggatggatgaacgaacaagagcatcctgtgtggttatcgccatcgacgacggcggtggcctgtagctgccgatcgaactcggacttatgctcggtccgacgcctacgccgacccttgtactttcaatgtcacccatgccatatgtcccactgatatccgaggttttctcacgaaacgactgtcgggcgatccgggaggtaatggccgtgttaccgaacgcggaggttggcagaccgaccgaatagactccttgggaggtaggaaacgtggtcgaaatccgtccggaaagaccctggtcgatcctctggaaagtgatctttgcgtcttcggcagaaaccgctcgttggcgttgagccatctgggcggcttctccggcagcagcgagcatttcctgggcggcctctttgagctgtcggttgaactccaaccggtacgcctccgagtttggatcccctgtcattcgactttggatctgactctggatatctctcaagatgtcttgcctcgaaggcgtcgagcttttgctgtagacaaagaagaggagtcgcaacaggatgagagacaaaagagataaagatcgagcagttccggtaggggaacaaagaaagaacgaaagactttggaagacgaaaatttcaagacttacccctcggtcggcgttgtgacgctctttcctttctgaagcgggctcgatccagagatagtagtcctactggtagtaccacgagtgttcttgggacttgtcccgagatagctccagattggagctgggtctggtgtagatttggatggattcggctctgaccgaggatcagttttgtcaacatgttccgttcgtctatactcggcgagagaagatgcggtctggtcgttcatcgtagcgtcgcattcgacttccgacagcttgttgtcggccattgatcgatagacgaaaggagtgggccgcctggatgtgaattatgtgttatggatacgtctacaaggaacagaacagactggcgaagacggtacgagggagagcaagtcggaagatagcgagagcaaggacttgggcagcaaccgaggattaaacctggatatcggaccagagagatgtgtggcagagacggatggaagagagtcagatctaagcaagtgatgttttttagggaccagagaatcttatgggtcaaccgaacaatgcgaacgaagccacacagcagagaggtctggaagcctgaacgatcaaggacaaatccaggacgatacaacaagctgacgcagtgtattcctttctatctctcctctcttgcagccgtcgctgtcactctgagagaaagaagactggaaaggatccaaggctggacgtaccgatggaagctgatggttactggttgcctagaaggaagacgagaataaaaaggaacgaactggaagaaactacaaaattgcgtaatcacattagaaacgttttctaatacaaagactacagaagtttgacggccaagactgctgctctgacagaacagttgttcccatctcccggcaaacacacatcgtctgtggacctctagagaggagtatcccagaacgataacactacaacgctctcccagataccatatcgacccggtagaaagccccatcatctgccggctctgcaaggattcctataggacgcagggtttctcaccgccagctgggggccgtggcagacgtcagattacgtaagtgtccggcactttcgccgggttacgtaatcataccatctttcaaaaaaacgggagaactcacacgctgaaagaatggcagactcgacaaggataccatcacctcactttggtctttgatctgtctatctcttgttcccatggcatcaattctctcccgatcgcttctctcggcttctcgtgtggctagagtaccggccggcgcgtttgttttggctcagaaggctacctttagctcaactcttgctccttccatccggatcaggtcggctcctctcgcttcggacccaactccgcctcctccaccgccgttcaaggcttcacccatcagaccttcaggtcaatccgagtctgacgtgaaagaaagctcttctgatgctgaggcaacgtctgagtcggtcccggaaccgacgcctgaggctactaaccctccgccttcgtcaccgggagccgaaacgcccgcatcagagcctagtgcaaacgctggtgccaagccgactgccaatccaactcctgatcccaaattcaaggccaaggaggaagcaaagaagaaaatgaacagcaagctggtcgacaagatcatatatcgaggtgcctgggctatcgtggccggttgcttggtatactctgcgttgcctttcagcgaggaggagaggaagcgcgttcaattggaggcatgtcttctctttgattttctctctctccttctctccggtcacgtcttgcttcagcatctctcatgtttgtagtctgatctgatctttatttctcaattctaacaggccggtgcctccgacccttctcttaccgatcgaatgtgggctcgactgacggatacttatgtcgtaggttcccctcctcatgcactcaacttgtcccaatgatctaaaccttatgcatgtttcgatccaaacttcacccggtgataggtccaacccaagcctttgccacctcaacccatgcttccgcctccgattcaggcggaaaagcctttcaccttgatcctcgaccttgaaggaatcctgtccatgacgacggtggatccagtaaagggccgaaaagtcgcgattcgacctggagccgagtactttatcaagtaagtgcggatcggtcttgtccatacatctcttttgaaacatccaatcttggcctagacctcattcgcttgtccgatcgttctgtgtcaaacagacgcgttcatcagctttatgatatttcggtcttgacatctcagccaggcagagtacgtccacttttcacgatcctcaagcataccttcatttttgcgcttgtatctcaagctcgttcttttgtctcttggtcgcgacacgataggaggcgatgatgatcctcgacaagttcgatccctatcagttttacattcccttcaaccagcgacttcttttagccagccccgatcctgaagccgctccggtcttgcctggaacccaaaagaagtcatttgagaacctcggtcgagattacgaaaagacggtcgtcatcttgaccgatcgaaaccaagtgggaagccacgaggaaaacgtgttggtaattccaccgtggaagggcgatgcgtctgataaagcattattggacttgattgacttgctcgagggtatgacgttctttttatttttcctcactctgtacccggcaaacattatcctgacgagttgattcatgcgtctttcttctttcctttcccttttcctctctccttcgtgccttccttccatagctctgcgatgttcagaggttgatgacttccgaccgatcctcaagacatacgccaatgatgcaaaccccctcgaaacgttccagctctctgaagccaaccgacggaaagcagcatacgacgcatgggcgctcacccccttcggagctcgagcgatccaagaaaacattccatccggaacaccggaagtgcagccaacgtcgtcactctcccgatggttcggactgggagcatccagaggacaggcctcgaccggtagatcagtcgttcccaccgtctggggagataaacccggtccagggccggataagttggacgtcttgaagtatgtgattcaggaaagcatgagaaagctggaggtagagttggagagggcggtcaaggaggaacaagcaaagaaggctgaggaggccaaagccggggaggtggctactgtttaaataatcatgatttggatgaaaatgtaccttcacatgcacccccttgctctccaaagagatacaaaaaaaacgttttaaaaaaaaggaaaccccgacagatcagaccttcattacaatgatttctctcgatggagtgactgaaaatcatcctcgataatgtaaagaacacatttggatgggtaaaagaaacttatacccgctcggtcagatccgaacatttccttgttctatgtctcaaatttggaattcgcccagatgctaaacccatctcttcattccatcttgatctcactgtgtcataaaccagacaaaatcaccttagtgactgactgtgatttcttctagaacgaagaaaaacacgaagactgcaagaacactacacgcatcagaatggagagcatcagggctcataatcctagagacctcattgtcatcagtgcatcggacgatcagaagagagctagccgagtgaacaccttccgttcgttcgcttctttttcttctctttgatggtatttccatttccttctcatggcgatcgtcaagcttatcaagactcgttttgttcaaaaaacgaaacaaacacaaatccgatgcaatgaacgtgattgtcgacttctgacataaaaagctcagtggggagctcccaacggcttgtcactcgagatgtatctgaatagagatgaattgatggactcggaggcgtgggctgctgatcggaaacttgtcacttggtttgtgttattgatttcttcttcttcatcttgccttcttctcttgtctcttgacgcacacactgatctataacatctcggactttgtttgcggtgtctaacgattgggccgatgcgccaatcgataggattcttacaacaaagagcacagctgatcagtcagacactccccttctcgcccattgcgaaacattccgaagggccgcttttgttcttgatcaatctgctactgacagtgagaacgagacaagcatagaaggtagaaagaaaagattgaagagagcagtggggtatggaattgcttctgtcttcacgccagctgttcacagaagcaaggggtatgcgaaacggctattaaaggaattacattgtttgtctactcggttctttccctcattgttcgccaagcaggaagtcagaggcctcctagctcatccgatgtgatcgatcagaccttcttgctccctcagagtcactcccgccgtttcctgaaagtctaggatctcatactccaaaagtcccttcagagttgacgggtatgctacaggacggtgcattttctgtactatatagcgacattggaccatcggtttgctcttcttgcttcttttctgtcctgctactccacttatagagctttgactgatcgaagcttgggctggtctgcgtcgcgtcccctacgggaacggggaagtgtagttctacacaggatgctacgttggcgagtcggagcccggatgggtttcccagtcgtccatcacctgggaattccctatccttccatcctctctgactgaaacagacaaagaagcaggaacgaatgtgaaatggatatatttaaaagaggacatcacccacatccagtcgcgcgtatccgaagagctttacacacaactagagagcacaaccagtgaaagagataaagactgcgtcgagttagggtttcttcctgaacagtatgtattatcgaactctataaaacatctgatgaatcaacgtgcatactgatctgcgcttttcatccaactgtatcatgtacagaggtcttctctatacatctatagtccgatcccaactagttgacacccagccaggtcccaagcaagcacggcgaacgtatggatttcagacgtccgatggaggattagttgtctggtctcctgtagtagagaagggaaaggggaaagggctgggcatcaccttcgtaggtgctcctcttattcttttgtccccaagttaacggaaactgaagcttgtacacatgtatacgtgcatatacaaacagactatgggaaaaatcccatacgacttgatcgcccgcgccgccgccagcgagcagtacgactggatcgagatctgggacgaccggtggctggccgagcaggaagggatgggatggcctgttgatggaaggaggatagaaagaagttcgtctgccttctcgattgccctttttctgctactcgtgcttgcgctttcctctattacgcgcgcttcctatctactgacacttgactcaaccgtgtgagaatcttaatagaggaacatctcgctcagttgtgttactacgatcgacctaaggttgacaaagctcgctgggtctataatgaacggtttgttatgttattcttgtagttcaagtcaattacgacttggcttgtcttctcggtgtgtactgatgtgacagactaactgatagattcgttccatctgaccacttcattctaggtatgcatggtgctgaggtcgactaagcatatgaactcctatcagccatatatcaagtatactgtagagaggggcagcgttgtacatctaaaagaactactatcgtaatgagcttacaggaaggcctatcggcctttctcgctgtacttccatatcccagtcttacatgagtacccgagaatatcgtctgtatctaccaacaaatcaaccagagcatggacagtatatctataaggtcatcagagaaacagactggatcggaaaaatccgtcttcatagaatgtggatttcattctctgcaccgctttgcttatctctttcttatctattaccgttcttgaccgaaaacccgatcatcgataatcttctatccgaacccatcttctttttattgcacactccgcctccagcatcttgtctgaccgcataacatcgatctctcaaacaacaacgacagaagattgaaggagaagaaacagtcggagacatacggaaggaaaaaaaatgagtggagaaagtgtttcactgacagagggctatgatcatcgagaactgatggtcgtccaagcttctgaggagcagacgagaatgactcgcctgaacacatatcgttcgtttttttttcttcatgcttgctcacctttttccggctgagtttgcattttcagcagctcattcactgattgaaaaacacacctgattactcttctttacttctggatgctatcttccgttcattcgtaatcgatactccgttctacacgcggacgaaacagctcattggggactctcaaacggagtctcgctagaggactatcttaacaaagatgaggtcatggagagagaagagttctccactgaaggcaaattcatcgtctggtacgccggccttcttttttcttcctctttctcgttgtccgcacttgactgctaagctgacatgcgctgtacaaacaggattttgacgcctaggaagacagccgatcaacctgatacacccattcttgctcaatgcaagacttatcgacgagcctcttctttcatcctcgaccgcaacagcagtcttgcagagggaaaggtaccgagcaccttggagaagaaggtgggctatgggatcgctactgtttacacgccagatgcctatagagggaaggggtatgctaaacggatgttgagagagttgcattgttagttgttttctgtcttttcacatatccctgagagtgatctgatcacgttatactgtcaatttttatctcacgtacagatctcatggcggccccagagtccttgcctccgtatccggccagtctgggaccccattctcctcgtgtacctcctaatttgagaaatgttctacaggatgctgcgttctctgtgctgtatagcgacatcggaccccttgtttgtttatttttcttgattctgatcgaggttataccacggaacatctggacaccatactaatctagtcgaggatactgtcatggtcagttctacacgaagtgttacgtcggcgagtccggatctggctgggttgcccaaccatcgatcacctgggagtttcctgtttcggctgcttccaccacggcgacccatcctgacttacagaaagagaaagatgttcagtggatatactcaaaggaggacattattcccattcagtcgcgcgtttcgcaagctgtgtggacccaattagagcgctctgcacaagatacgaagggaaaggatggagctgaggtcgggtttctgcctgatcagttcgtctggtctttctctcctttcccttcggatgtacgtgtatactgacgattatgacatcccttgcatctcgctagaggagtcctatacatgatcatcgtcaagtcacaagcggttgatcctcaaccaggtcctgatgatccaagacgaacatacgggttccaaacatctgatggaggggtcgtggtatggtcacctgtcgtcgaaagaggaaggggtgtcgggttaggtataaattatgtatgtccttttgttcttgcctacccatttatgatctttcttttcttctcttgatgtgactgacgaaacacacttacctgtgagtagactatgggaaaaatcccatacgacttgatcgcccgcgccgccgccagcgagcagtacgactggatcgagatctgggacgaccggtggctggccgagcaggaagggatgggatggcctgttgatggaaggaggatagaaagaagttcgtccttctcttataagcgggagatcgctggtcaggtcgtgtctcacttatgattcgttctccctcctttaaccggacgttgaattcattagaggaacatatacctcaaatttgtcattacgatagatctaacgtagatcgcgtccggtttattttcaatgagcggttggttttctttttttcccttatacctatctgctgtttcacttgactgaaagactgagcacaactgactgatcgaccaatggatccaatcgtttaacacgtcctatagatttgcatggtgttaaatcaagtcacggctgatcttcaaaagggtgataagatttgtatgcgacgcggaggcagaagggaagggcgagtctgggacagagaaggagatagtatatcttgactacaaaagatccggtacgacacttgatacaattccacatcactgagattagtaacgggacctcttgttcaaacgcaagcgttctagaagattttagtaggagaaagcaagtagaaagacgaaagagagagaaaagatcacgcattgtaccgcatcgacttgaacaagtcatacactttctcgctcaaaatatcccctatctttcgtctacccacaccttttacagtagcaaccaacatgtgcttggcatacctgatctttgccggcctcttcttcggtgttttggtcaccgactcggccttcttttcggaccctattgatttagatttcgacttggacttgggacttggtgtagggttaggttgagatttagcaatagcagaagctgctatatcctgcttctcgacctgctctgcttgctcgaaagctttccacaagagttggagcgtcgggtgaacctcaacgatcgcgtccgctttaggagcgctgattccgtctattgagcgcaacatcctgctcaacaactctggtggagtaagatctgaccgagaccgtttgtttaatttgttgtacgtcgaataggtcgtcaagtaggtttcgtgtgggttagaagtagttaggttggatctaagagactcgtaggtttgtcgggtcacggccgagtctgggatgatgtttagtggtttgttctatttgtacgaaacgaaaacaaagatgtcagagataagacgtatcggccgttcacgcacaaatagatcaagacgttgcatacctcaaagaacgaccggacggtttgatcaagaacgcgtagagagtcaagtgtatcatcggggttcatagtccttttgagaatcgttttatcaagcgcttgaagggaagtcatcgtggaagtgatttgagtggaccatcgttgttcatcgtatgctgattcaaattcctccatcaagtatgatacgtgttccattcctgattgccgaagtcttgctttttgatctctaaatctgccatcaagtgtagagttgacaacgtcgtccatccgtttccgttcgactacgaaccccaagacgacttcatcgttatcttctggtgaggatgattttgcgtctgttctctttgcgacccaaagcatgtctcccaggacgagacttcgcttctcgacgttgagttccgtggcctgaaggttctcgaaagcggccatcccactttcagcgatagtttccctggtatcaacgagaagagcaatctcgtaagaaccagcaggccaggtgatcagttgaggaacacttggtggaggacgagttgagaatgatctttggatcgggtgtgagcaagctattggcagagatgtggattcggagcgcgtcggtcgaatcgagaccagtttaggaaaagagagagggaatggtcgacgagccacgacaacagaccgagctagaggacggaagtgtatgggtgtcagcctgaacaaacacgcgacttggatacgtcgttccatccaaaaacttacctgataggctcccaaggcgagacgtacgagctaggtgcatttcacagtacagaatagttgtgcgatgacggttgatcgttgatcgtcggtgtccaagatgactgtcggatgggttgtcttgaagcaagcggaggccaagtgaatgttaggctagggttacaatgcacatagactcaggtcacgtgttacggctaacgagtaaccagactcgcgccagatatcttttgtcttcttctcttatgttcgttttggattgtagggagcgtcttgatctgtgatcgtgcgtcgttactctaggacacctttgaaagtcacgtatgtttctggactaggaagaaatgggattatttgtaatctgctgatagcatttcattcgaatacagaggagtcgtctagacgcaaagagataggaaagaagaagaagaagcgaccatcgaagtttcatctttagaaatcatcttcgtccatctcgactatcgtttggaagcccaagagaaagagcggaaagttagcttcgtatcaaatgcgaaagacagaaaatagaagacagttctaaggaaagagagataagacgtactctcgtcagggttggcggccggtccttcattttcaggcaaagccgtggtagcttccgtccccgtcttcttcgtagcagccacgaaactaggtcctcctgccgctccggctccttcgagcgcggccatcggatcttctcctgctcctccatcttcgttagcaggattagaggagctggaagcggtggtgttggtcttgccaagtcgagcggctgcgacttgggcggcaaggtatgagccttcggtgttgaacgctgcttggacggctctctgttatggtccatgtttattaagtaagagaggagcaggaaagtgcaggagatgagttttctcaactcttgagattggaggacagggagaacagtagaaatcgaaccttgattcgaagcatctctcggaacgtatcctccgatccagtatcgactgaacagaccgaaaagagacagatcagtctctcatcaacaagagagaagagagaaaaggacgaagattagaaacaaggcgtactctcaaaagcgttccattcggtccagaaagccttgtggattctcggatcacagaactgactggcgtgcgcatagatcgctcgagctctgtcgatctcgcccaactttctctcgaggttcgcaaaccgaagacacatctgggcggtttgaccatctgggaggacttcgatcgctcgagcgtaaatcggccgagttgcaggaagtccaaagttggcggctgctttagcgatgtagatcgtgaacatctgtttggggattgaattatcatcctcgatccgaacgtcagatacgtcggccaagagaacggtaaacagagtaggacgagactgacctcaaacttgtcttctgatttgacagcccgagtggctcgatcgtaaattgccatcgcccgtttcgccagtccatgttcttcctcgagctgagcaaacatgaggaacagcggcttgcagaggttatcaggacatttctcgagagcttgttcaaacaaatctcgcgttctctccaactttgttccgccctgtttgcgagaaaaggggataaagattgcgttaggatttgaattataatgtaaaataagatgacaagtctttgaagaaggagcagaatgaacgtacataacgtttaacaaacttggaaaggtaaatgttccaaagttcgaaagcgatagggaaagcgaacagatcgataccccgttcgtacactttgaaagattcctcaaagtatttgttttcctcgaggaacgctgcgtaattgacgatgatctggaattgcgccatgatacattagagagttgatcgtcagcaacttcaaacgaccgaaaagagaccaggagagatgtgctttgaaactgacctgagcattagcgatcttcaactccattattcgatcgtaaacctccttggtgctctcaacagaaccgatggattcttcaagatcaacatagaaagaccaaagcttaagtgacttgaagagtctctgttggactgtgagggtctgttgttacgcaattgatagggatagattgactgtcaggatgtacgctatgaggtatcataggaggattgatagtgggaacaaaatttgactaacttcgtcgtggtaactgatcttgaggtttttaggtgcggtcgtcgctcgttgcataaccctgatagcctcatcgtagttcctatcgaacaataaagtataacaagaatacgtcagatgtttgtaagatagaatccggaacgacgcaaagaccatgaacaaagaaacctactcgtttcggacctccatctctgcccactcacaccaaacctcggccaactcatcgaccgacacgaacggaactcttaccgccctctcgaacacttctctcgcgctcttcaagtctttttcgttcttgccttctccggactcggaagagggatcagatgatcctccgttttcatagaacttggcaaaatttatgtacaatggggagagcgcggttggcgcttttcggggattgattgtcgagattgccttgttgtacgtctcgatgatctgaattgggatacgtgatcgatgtaaaaaggtcaggctcaagacgataggaggtgataagcagaagcagaaagaaaaagagagaacgttttcaatcataccttttcgtcgtcctgaccatagagagcaactcgtttctcccactcgacgacatcgtttccgttcctcctcaacaaaacttcgttgaccaagaatggtcgcttatccatcaactcctcaaactcttgcatagcagaatccagctcctgttccattccttctttgtcatcctcatcctcctcatcctcagcggcgagggattccatgagggaggagattagggtttcggagaactcggtgaaggcatcaaagatttgggtaaagtctctgatggtgagaacagagccaagacctgtctcgaaagagtactttgctctgtcaaattctcctttctgaatccagaacgtggccaatccggtccagagtcgtccggcctggtctttgaaaacctccagtccgtctttcataacgatctgttcgacatcaagcttgacatccgagctgggatctgtagcggaatcgtagatctccttcttttgttgctgttgttgagtgggttctttctttttcccattggcgactgcagaaggagcgacagtgttggcaggtctcatagggccgtcgatcctcatcaacttgccgttgaccgaggcaccaccgtcctggtcagcagttccatcagcatcagcctgagcgttcgttccagaggaggaagcagcttctgctcgagcacgttcaacctcgtcccagtccattccaacctcatccgcgttggcctcgacgcgctcgagccactcgacaaagagctgataagcagactgtccgtcgacgggtgtatatgtccccgcctgagcctgtctagccagagagagcagcaactttgaacgctcgaggggcgaaggaagaggggtggtgaggtagtgaggggtcaaagatggatcaactttaaggaaccgtcgccagactcgtcgaccagcctcacctcctctgatctcggcccatcggaggtatagtgcccagacttttccatggagggatggagcgagggaccgaagagctcggtcgaacgtccttcgagcgtaagttctagagagcggtgccggacagagagggtgaagaagcggaagcagatggtagtgccatgccatgggaagctagaggacgcgtacattgtagagagacagatagagaggaggttgtaagaaatgaaagacaggagatggaagccgacgcgtcagccgaagcaaacttttcagaatgcatcaactcgaggatagaaaaagaagaagaaagaacaaagaccatgccgactcacattaggtagccagctgaccattctttcccctgttgcgatcaacgctttccactcctcaaaaccaacaccaccatcgagaccaccctcccaatcggcagcgtctttgatctcttgcaagagctcggtcacgtccaactttcgcttgaccgacttctgctttttggtacctgcaagaacggagggtccgagaacgtaccgttgtctggtgaggatgtaagatttccatagcttgaacgaggtgggaaagatctccaacgctcgttcataaagcgaggtcaacgtttgaaggccaagtctagcttcttttgaacgaagtggaccaagcacgacacattctgcactagcaccggagttctcggccgtgtctttctcgtcgttctcggccagctctacctcggcatccttctcggcagcctccaaccgagctctggtcgagtgaatgtgggtccaccaggcagcaaagttgtcagggttcaatgataggtcttcctctgcctgtagggaggacggggagaggatctctgggtgtgtcaaaggatttgggatgggcgatgtcagcgggaacaactcagtgagagaggataacgatgccatgataggcaaagtgagagataagagagagaaacccagaagggatggaggaagaaacgaagaagatagttggaggttgaaagactgaaatcgaccggagatggaggtttgaggaaaaaaaaaggaataggaaatattccagacaagactacaaaagtttgtaatgcaaaaagacaaaggttcactacaacatccagcccaagctccgtcttgatctcttggtctgtatcctccatcatgtctggatcatcagttctcagaccgtggtgccaccctctaggaggagtcggtagagcgttatgtgtcaagccacgtttgttccggtcttatgtggtcaagtctcataatggtaagaccaaaaaatccaagtcaacatcatcaaaatcagaaccatcgccgtcacccctaccgagaatccaaccaccaagcatcactagcttactctctccagcgtataccgtggtatccccagacgagaccaatccaaatccagttgggtcgtttctcaatccgatcaaagttcggaccaacttcgcgctcgccaaggaacgcaagatcaaagcaggcgccgctgctctcgctgccgctttggtcgagggtgcgggatctctggatcagatagaggaagatgagtctggtcgtctgagaaaactggatgggacccttgtcgtctataccgatggaagtgccaaagggtctggtctcagactagctgatgctgggtggggcgtcgtctggagtcacacaaatcaacagttgtgagtgtgttgtttcgtctctttattgtgtcgcggtatgagatcatctttgggtcctaacatcaatcatagaaatcggtgtgggtacatgccaggtttatatcagacaagcaaccgagcagaactcaatgtttgtcttttgtttctcgcgtgttctccatttgccgattcacactgatatccttgcgcttttctgtcccaggccatcttggaagctatccgatcaattccggaccatcattccccagtcgagattcgtacagactcatcgtaggtccgaatgactctttagaattctgtcctgttcctcttcgcctctttgtctatgcgcgctcatgatattgtttctcgtttctgtgctctttttcttacagatattgtgtcaacagtacggtcatcaatttcgttctatcaatcccacacctcgcggaatatcggttcgatgctaactcttcatgctcgacgtctttcctaacagtctttacaaaatttcttgccacgtggcgaaagcgatcttttgcagggagctacgctaacttggatctgattttcgagatcgaagatctgcttgctaaacgaagggcaaaggacccgcgaaaagcaccccaaagcaaggctgagaaagcagcagggggatcactgaaaggaaacgaaataagattcgtccatcttagaggacataaaggtgaattaggaaacacaatggccgatgtatgtccttctcctgtcatcctcatcttgtctatgccttttgttgcgccagcaaccatacgcccaccgtctctcagcgtactccccttgccactgttctgatcccatctacaaacctcattgtccgataacgttctgaatagaaactcgcagacgaaggatcatcgatccctttcccgctacctccgatggaatactttggccagagggagttctcgaaactacgtccagagtggagaggattgaatcacaagtaccggattcctggaccggcaagtataagattagagggagaaagggacaactagagctggatcgagtttgtcgtatactcgacatcttccaaaccacatcccacccaaatacataatctgggatcactccaaagcatatacgcacgatagatcaagttgcgcgcgctcttctttccctctctcagcctccaaaacatggtatccactgtactcttggtgcgacagaaagagatcgtagaagaagttgattacacatggacattcttcatagacatcacgtgacctaaccccgcaaagaatctttttatattcccaaccttccatcctatcaatcaactcccatacattcctgcctccgttcttttcagagtacattcgtggagatcaggagtgaaggtaaaggtagagcaagacgaggatgtccctcatatctagattcaatatcagatcgaacgctgctcttagtttgagccgtagatcaaccagtcgagtttcactgctttcacttccttctaccttgaagtcaaccgaccaatctatcgcatttggccgggtgtactcttctcatccgaagcaaccctctggacataaggatgttcctcatctttcttctccagagtcccgagtatcaacagagtcccatttcgttggaagacgtcgtcgcggaccattcgttcgatctgaaggttcgcaatcaccttcttcatcatcatcaccacaaacatcatcatcatcgccgacaacgacaacgacgacgacatcatcatcatcatcatcgtcaactccatcatcgtcattcacgccctcatctccatcagcatcagtatcaagactatcttcaaaaccatcgtctcataaattcgcaataaaaccaccagaaccgactaccagacctaaatcataccaaggtctggccgctgacctctataaccaatacgttaccggaaagctggctccgttaaatagagctaaacctgtgaaaagagagattctcccctcgccggacttaaaagatgaagagacaggacaggctgatgcaaggaaaaagaaagatggaggcgggtcaggaagggtcagaagttggttcgtcagggatatcaatgcgtctggtgagcgactcgtttacttctctgcaggtctattcgtgtttcaccttcgatctcgttgtatcacgtcgcttaccctcctaattgtagagatcaatggagagagctccacatccgtttccaatcaaaataaggatagagtgggaaccgaggtcaaaacaaagccccaacagagtgagcatgtgtttcttctcgttcaatatgaagagtcatcatatgacgtcctaacgtgctttcaatactcagcgtttacttcagaaaacatatctctcgctcgcggatttgaacgcactctagaaggagaccagttcgttcttatctcttgttcttctcatgtattgttgtttacttgtgatgcttacccataacactggttcatcctgaaggaatatcaaggacgggaagatgcaattttacaaagaaccagtggagaagggtggagttctccttttcgaatcggatgctagaaagatccctcaacccgagatcttagatgttaagaagattattagttatcctacaacgtcccagttggccgtatgactattctcttgattttgtatccctctcatgttgtgtcgatctattgcgctgatagctttgatctgtttttgggcgattgatggttatcatggtgggaaccaggctatggagagtgcagcagacaaggactcaagaccgacttttctgagtgattcgtcatatttttcgacattatgcgccttggtatacaactcaatctctgctagatcggacctgtcggataagggtgcttctagtttccaaaactatgtttgtccttctacttctggaggtgttttcagagcttatgtagtctaacttgctgacgcgctgtgttcaatctgttcaacggcaataaagcgtcctatgtcgttcaacttgttgcaaaaagatgatacaaacgtctatcatatagtagaagacgtcgatctatctgttcagcctttgaaacactttaaaaatattgtcagtgttatcatctttgtcctttaaccctctgtcctccacttcgtttcgccgcacgaattgattgtcgattgaagcgatttacatcaaacaggatacgatcgtgtcaaagatgatgactacgcctacggatcagatggagaatttgattggaaatgtcgattttgtggatcaggtggaacaaacaagacttgagcgagcaaaagttatcgaggtaccactcttcctccgtgatctgatctttcgtccagtaatatgtcgaactgaccctcattcatcgtgatcatctgggatggtcaaaagctcatggatatctacttgggcgcatcaagactttactcgtctcctaacttgccagggaacggagaattctctgtgaagaccaaagttacgaatcggattatgcatgactgcatgcccggcgaagtacgtatctccccgtcctgttctcgtcgtttgcgccgtgactacgagatttcctcggtatacttattttcttgtttttataaatcgtatagggcgagaggttgaagaagtttgacgagcaaatggaactattccaaatcgaaagggaaagttccaatttgagagacatggttcaagactggttcgtattcctctccctatctatcggtcccagcgtctcactgctcacaaccctttattctaggttcatgcttcgacttgaagaacgacaaggacttcttacagtcttccataacacatctcaactccaaggcttcgagtaccgatccatcgatttcttccaagacgctttgttctccttatctttgtcttcaccttcatcctcacaagacagcttggcaaccaatgaggccatggccgaatccagatttcgagagacgatcatcgctgtgacagagatccttcaaagaatctctgtggacttcaactatcactcggttggtcctgtttctcctcattctacatctgttgatttgcgggtcgaggaaagttgttctgataatcgtcgttacatgcgcgcgtgaatataggatctcaacgtgatcataaatcaaagagaacaaaacccactggcaatctacgtgttttcacacggactttccaaagagtcttctgccagtggaaaacgagctggaaagatgttgttaggctcctacatctacgaataccgaaatgcgcccggctctgaagcgtgtatgtctcttccttgttccttatacccgagttgctttcgtgagatacgttattcacgacttgagttgtttttggtttacgggtcgatcagggtctccggaaacaaccgtcattacgagagacatctttggcgctagagacgaaatcgcaatggagatgcaagatatcggcgaagctctgaatcggcctgcaaaccccttgttcctgctctccatctacgatccgacggatcttctcaacttgttcgaccgaagacgcgatctcgcccccggatggaggaacccttctcttgctgatggttctagtacctcccatcgatcatcggatggcggaggcagaggaagagagatcgatgcatacacgttcattcgtgatgggaccgatatcgcgagacaacctcccccgtcgtttcttagtggacaaacaaacacgacctcccccctgccgagtctttcattcgatctaggaattcatgctccaaaagctcaataccgaccttggaaagaagttctgacttctcctccgactgcttctgcagatgcacctgtgctggccaatggattatacacgaccgattattctgctttgttcaaaatcgcaagaagatcaggagcctggacgtctaaaatggaaccgatggaccgaaacttggtgggagaaccaaaccgtcagcgtgaccagatggtaagatggaataaaatacaatccaagatgaagtccatcatcgaaaaggagttcccagcccctgcactatcaacgtcatcggcaccatcagcggcatcagtgccgccagcaccatggacgaacaaaagcacaaagtggagggaagagagaaatccacatgcccctcgtcctgttttgacctacaagtcggttcaggaacaaaagaccgccaaccggcaccacgtccgtgactcaatcggaagatctaaacctatcgttgctactcccccatcaaaccctcccactccaaatgcaccagccccaaatttccagataccaacgtaccaaccaaaggtggactctgaaaaggctgtggcggcttggcactcagctgaacacgctagaagacgagtcgtggatttcttcgcaaaggaagaggcgatcaatcctgatgctaactacgaagtcgacttgaagaccggccacggactactcaataagcctgtccgacacgaggtgttggctaatttcatcaagattaacccgaacgcaccatcgtccactcaagattcttcctcttcatccgtgttttctccacccccctcgatcccaaactccaaatcttcgccggcggcaacggcagcgatttcagccgcggtagcggtagcgaggaagtcgtctggaaacatcctgtataactccccccggttgcaaccaaggaacttgaaggactacaagaggcctaagaaatagtctttttcttttctttgatagaaagatatgtagttgacatccgctgcctgaggacgaaatatatatatatatatgtgtgtgtgtgttgtataacatatgctttcgtcttattctatcaccctcattcgcggactttgagcggatcacacgacgtttttcacgtcttgtacacatggaaagctcataatatactgaagatactgcccaaaaagagagagagagagaagaagacacacgattgaagcacaagaaatatttaagaacaatacgagcataaagaatctatgagatgaccctgccaaatgctaagccgtcgaacgattgagatgataagtcaaacgctccctaaaagatcaagatccatcttgcaagtttctcgagtcgtgagttccaaagagaaagaaaactttcggtcgactcaccatactgcatcttacaaacatgtatgaagaacggcttttcattcctaatatgagctgccaattgttctcttcttgagaatagagaaacaccgacttctacagttgagccactcttagcgcttgcaaggtcttctcggacgtatctgacagcttcttcaccataggcaacgatgttgaagatatcaaactccgttttgtcctgttttactttttcatcaaacgatatcgtgagagacaagaaaaagaggtggatggaaaggtgatgatacagttcaaagtctcagcaataatgtcgtggatcgacgaacaggtaggggtctggcgacttacatctcttgatgttgatgctgatagaatagcgaaacaagcaagatccgtttaacacatggcaatgagttttgaattcttacaaggcgtttcaacgaaagatatgtttgtatggatccgagcgacccctcacctggcatatgtcctcttactatcattgcgaaatcaaagagacagaacacaaatcggagatcagtgtctactcgacgccatcatgcagtgaactcaccgagatcgaagcaaacgcgggcttactctccatacttggaggttttatactcgacgtcaaccaagagcttcccttggaggacggtgtcagccgctggtcgacccagatcagtagagtagcagagctatcttgaacggacgaggatgaatcaaacgaaaacaacaaaggatagaggaatcccagatgaactaacgacaccaacagtcacagctttctacataaacctaaccacttaccctagatgcggaaagacttctggtggtagtattgacagctcgactgaagagagacatgaaggacgatagccgatggtcgacggttgaagtcaaggacgtgtgtttcaggcagatgtattatcgacagaagacacatgtattttcaaagcatcattttgacttgttatgcatctcacatctcgttgctcttgttgtatcaattacatgctcattcatcttgcacactgtgcagtatacatcgtcaagtaaggcttagatgatctatcatgatttatatctcgtcctcgagatgcgcggatatgatcctgaatgacgactatcaggttgtaaacccgtgaagttgtcccagcccgttcaatgttagcgcgccggttccaaaggggtgtctttccaacagaaaatggagccgactgcaaagcgacaagagaaggaaactagcaagtaaacagaaagaacataccgatttcatcttcaacgctctgcccagatcatacggatctttgacggtaacctgataagattgctgtccttctggatgggataatgagggaggtgttggtggaagtgtccaaattgcgctgaccaggatatcgttgatagagaactgccttttgatcgttgtatgtccaggatctctctgacaaacaatcttgacagacatatatgtgtgtcaaatgcagaatcaggatatgaatgagcccagggttcgagtaaaaagaccatgtgaacgagcggaagatcaacagactttgacataaggtgttttggtgggcacaaaatcaccgttttggcttgggtcgaactcatgctcaggctgcagctgtttgacctgaggtgtatttatcttggtgttctgctctggttctggtgatccgaccaatgcatgatgaccagatgtgctgttatctgaagaaggccttcgaagtgtcgttggttcgtgacgtatcgagtttcgttgtggacggtttgatgatcgtttttgtgaaacattctctttgatggatgctcggcaatggttattggtagacggagagtcatcgggaagagaccggggcgatctgatagactacagtgttgcacaactcatcagaaagtacacatttctgatgcacgcatgactcggctcctgactcacttgatgatggtcgttatcacgatgacgatcggatcgacctggtattgttcgactgccctcagaagatgctagagtggcatttcgctctctcctcttgttttcgtctggcttattttccggtttgttctgatgggtttgaggctgagaagatttcgttcggacgtggacctgtggcatgggtcgaatggcctacacccaacagggttttcaaagagttgaacatcagccaatgaagaaaatcgaatgcatggagcaacgtaacctacttgcttcgacatgtcgtccaggagattttccaaagtcattgacgcttcttttcgcttttctgaatcagccagaggtgatgtatctttttcgttccctttgcgccttttgggtttcttctttcccgtttgctagataaagtggaggaaagaatcgttaattttggcaacagaagaggaactatacgacccgactaacctggtggtcattccttattatcatgccctcattttgcttattagaagcaagttccctgggtgtttgtgtttctcgaagaatggcaggtcttgttccagaacttttgtcacgaaccattccttcctgtcgttgatgtcgctgattgttaagtctgacaatcatgaatcgaaacgcaatccatcaggctcttgtacaggacagagatcacatcattcagactgactgtttgttttggttggtctcgttgcgcaaatcatgtgttcgaggctttctctagaggccgtgtaacaagtttgagctggatcgttcaataatcatgatagacagtctgtatggagactagtagatgatccatacatacagagttatcccctgagttcaccttaacagacacggatgttgggagcgatttaacttcaccagatcgccgatcacgatctcttctagacgactgtactggaagcgatgagtctgaagcagtcgaagaggaaggagggcgtttcgcgaatctggaattgctctgtaacttgctggatgccatggctattgattcggtcatcgcgaacgaccttgaagtccaaacagagtgggacgccagcagacgaaccggccgaaagagattcagcatgagatcaacagggttctctccaactggaggtagcagtgacgctgtcttagtagaaaggagagaacggatgagacggtgttgatggtggtcggaggagaccaagcgaattctttttgatgtatatcatctcaaaccatcatcagccagacttgacaatacctcatcccatgagcacggctgactctacaacttcttctcaacctgtaaaacaagcatgcttatcctctgttagccctcaaatgagctctcttgcgttggggatcgctccgactcagtcagacaactcacaaagtgttggtccaacggcgctgatgaactcttcggctacgggtagtccgttcttggcctctttatccaggttagtacatgtatcatttgtcccgttcaaacgacaaacgagctgatttcaaggacttcttatgtcagaacgatcatttttcttattgggatgatgctgaaacgaccggcaaggatattcaggccgtcaaaaggtaaggctcgaaaccccacttgttccatagcaccaaacacttctctgaccttttccttgtacacttcttggatggggaaacagtgtcgacatttgctttcataaaggctctcgctcagcgggatggccggtcgttctcgccttcaggtcttctcaagcttgctaaacgctatggaccgttgtccttagtattgcccatcattccccctctgttcttcaataccattcttaccagtaagctcggtcacactcctactcataattgcctagaacaaactcatatctttcgcttgatgtgtctcatggctagctctcctgttcaccacgcattctgttatatcttctctcttgagcgctcttcccttcttccgtcctccggagcgcacatccggttcagagcctactggatttctttctgaaaccgactccgagccagatacaactatacctgtatacctctcccttctcacccataaccttcacgcaaccgttcatcctacactgctttcgttcttggcaggtgccggcgcaggtgtcgcacaatctaccttggccatcccgctcgacaaagtcatatcatttctgacgaggctgattgtcgggaaacgcggtcatgatcatctgaaatcagggctcggaagggaagcaaagttaccgagcattccaggaacacccagggtgaaccagattggtgatagggctgtgggaggaagtattaagtcgaaaagagacatgggcgcttggttgagagaattgaggaacgtcgggaccggaccgggaggagcgttgggtatggtcagaggcttcgattggggtgggatcaaggattggaagggattaggaaggttgggttggcaaggatggagatggggagcagcgaaggatgctgttgggtatgtttctggtttcttgctcttcctttatggtccagtcttgctctatgttactttgagaatcttggatgaaaaagactgatcaccttgtgaccccatcatctcataccttatgatctttgacacaggtacggacttttctttgctacgttcgacacctctcgtcgactggccctgcatgtccgacatctgattgaggccactcagtcagatgcctcacgctctgtcgacgttgtcgaaaacacatctcccaaagtgaaagcgttctttgggatagaagatcggacgagacgtaaatcgactgataaaaatcattcaagagtagacgatgaagatcctgaggaagaaggtgggctcggttacgagggaagcaagtgggcgagggtcggtcaggcaaccgttttaattctcgtacgttcaagtgtctttcagtctttgataaagttataagttgataggtgtagtctgatctgatgacaaaatcttctgatgctcgccttgattcgcgctccgttcaaaagggtgggatctgcgctggaacactgtgcgtcgtttttatacctcatcgcgtgtgctctccttggccccgaaatttaatctgtttattcacctactcttttcagatttacattgtcaactcgtccattcgacgcgatccttcacctgctctctgctccctcctcctcttcttcttcctcctcctcttcgacgccttctccaactcaattcaagtttcctatcgtatcaacctccaatacctcgcttgctccacctcctatccaacctctccgcacacaccggactcagcgagtgatcaaaccaacctgggaagcatccttacctcgcgctattccgttaataacaaagacttggaaaaagaagggccctaaatacttttttggtccccaaaagggagagaatttaggtggaggtggaccttggaagaggtttggatggagacttgttggtgtagccccttggtccgtactgtttatattgacatcatgtactcttgcttcaaaaagaaagttgatatagaggagagaatgattgatctctcttcttttttgtgcgttcgtcactgaaatcttctggacttgtaggggctgtggtttcctcgtcttcgcatggtatgtattgttcgtgttctttcagcgtttgcttctttttgaaagcgatagtaatcattcttcatgttctaacattctacagggttgggggggaagtatgatatgataaatcacgtaaaacttgaaaaccgaaatctgcgtgctagcggtgatcaccgaagtagacgagacgactttcgtttgaacatttgattcctatttttatctattcattctacatcgtctctctctctcattttgctctctcccctccctctatcctcctctcatccgaccaacccaggagccaagagctccaggtcaagacactttgctggaaacgttttagaaaatagaagatagaatcaaggttcgacaccaatgtatctttagatcccgtatcaaatggatgatcttacatctttgccggttcatcattcttgaaattggcgcaaagaccggacgggccagttcggatgaaaatccagatgtggaagacttgtgtcgaaaggcttgcattaagattgctcagtttccccaatcaaaacagttcttccttctttaccatttctcggtttgcctgaaaggggaagaaactaagaaaggcgaacatgaatatagaagatgatttatcatacataacggatgagggaagaagatccaaggttgtagtgaaggaaagaagggttgtgtatcaaaggcatgtgacaaataacacgaaaaacaagactgcaccaagaaagaagaaataccatactaaaggagagagacagagtgaaggtccatgtatgttctctcacatatctctttcaaagtttttccacgcgtgcttctcgtaagtcttttgcgtccttgctctgctttgaggaatgatgggttttcgaggttcgaccaatgctctttgttgcatcgaggtaaacctatccttgaacaagttaccctccggctgagattcaaagatgatgaccaggtcagtcagtcattcatgtctgggcacgatatgaagagacgaaaggaacgagaaacatactttgatagccctccaactctcactcaaatcctctcctagttgaacgtcttcctctatgccgacgggtaccacgtgtttaccaaccttgatgcccttcaagccagcctggagtcttgcagctctagcctctgctttctgaagcatcatttggcttcggagcgagtgggtcttctcgacctgcttgcgaagagtcggaagggtgttgatggtttggagaagttgtttttgtttcaattgagccagacgggcggcttcctgtggggcgcgaatgttacaaatggacacgagataagatggacatcatgttcagtcagctgaagaaagatgaggctatatgattgagagaacctgatgaagcgaataaagaagacgaacctcagcagcgagtttatcagcctttttcctctccgcctttgtcttccttgcaggtgctttcttcttcggcgcctcgagcttttcttcatcctcctcctcctcttcctcctcgtcctttggcagatcgaccctcattccgtcaacccagtcttccgtccagcccatcatctctccctccgtctttctcgcggcgtgcatcctgtccttgacaatcctatccttctcctccttcctaactctggcaagctccttctcctcagctctcgtgagcaaagcctgatgagcttcgaccgtagggttataactctgaccggtgggaggcagtgggatagcaggcacagagatcttttcgacggattgtaatgatcgtgggaccttgatgtccttggggacgaacgtccttgcctcgtcccattcggcgttctcgtcgacttctccattggtagctttggactctgccaaccaatcgtattcctctccaggatgaaggccaccgaacagagcagaaccctcgccccaccgagaaggatctctctcgacgagtgctccgaaaggaccccggatgtcttttctagcgattcgaaggagccgctctttttgctctctggtcatcttcttcttggcaggaggagcagaggaagaaggccgggagtagacagccgggtgagaggatcgttggaggagtaccttttggtagtgaaggagtttctttggaggagaaacggtgggagcttgggctgagcgttgatagagtagatacagaccatataagggtaagcccctcttactccgtttccgtttgtcccacacgatagtagttgaatggtgacaacagacggtcttcgaagaaagacatgacacacaaagatagaagcttgacacgtaccaccagattgaccaacggtatcaacaacgaacaactcttcgtccttcttgtccgaaacatgccctccgatagtctgctccttagctctcctaacatccaatccatcaagaatatcgccaatctcactggccttcctccaggacgatttcttgtttttcgaaacctttcctgtcaaacggggagcacctattgagttggacatcacggacaaaagagaacgtgagaaggaaacaaaagaaagagagaacggcaagtttgtcgaaacgaaagagaaagtccaaaaaagtggcccagttgtaattttgatattttccgtttgcaccgcttgtggatgctaccggcgggctatctccgatcacgtgacattcgatatggcctttcaatgtgtacatctatctcaacatcattttgaaacagcagaggcagagaaagacaacacaagttcatacaataactaaagttcacaaaggtggtaaggacagaaatggaacaacaaagaagacaaaacaaatggatgtacagaacattgaaatcaagagaagaggagccaaatgagacacccgatcaacccctttgagcaaccttgggctcccaagcattcaacttggcaccggtggtagagtaaggtttgtaagctcctcgagtacctgtcatgttctctcggtggggctgttgcagatcaggagtggtaaaagagataagttattgagtatgagtaaaagttgatggatctttcctggcagacgataatttctccgacaaggtcagaaagccacagaagacaagggaaaagacgcacgagcagccatgtgggagtagactccttcatgatagggtcgatcgtaggaggatcctttcggatgtggttgatccaagagtgcctataagatcgaatgaggtgatggttatgaaccgttattaaagagccatcaaccctaaacaaatagaaatctatggaagcaatgaacttaccactcaggagggatctgggacacgtggtagttgtgctatacatgtatattacaaaaggaatgagatatcactatctaccactctgccgaatcttgttgttacctgaggacctgatggaaacatacctgagcgtagtcgacccaacgatgacgaccaggaatttcctcttcgggattgtagttttggaagtactgtagtgacagtaaagagttgtcggtttaggtcgttagccaagctgataagtcaggccaacaagtcgaccggatggaccgaggacaaaccttgtttccaaatctgtttcggtgagaaccaagacagaccgttagatggcttgatcaagtgctcgagctaggacgacggcaaggttgaaggacgaaaacgtaccgatctttaccaacactaccaggtttcaagatcatgaccaaaagcaacgaaagagaagggatcacgccgaacaagttagatcagaattcagaggaatgaacacagctcaattgacgtatttttgacacatcggactgtgtcgttctgttgaacgagaataatggccaaagaaaatgacatacaaatctccagatttggcatcacagagatagctagttcgatgagagggtcaagcaatcagtcaaagggctggcactctaccaaaggcataaaatgttgacctgtgtatgattgctcgtctgaacaaaggtcaactcaacggccacttacagcatttgtcggaaccaatacttgactccggtcctgcggatctggttgtgagattgagaacatgaaacaaaagatagaaagacttagacaagctggtgtagcgattgatttgatgaagagtttgtggaacgcatctctatccgagtggatggacgggcgaacaagctacgagattgaactatcaagttccatgatgtacgcacgtttctaatagttctggctagagataccatggccagatatgtatttgctctgtgtgtgtgatctgtgtggatgtgtaaagatatgtgtatgtgtggatgatgatgtcgatgtctgaggatggccaagagagaagagaaagagaacgaacggattggctcccggatgggatgtctggttacaatcgaacctgtttgcgaaccgcgggttccagtcggttggtgagggctcgaccgggttgatgggggttcagaccggttcaccgtgtaaccgtcgccgggttacactcattccgtaccttgtgccttgacttgctccgttacttcccttctctccatccaatcctcacccaatcgacatccatacagagatctcctcaaggaaggatgagaatcaagaccaacccctacgatgtggagaagtccatgatgcgaatggtcagtctggttctttgtttcgtttctgtttctgtttccctgccatgtgttgtcttggtctctttctttctttttttttctctctttttttctttttcttttcttcttttttgtagctcctgtttgcatacatcagatcagatcagcaaagacttcttgcttctgcttgttgcctctcaggctgaagggagataagtaggaaacgctttcttcctccagccatgctgtagatcgtctttctttctttctttcgtcgagagaccgtccgactacatatgagtctactagaatgaaatcattacgctagcatactaaagccaatttgtttcttgatcgtctcggcacacagggctggaacccaacgaacgtctacaacacatggaaacgaaacgccggtccgctcgctgggcagtacaacttccgaaagtcaaaggattcactctatcagcttcgattccgaagtaaacagcatctgagagcctattggggtggttccaagatagaagatagacaagtcagttcccttctatcttctttgcacttcaaagctatacatgcttggcgcttatgtacaacggctttgtccttctttctactctccaccgcaaacagtttcggaaatggtaccttccttccgcactcccactcatcgttccctccgccttgacgtccccaacgttgaacccgaaagcaacctcgatcacccgattctctcaccctggtaaagaaggtggaagacaccttctcgagcaagaggagatgttccgttaccatggatcccaggccccagtcagcccgctcatgttcagagaagtcgagcgtcggctggatcatgtcatcttcagaggtggttttgccaggtcggccgaagaggctagaggtcttatcggttcaggtgccgtcaggttgaacggaaacgtcgagagacagtgccagatcaggcttcttcccggagactttttggagattgatccgagcagtgtcaagatgttgtccatcccggacggatcgtctattctggccgcagttgacaaggacgtcgtaccactgagaaagaggcaggagcttcttaccaagaggccgagcgccacgccagtcgatgaagacggagaagagagtgagcaggctctgggagaaaaggtcaacaacggagaaggatggaaggctgtatatcgagcgaggttgacaagcttgctcggaatgggagctgctgaggtagatgccttgttcgagaaaggcgaaaagaagaccagagatctttggttgcgacgatggaacgcaatcaagaagaaggaagctgacgctcaggatgcagtcatgcagtcgaaactcgcctccttgagtcttggatctccttctgccaccactgattccacaccttctccttccgccgatgtcacttctgccgggtcttcctcggaagcctcttctgaatcttcttctcctaccggctggcaacgaccggcgatgaagcccctcacccccacccaccacgtcccacagccgtccgaccctccgggcacccttcatttcaaccttcctccctttgccggcccatcgctatttgtcccggcatacctccaaccgaactatgcctactgtacattgacctacctccgacatccgaccgcgagacacaaatacgaagagattccctctccgttcgacgcgaaaggagacgtgatgaagagcgcttgggagtggtatgtgcaacgaaggatcagaatcaagacgtttggtggtggactcttcccaggaggaatcgacgcgagggcgagactcaagtcaagaaacagaggaccggagatcaagaggagtggtgtggtcgaggacttttactaaatgggtttatgatcatgaaatcaaatctcctgcttccgtttctcttcgtccgaggtacatcgaccacgaacaatgtgaatgatctgcactgctgagcgatccatatgaaagagacaagaaaacatcccacactgaatgcgctgaagagaggcgggaaaagaacgatgacgtgaaatattcggaaattccacgtttaacttcactgccatctcttttcccttcttcacccgaccatcaccctctctttcttctagcctcgtgccttcagaccacttgtttctcgtacaaacatctctcataatacatcagatacatcatggatgagcgtatgttctgttttcacccagtagcgtgatgtcagctcagtctaaaatcgcttaacgcttccttctttctcggttcctctttcaagaaatcgcacagttcatcagtgtaacttcggccacgccagaggttgcccgaacttacttgacacagtcgaatgggaacatcgaggcgagtttcttttgctccatctcttacctatctcttatcgtataacgtcgaagaaacgttttctaatcagtcggtgggaattcgcactgttttcaataggaagcaatcaacacctatctcgccgctactaccggtgaggacgatgagatcgatgacgaggatgatcaatacggagacgaggcaacatctggttccgctagatcatcggcaatccgagaagaaactgggagcggaaacactctgggaggaaacacgttggggggagggactgctcaaagtagcttaccagacgactgggcgcaaaaccgaagtcagggaggaacgggtgcaagggttgggagagtcggtcagtggggttctacaggcaggttcgtttgtagttccatcttcttttccgaccaggtatagagctttcggtgtgtgatcaagcgaatgcaggacttacgccatgggtctactcccgaatcggaaatcagtggatcaggaagctcgacacctcgatcaggaggaggacctaaagttgcgacctttggatcgctagcttcttcgtcgagcgcatctatgcctagtggaggcgacgatgtgagtcatagattgaactacctttcctctggcctttcgtgatcatataacgttctcatcgctcttcggatgctgatcgttgattccgattaattggccttatggcgtttagtcggacaaggaaggagaggattggtacgctggtggagagcgcaggtatgtatcaattgtttgtttgtttgtttttccttgtaatcctgaatgtggttcaaaagatctgatcgagtcttaaaaattgtcattgagttggtagtgggatcaacgtccaaaaccccgaccgagctcccgagggccgaaatggaccagggatcgtttctgatattttgaagaaagcccgacagttcgttctgttctccatcgacctcttagattctcaggttcccattcttccttttactatcatagaacttaactttcacgaacgttgtgcttacaaaattacagagccggtcccccgccttcccaagatgatccttcctcatccacgggcgctgctccctcttggggatcaggaaacacgctaggatcagatgtgacagagtcggttgctgtccctgatccgaacagacccacagtaggatcggctcaggatgatgaagacgaagaggatgatgatgaggtggccattcgacatctgactttctggagaaacggatttagtctggaagatgggtcggtaagggcttatgatgcgcctggaagtagagaaattctggaggccatcaacaatgggtcagtatcttgttcaactccattgttgggtttatccaaacagatgaagaaaagctgattgattggcatgattgaaaacattacagaacggctccgctatcgattctgaacatccgacctggtcagcaggtcgaagttcgagttcagaaacgactgaacgaagagtggcagcctgctccacctaagcctcgacagcctttcgacggaaccggttcgttcggacttcatcgtcatcttactatccatcatagcttccctctcatatcattattgcctacttatctctaattcattttgtctgtgtaataggaaaccgactgggagcccccgttccttcagttgcttcatcttcttcaactggttcatccatgccaggatctttccagtccactacagctagcaccagatctggtactggtactagcgctagcgccagtgccgaaactagcaccggattcgaagtggatcaggataagccggtgacaagcttgcaaatccgtctaggtgatggaacgaggttcgtctttgatcatttacattctaacttgttgacaaggagctgatatgatcaattgggcacgatatgatgaacccgggctactgggatttgacaggatgcctgcaaaggtcaatttgactcatactgttggtgacctccgacgatacattgactcgtgcgtctttatatatgtttctctccttctctctgtctttctgttctgcaccatactcatacaccatcgtcacttgtcgatgttgctatacaaatacgaactggttgaatcaaaaatctgtacgtaacagatcaagaccagctcaaagacaatacgtactgcagaccacgttcccgaacaaggatctcacggacgacacccagacgattgagcaggctggcctgaagaatgcagtcatcgttcagaggtgggtctgagcgcatttatggtcaagcaagtgggaaggaggaacagtgttgcggtgagatataatgaagatcctcttctttgtttcaaatctccatctatttctttgcttagtgatgcagcgagaggtatttgagatgtgtacaggcataaatcaaaacctttctgtatcagacttgtctctcggtcgtgtctttgactaaaggtttgaacactgaagatgaaacatacacaagtgagacaatttggatcgataatgaacgggcaaacacacatcgtacattcatcttttttctacaacatcaacatgcccacgttcttctctcttccagtcttcttgaacatcgcataacaaacccactctccaccaggcttgggtctgatcaagcttcgaaaggagcacttcaagcttcgttgatcgtgacgaacaatttttcgcctttccactcgactgaaaccctgtttcaaacagagaacccaaaacaaaattaaaaaaatcaagatgagtagtgcgcttgacgccaggaatcccgactagaaacaaggcggggaagaggatgatgagaactcttcggaacgaactgagtaaggtcagcaacgaagtacgtcgggttaacctgttgacacaaacacatacattatgttgacaaaaaaaattaagtagagtgttgttcaatacaaaaatacatgaaaacacaaactgaagataaaaacattgagaagctcaaagggggaaaaatggaaaagagtccttacggctttaatggcaggaacatcatgacctgttccgacagccagtacttctgagccagctgcgagtcctgcgcgtgccccagaaggagcatcttctaccaccaagcctgaagagccccaggataggtacggttgagaaacacatatcagttcaatctgaacgttgggacgaacgatgacaaatgaaaagatgcgaagacgtacatttcgtgatatcaaggcctagtctatgtcaaatgaagcatcaggcgtgattgaaaagcaaagatatctcttaatgagaacagacttggtgaaatagagagatggaaagacaatttagaaacaaacctcttggctccctcaaggtaaggatccgggttgggctataaacagaagaacatgatagatccgtcaatatctcatgtttcaagaacagaacgtcatgaaatttgtagttcgtagtagtggctaaagttggttgaaagggaaggaacagagaaggacagacctttcctttaggtacatcatctgccgtcacgatcacttttggaagctcgcccaattggtccgagagcattcccaaggcagcttcagcatctgtgattcgtgtttttgttagcaaggatggaacaacccccaagagaaaaggacagtagcacaggcacaaaaggcgttaggatacgctcaaacccagtcacagtatttcaaggaagtaaacacgttggcgcgcaggtcaaagacctcgtgttgagcaacatattgtaatatgactagtaactcacaggcagaagtagcagaggtgacgatagcgtaccctgtcgatcgacctgctcggagcttcatagatcatatacagaatgaccaaacaaaaccattcgaaagaattaattatgttcagaaaacaaggctggatatacaagaaaaacaaaaggtgagaccaacttgagagagtacagcgggaactccaggaagaacatttaagccctccttcccctatatgaaatgaattggtccagcgaaaccgtgagatatctcttacaaagcatgaacccgtaagaaacgatcggaagagttgggcttacctcggcctgaagtttagtggccattggaataatacccttttcgaagttaacgacctccgctgccctgtgaatagttttgaaaagggagaggatatcgattcggacaaacatgaaccggtccgattgtgccgaagatcgaagaattcacagtgaaaccccaaaagagggaagaaagtcatagagaagagattagccagaagaatgtatacacgaaacggaatagattgcaaggaagaaggagcacctctcttcgtccgtaagatggggaaggtattttcggaaggtcatatgggtttgaacaccatgtgagtctagacagaggagagcatgccatcagctcacaaaagatcaatgaatattcacatcaaacttgatctctgatatatctgactgaacaggatggtatttaccactaagcatctgttttagattcagatcgtactttttcgcaaagtcttcccaaactccgttgacagcaggggtcgaattgatgagcgtgccatcctgaatgagtcatgccgaatatcaaacaacgaaatatgatgatatgatgatctggtcaataagagtggcatagaaagagaaggtggcagcagtaaaaggacctatttaccatgtcaaagaggatagcatctatttctaaagtgtgggaaggcatgtttgttaagacgctcggagggagtgtatcaggtgttggtggttaacaagcaaagagatgcgatttttatatctagaccaactcattcgacatgatcagaaaacaacctctatcattctttctttctttctttctctcttatcgcaatattcgtgttgtaagtcggccaagctcgttgaattaattaggcatataattgaacaagtaccctataagatgggtgatcaggaagagcgagaacagaaacgaggaaaataaccaaaatcaagagttcgcgaccagatgggagaaagaaaaaagaaagaaaaactatgataaataatgaggatgaggacggagcgaacacatcaaatggcagcaaccctcaaagatagaagagacgaaataaaagcacaagacagagaggaagtaaataggaagcccggaactcccgaaaatgttgagacagtatatgaaacagtgaaccaaatcaaaagaatctggccaagggtactattaagaggtgagatgtagagcgcaaaacgaaagaattaactgatcaaccatcctgccggtgtcgagccgccgtcctggccggatattggtccctcccaatcaaatccatcaagcccaccactgaaatacgcatcctcgcccatcaaaaagatctcccccgacggcgtctcgttaggcaaaaggggagacaccgagtttttcaaccctgtcgcaaccccagctccgggacctgtcggtacaccaccgcccccaccaccgttacccccttcagccgaacttggaccggcgtcagtttccgcttgatcaagacgtgtcgagcctgactcggcctccttttgcgcgagtgagttctttggaggcgagatcgcctctttgagcgatatcggagactcctcgataccctctgtaggctgaatgagatccggcgtggctgcactttccggcggtcgaggctccggctctttcgtacttgatcccgatccggactcgttcttcgctgcgcccttctgtccgtcaatcttggactggtcggttgtctccgttgactctgagttagccgctggctcgtcgtcctctgcgaattgagaatcatcatccctaatgaagaatgagatatcgaaatcgtctggaggaggagttggcacagttgtcggcgaagatggacgtaacaaattagggaaaggcatgaaagaaggaggtcggatttgttgcagttgtttttgaccttgtacagtctgctgagcttgaatgctcgagagaaccattgaaggtgaggtgaattgcggggcggtcaacccttgcatcgcctgggagagataagccggtacggcgtcaacatccagatgcgactggctgacagactgcaagttcgaaaactggttttggaagaatgccaaaggatccatgttggcgtcttgatcttcttgtttccgtcttttgagctccgtattagcatccgtctgcagaccaagcatcgagcctgtttcctctccttcgatcaccggcttaacctggtttgccaaagtcgagtttgacgcagcagacgatttccgtttccttggcttggtctccttcggcgacttcccaaattgaggcgacgtctgagtcgcaggcgtcttgggtgtcttagcgtcggccggagttgaagcaggggacgaagctccgggaccggtggatccgttccgttgtcgcttcgtgagaggcgctcgaagatcctccgcgcgaagacggacaggaggagtaaacgacgtgtggtcaaaggagctcgcagctccagcagggttgggcatagagaggttcgggccgttatgtaacaactgttgttgttgttgttgttgttgttgttgttgctgctgctgttgttgctgttggagttggagctgctgctgttgctgttgagcctgttgttgggacacaacctgactggcctggttgttcgaagacgaaccacttcgagacatgatgttacccacgaacgcgatgaacttgttgatgtttagcttaatctgatcaagttccctaggcttgatgatgatgatcgctcgggtcgcgagacatcggctagcgtatttgaccatagcaacctgttgtcatcgtacgcgtcaaggtctccgtcagccgatttgttctgcttacaatcgataggacttcctccaggatgctgcgacaaccaaagcagaagaagaaagacttgccatatagattatcttcttggatgatgccgcagtctcttccgaagggaacaatgctcgatagagaagcaagcccttttcagtttccatcaagatcggtggcaagacctctcgtagtaatctcacagcgtctgttcgctcctgatcggaaagaccatcgatgttgttgctgttgcttgaaactatcattcattacgaatttttgaggaaaatagcgccaatctcagtttggaaacgggtataacagattagatagatgaagaacgtacgaaatttatccatcgcttgagcctccgcgatggcgatgaacttctttgcctcctccaactgttgacccgtcgggatggatcttcctccaggtaataacccattcgatgcggtccctgggccagtgcctccattattcagaccctcaggcttcaactgctgttgctgctgaacttggtgctgctgctgctgctgttgctgttgctgttgctgggcctgttgctgttgttgaagttgttgttgctgttgaagaccggccaacgcttgctgttgttgttgaagtgcccatgcctgggtattgttcaattgctgctggctctgctgattctgctgctgaagttgtctcagcccaggtgccatcccggcagtaacgccagccccaacgccaagacctagaccaacaccaccagcaccaacctgattgatccctccgtttttagcggcctctaccatacgaagtagctctggggcgagattgagtgctcggatctgagcgggagtcatagctgcaacttgttgaacaaccgtaggattccattcagatgcaggagggatgttcgttgagtttgcgttggactgagcaaacaggtttgtccccaggttgttggctccaccaagttgctgttgttgttgttgttgttgttgttgttgttgttgttgttgttgttgttgttgttgttgttgttgttgttgttgctgctgctgttgcttctgttgctgttgctgctgtacgtgaagctgctgaagttgttgaagctgttggagttggggagattgtcgaagttgtctcctttgatcctcgactgcgtgcttccaggcgtcttcgagtcgggcaaggaaggtagtaaagattccagccagctgattggctacatcgggagtacaacgcgatggcacgtccatcgatgagggtgaggcgaaaccgatttgacctccaataataggccaatggttctgattccggacctacagcacacgatcgtagagatgcctgttagcaagagaaggctttcgagatcaacaaaaagaggggaacagttgatagcagcatacctgatcacttcctcccatcgcgatgacagcttggtagagcagaaacaaatcgacgtcttttccttcgatctgaggcaacttctcgacgttcaacccctgagttttgaacagctctgccagcttcttgaagaattgtgttctcctcgcctgatttgcttccgagttctgagttgccaggtattgctgcagctgaggtggttggatgagtcccaaactgggagatgcattgattgcttggttcccaatctggttcgatccggaagctacgttcgggttgataacacctcctccgaccagcggggatgcgagcctaggcgatttgttgaaccctgcctgctggtttattgccggtgagttcaattgaggcaccctaggtgatccgttcaccccaagcgaatcagagttgatccctggcggatttggatgaccagcagccccgacaggcttgccacccaggttgatccccctgttcttgcattccgcaaagagcaaccgaacctgttttcgccattcagtctgagcagctcgagccttatccaacgattcaggtggaatcgtgttctaaagaggggtcgcaaacaagattttggattagactcttggtctcgtgatatttgatagaaggtagtaatttcgagatatacgtacaccctgcaatgatatttccaagttcttcagcttcattgccagatccgatgtcatcgcaagaatttttgcatctggcacggcggcgagactaggaattccagctgtaggcggctgttgttgttgttgctgctgctgctgttgttgttgttgttgttgctgctgttgttgcgcgtgcaaggatgcggctgttccgatggaaggagatccgttttggcgattcaaaggcatgttgaggttggtgggaatattgttttgaggatctacaaagagttgatttgtcaatccggcgtccaacgactcacttataaataacagatagaaacgtatacactgaaggagatcaaacatactgagtttcactattcctctttgttgagccatgagcatcatttgtctcaactgagtgtcatgaaagagaaaagataggcgagatgacttcagttggtgggatgatcatattttgtggatgacaccgtagagaattggagaacatacctgagcgagctgttcctgtgtgagcgatccgttctggtacgacatttgcaacgcctttcctctttcccccatacttgccaagagtgctgacagctgggccgtcaatggttgaccttgaccctgagattgaggaagagggatgttcccttggttctgaggttggacagtgttaggttgttgggcaggttttgattggagtggaggttgttggagattgaactgttttcgagcataagcccgtgacacgatagaacggctcaatcatcagtataagtgtatcaacatgccctgacatcacagaagagaaacctcctacctgggtttgatcgaaacctgtctgttgttgttgctgttgttgttgctgctgctgctgatgttgttgctgctgcacctgtaactgctgggcctgttgttgggcttgctgagccatgaagaactgtacagggaagtgagaggaaggaaaaagcgcatcaatcctccgagctgagaagacttcgggcgagaaaacgatgatcgaaatctgaaggagaagaaggcaagcaacaggaatgggaagaacaaacgaacctgtaaaagagttgcattgttggttcctacaccaggcatgccaccttgtccagcttggtttccactttgctgttgttgctgctgctgttgttgttgttgttgctgctgttgtccgctctgggctctttgcatttgagcctgttgttgttgcagaaacaaagcttgttgctgctgagtcgtgttcatcctgggcgaaggattgacgtttgtgcctcccactgggccaagaggtgtagaaagattgccgggtgccggaggattttgagcagagaaaggtctctgtcgataggatcgcagactggatggaaccaagagaaccccgatgaagaagaagtgacaagatgacagacagagaattagatagaaaagacattagctttaccccttgactcttcatgctaacgagatactaagagagtgcaaaagggtattgttccgagatgagtacgtacagctagagagcgagcgagcgattgtcgagaatcatattcagcgttcacgcatatatagcatcatccgattagaagaaagaaaagaagacagagagtccagtcagtgaattgactcgatcaggaccaccatccgtgtgaacagtgaaggaaggcgtgaacctctcaagaacatgacaagcaaggcgatcaagagatgaaagtgatgaagcaacagagacaaggaagatagaacagagtgcaagcgaaggaaaagttgtaaagattttgctaggtcttgaaacatgctcgctcgtctgtctgtctgatatatattccacgctgatggaactctcgcccaccacaagaataaccccaccagtcgctataaagatccggatgaatccagtagacagagtgtttcaccacgaagagaagatagaccggcaggtcctcttctttgcctcgctttctaactgcatatcccgacccatattctgttcctcaacgaagactgccttgtgtacgtgcgtccagagaaagccccctccctggacctttacgcatgtccatcactagattgaaagagcgagaaacttgccgacgtccatccagtgagaacaaaaaaacaacgaacctgttctgtatcttggaccgcgttggttccttgtggttgctgttgaggttgttgaaacgtccagttctccatcccgcagttgggaggtcaggctgcttccggaaggagaagaggaaagaggacttttttttcttctttatatatgcgttttcttttctattctggttttttcgatgatcctcgattgattcgaactaagaggtgaactgtttcgtctgggctgtgatatcctcggaggagagaagactgccacaaagatagagaagatgggccgtcgatggatgggagaaggagaacggtttggacgcaacaggacgagaggtggacgaagtgccggtgaaaggaaaaaaggagcgaccaatttgcacgcgtctcagaaagtcagaataggaaatcttgtggaaatgaatagagaaattctatccagttttgtaatcaatcgcgtctctcgcttctcgtttctgtacccatttaattataccaggtgtaggtcatcgcatacacacactttggatgcacgaggaccacgagaataagaggaaaggcaacatatatggttcaaattatagtgtgttcgatcattcaagcattttcaaccagcacagaagtagaggtgaagacaagaattctttctgtcttctttttttttcccttgatttttctaatgatctcagcaggacacaactttggtctcaccaactctcgttcccaccaacgacggcctcgccaacaggacttacacctgcttcctgctgaagctgttggaattgtagctgctgtagatgctgtagcgtggccaccacgcttgagtgatcttccaggtcgtccggtccgaacgagaaatgatgaggcccgtcgtcgagcgagagcgtgaattggaccggatgcgcgttcgatgcatccggatcacgatccaaatcagtacctctaccgagatcacgctcggggtcgacggagaagagtggtgagagagatcgaacggagggcttcgaatggtcaaatgataccctgttgggtgatggtagtgatgatgtcgagtgatggtcaggaggggaatccgagggggttctcgcttccctcgtcagaggcagaggaggtggcgacggcggaattgacggtggatcgatcgaacttgggttcggaacgtggtcaaacgaattggtcgtcgtgatctgaaggtcggtctgtgtacagatgtatataaatatatacacacgtatgtacgtgtgttttgatggaggcgttagccgtcaaggacaagtaagaaacatcttgagtttttgcaccttcttcagctcccaagacgaaagaaatgtttgaacaaaccggctccaaagaatctttcccactctccctcctatctcccaactcacttccttccctactgctcaacgcgccaatatccatcctcagtataccctccgcctctggctccccaccttcatcctgcactctgtccgcatcgcttccttccccaccggtagcttctgccaacgcgacggccacggctgccgctgctgctctcgcgttatggtcatccacataccgatcaaagacctcacctatgcccgctctcatgttctcataatcggtttccatcacgcccaacgttctctgaagatggtcctttagtccgtcattcatttgaagggcgagtaacaatgtgctcgcgaacaagtgtccgttcggggtcggacctgttgagataggtgattctgatggatgatggtgatggtgatgttgttgaatatgattttgatggtggtgatgatccccaccaccagaagaaatgttcgtgcccgtcccgttggttgagttggaatgtaaagaaagagcggcagataggtcaaggatatgctgtgtggtcgaggatgatctagccgagcgagaggacgattgatagccgccggctgatggaccgggcgacggagatccatgggcagagtagtgttggcttaggtcggactgtccagtttggtttggcttccgttttttgcgtgccgcgttggccgaggcttgggcagagttgtcaccgacaacaccaacgccagaatgacttcctggccgagtaagacccattcgacggtttgccaacgttccgtgagctgttgatgtggatgcttgcggttgagacgcgtcttggagtattagagatggctgtggacgaaagaggaaaggaaagggagcaaaacaaattcctattgagaaaccccacgaacatgccacagaacggaaagtgaaagtgaggagacttttgttactcacatcctgagatttttgagctctatctcgctctcgctttcttcgctgtctctctctaccctgtgctctgatctttgccaatcgatcctcgtcctgattgattccatactttggtctctttttcttcccaccagctcctgctcctcctagccctccgccaagacctccacctcctctacctcctccctcctccaagtccaactcgccatcgatagttgttgaatcaacctggtcagcctgaccattaaggtctaatgaatggtgaccttccagatcgacatgactgcctgaacccgaatcatcctcaaggtggatgaatgttccttccggaaggctgatcgacccgtcttcatggtgatatgccaagtgttgctgctgtcgttgtcgttgttgtttttgctgattatcttcgtcagctctaacgacaccgttctcttggtcttgttgctgttgctgttgctgttgctgtcgattatgagcatcttgtagttgttgaagttgacgttcgaacgaaggatgatgttgctctagagcgcgctgcatttcttccatcggcagatcgatagattgatggttttcgtctctattgtcatggtcattctcatcatgaggctgacctggttcgtgactatgggagtgatgatcgaggtggtcatggttgaggtgatcatgatgggagggaagttcttgaaccgactcatggtggttgacgtgatcattgtgaaggtgatgatgatgatgatgatgatgatgatggtcgtggtgcagaccggagctgtcgaatgagggatggggatcttgggcaaggtcaactcctaaggaagggtctcccagcgaaggatagctttttgatgtaccaagagggtttacaagtgttcatgaaggtatgatagaggagcgaggagagagtgagaagaaaacaaaaaggtgagcatacaatcagacgacccttctatccattgggatccatgagcagctctttcttttctcttcttctttttccttacttgtggctgctatggagccacctcgacatgaacggctgaagaaggaggagagaacgtactcttgcagcggatcattcatctcgagtacgggcccatccaatcctaaaatatcccgaatctagctctactgaaagacaaatccgagcctgctcttaaggatgtgtcgagcgagagaggaagagaatgaaaacacaacggagaggagagagaacaggtgaatggtagggtgtggactcagacggttctgttggtcaatgtgaaattgttgagtaaagaaatacttgagaattctttctcttccgcgcgcgaaaccgcaccgggccgaagcgagttttctcctcatgtgttcttatcatccttctctactgtaggatttccgcttctgttcgggaacagcgtctctcagtcttgctgatcatagaaccgctctctcaagctaactgaactgccaggcgctcatctttatggaagagggccaagtttaaagtagactcttagtgtttaaccctaacatcggctgtggccatagtatctatgccaagccctctaatgctaacgaccagcaacactaggaaaattgtatgttcctcgacaagagcaatcatgattcatccattatccgcacatatcgtccaagttcatatgtgggcgaacaagacccgcgcacaatgactgaaggcttagaagagtactaagagtggatgaacattcatgtcgctgtgacatgctgatgttgttcccgacgggcgggcgggcggacggacagactaccggctaccaccttctgactcgtcttggttgagtgtgtatttcagatcagcacgaccgatatcaatctcgagagtgatgatgatgttgatgttgatgttgatgatgaaagcagtggccttcgtgattgtagttgtatccggttgcttgacgacaagccttagggattccaaacgttgtggcgtcggcagacaacgtgactacgtatgctgtgcaccactgttacgctcacctcatccatcttctcagcatacagatcatctactcaccgcccaacgcccaacactcaacactcaacccatctggctagatcgcttccttatgccccttctattcctcttcacctttgccatgtatgtctaaatatgttgatgtcctccatctcactcagatagaatagccacaacagtcctggccggccacgatctttcaccgtggcaggacgagctcagcaactctttgttacactggttactgacatatggttacatcccccactctgctttgtttttcatccgttggggtttttccactcttaacttgcacctccatcaactcttgggttgtgttcttcctccagcacatcgatcgtcctcatctcgctctttcatctgttcgtgcaaccttatttgcacgaccttgctctctggatcttgcctcctccccacatagatctttaggtttcccccaaggttctcaaattccgatcgtccctagccgatttcttcccctctcccacccgaaaccttgctctcttcatctctcatgagtatctttggatttgatccggccgtcattatctcgctctgtcttggtatggggctgagcattggatcgatcatcctgttcaactacctctcctccgagagtgggtctcgtcttttttctttttcttcttcttctccatctcatacatcattccctggactagttttgtcgaaactcatgtctttctattctcgccctttctatcgttcggcgcccttaaagaggctagcaagaccgctctcgatggaaccaactgggctcagtacccgttgatcaagcgagttgacattagctctaacactgccgtgtttgtatcgctcccatcaatttctgcacatcatggctcttactgaaccgatcccttctgaacgacagctaccgattcggtcttccctccccgacggccgtccttggtctgcccatcggacaacacattcagatccaggccaccatcaatgacaaggtcgtcacccgatcgtacactccgacttcgtccgacgatgaccagggcttctttgagcttctcatcaaggtctacgagaagggaaacatctccaagcacatcgacggactcaagatcggcgattctatcaaggtcaaaggaccgaaagggcagtttgtgtatgataagaatttggcttcccatttgagcatgatcgctggtggaaccggaattactcctcatctgcaggtagaacttgtcattctttgtcatgtaggagcacggagcatggtgttggtgtaacatgattggctgagctgtggcccctttcttgacagattattcgagccgctttgaaggacgagaccgacaagacgaccatcagtcttatctacgctaatgtgaccgaggaagacatctgtttgtgccccttctttcattcatgtggtgaccttcttctgcgcgtgatccgagtctgaactttaaaatcccaatactcacgcatacgtatagtgctcaagaaggaacttgacgagcttgctgccaacgtaagtctgcatatttagttcatactcagcctgccttcccctcaagatcaacagaatatcgctgaccggcaacacgattcggaacacaaacaaaaagtcccagggcagatttacagtgtattacgtgctcaacaacccccctcccggatggacgggcggtgtcggttttatcactaaggagcagatcgaccagcgtttgggcaaggccctagaagacgagagcagcaaggtcttgctttgtggacctcctccgatgttgaccgctatgaagtctgttccatccaattctttttttcccaatcttctttccctcttctttcgtttgacaacataactgacgaaccttgtgcgcttgatggataattatgaccatgtgttcatattgttattgaacaactatagggtccacctctcggagcttggttatcccgctcccaaggtcatctccaagttgcccgataaggtcttctgcttctaaacatcaaacaaaacccatgagtccttatccgacacggttccttccggtgatggggaccatcattacttctcttgtttttcgctttcacactcattctcttcttcctatgttgtttctgtgtctttgggttgataagattgatatctagataagctttttttttctcttcttttttcctttcgtcatctcatgattctttctctctagatccttttacttctcgccgccggccgtctggcatgtggcggtcaatgtcaacacacgtagatttgagagtacccgatgtctgatgtctgatgacacttcttgatccacccatcaaaagtcaatcgagaccgagtcatacatatctgatttagggatttctgataagaaagtaaaaggagaacgaagagcacgaaatcaagatagataaggaaaaaggttgtagaggccagatgagatggaagataaacgcacagaggggtgaagaaagttgtacgttggagacagaagaagacagggacagtagagtatgacctggtgaggaagaagacggacagacggatgtatggcacgtacgtgtagttgagtacaggctgtaaataaatccgtgagacgggcctgaaagacaaagattctttccgacatatagatcgagcgggaagttcaggtgatccaaaaaatatcaaaagaccgggggcgaaataagatatggataggaagggcggaataagaaaaaaaaggaggcaagagcttctgtgttggttgataacaccctctagagtctgtttgaagcatacaggatagaagtagtggtttagatgtgtaagaatagggaagggataagatatgaaggtagggtagagtagagtacacaggttcaagatagaaaccaacaccaaaatgaagaaggaaaagagatagtatgggaaccagataaggaagaaagggatgatgaagaaagaaagaaagaaaagaaatggaaccgagttcggtcgtggcttagaaaccttcttcaggggcttctaagtacgatgaaccctcccagtctagcgctacatcgcatacagtcaaaccaagccgaaggtcagtaacggaatttgactgttttcacatctagatgaggagctagggaaaagcgaaggactaactctgttggaaaatattgttcccaccccaactcagagccaatccgccgtccttcggcaactgaagacacaagaaaacgataataattccaatgacggttcctgtgtccaagcctgcgcttaatatgtagttgtactgttggtttcattgtcataaaggaaaagatggcgagaggcggaagtgagtgtgatgggctattaagttgatgagaatagagattggacgaagacataccttggaccaccatctgaaataccgacgtctgatcagatattctattaaacacctcagacccaaagagaacagatgtgatcaacaccacttctaaaagaggaaaaaagttgtccggtccaaaagagaaaataacaggcaggcgagaacgcacggaagatgaaaccgacgataacgaaagacgtatagttgactccgtttgccgaaggaatgttcgtgtatccattaaagagaacaatccaattgacgttgatcacccacgagtttggatactgaagtttatatagacatgaccgaaacagattagagtcaaatccacgacgcttagcctaacttagataaagaaaaagaaaacaagacaaacccttcgaagccagagccaaccgataacaggcaagaccgcaccggcgagcagagcccataagaacggctcataaggcgttccgcttccaaattgtctggccggtccgatcaaacccctgttgaaaccgtcccagagaaaaccccagatgtaattggttaggttcagcgtgtgcttgaattatcatacccacatcgaggcagatatgactcaccaaaggacggaagcggtgaagaacgtcttggttgaagggcaatacaagtggttcttgtttgtcgactggcagatatcaggtacctgagcaaacatgacttccttaatgccgacctggataagacaagtgataaagacgatcaccagttgagctgtcacggcggaagaagaaagaagaagaaccacacaaatcagtacgcttgagacgaagaacttagaaacgcatggagataaagaaagaaaacacgtaccggtgaacgactttctcggtgggatcttcaagtaatgtcccagtttcagagccatcgaaaaatctccaccgacaaacaatgtttcaactgcgaacgctttgaaaaactgattcggcaggcggaatgaacatccaatgttagaattggttgtttatgttgaggaaaagtcgaagaatagacgaaccatcacaggaacaggtttccctttgaagaggtatccagcaataacctgagacaggacattcaacattgaggcctgctcggatccaaatcgaacaagataggcggagagaaatgtgagcaaagctatggtgatcgaagaagaaggaagacgagcgaacaaggacgaacagattgtccggtttgagcaaagacgtaacccgctgggatgaagtatatggccggcaggatgagtgaaagaatcaagccccacactggaacttctgttgggtacgcctagcaatttaattcattccataccgcagacacatacttaggtcagctagtcagaagcggaagaaaaacgacctgaactttaaaacagacagacctgaacagcagcaatacccagaacaaagaacactacaaatgacagggcataccacctgacaaaagattcaaccaactttcagcgttaaccagcgatcaaagaccaccaaataaagcgaattaaacagaaagtgtcatcgaactgaccaatctggaacatctggatacactctcatcagctggttatgaatatcgtcctcctcaaccttattcccttttaagccttgccagatcctcggtccaaagaacaaagcggtatgaacaacagcagcggtggttaaggcaaacgagaagatgtatgccatcatgagggacgccgagaggtagaatggagaatattcttgataggcagtctcattgaaccgaaggtcggtaccaataactgcagtgtaattgtatctgcttccaaacctgtcgaatgcagcgctcgttgaaatcggcaagtaagcaaatccagcgtactatgaacagacatgaaaataaggggagaaagattagatcaatgaccgttgataagatctcctaaagatgatcgtagaaggaccatacgtacgttggtgtagtacaatatggggaccaagatccaagaaccgagaacgaagccagcgccgatgtttgcctcagcccaccaaggagtgacaagcggagaaagaatccaattaatttgactccagtcaaaggtgaggatactcatccctaaacctgttgatgttccaaataattggttgaccacgatattatcttcagaaagtgggggtatatatcagctagagaaatataactcagaaataccgaaaggaaagacttactcggacgaatccaacaaacccaggaaaagtaactaagagctccaaatagataacctgaaccaccagttcaatcatcaggaccaggattagccaacgagacaaaagcaagatagcaaggagaaacaacataggaacagtaggaaagaccaaccaggtaaaaagtagtagaagaatgaggcagcgatcacgatgatgaaaaactttaatctggtcatccttcctcccgtagcgtcatcctccgcgtgcaacgtattaagaatggtacacaagatgagcacttgtggccagatgagcgaggcaggatacgtctgtataattgggcgaaggggtttgaacaaggagatgagtacatggtcaatgaatgaccaaaagtggaacagaagaagggatactgacaatgaaacgtcgtgcataacctgcaaatgcaaacccggtcatttgagtagcaagcactagtaacacttcgaacctgtgatgacaaacgaaggatcgttgcatattgagtatacgtttgaccgatgaaggagattgtgtaaggacaaaaacttacccgacagggaacttgatgtcatagtatagatcagaggcaatgacggcctgtagggcataagcctgtacgttactaacgacgaccatgatagtgatcaacccgtgttctttgatgttgaacggccctgggttgagagaccaagtcttgccggccagtccaaagggcatgaaagatggcaactcgtagtcgtcgataggaagggcccaagccaatagtttacccaacgggaatgcggtgagcctgtttgggaagaggaaaaagagagacattgttcaaagaggtgcatacaaaagagtgaagaaaagagttgcaaaacgagggactaacactcctaacgtggtcggaacaggaggagccggatttcgatagtacaaaaacgcgttgattgccgcagtgacgatcgagagaagcccaccgacaaaccaaactcggaatgtaagcactaagagagtaaaatgggtcagaaaggaagggccaacaaaaacaacacatgctggcagtgcaggagaaatggagaagagaagaggcgggtacttaccaggcatatctgggtcatccatattcgaaaccgatgctctgacttctgcgtatggactgtcatcctcgtgcatgtctgccataatctcgcctctgtttgagtaacgagagaaagaacgaaccaacaggcgaataaataggttaatggactgaagtgtctattcgaaaagaaggaaaagacaagcaactgacttttctgaatcatcgatcgaaccgacgtcatctggtctatcaaacgttccgtccggaacggtggatgcgccagtgagggcagtggtaagccaagctcttctgccaggtcgagtaccgaaggcgtgtctgccggtgatagtagtgcctgtagtggtcgagaaatcggttccatccgttaggggcgtgaagtttctcatccttatggcggaagaatccatgcctaggtcatcactgaaattgctggaggtgtcgacctcactcaagagatcagcaatcgcctttctggagcctagatcatttctgacaagttcggaccgtttgtcggctccttccgtgtatttgatcggtgccaatggggcgagtgaactttggtttggagtcgacatgaagccactagcactcgagttgaatgtcggtgcggttggcgagtaagtcgctgtcgaccgatcatcagcgtaggtacgcccgttattgaaagcgaacggattttctgacgggtgtacccggaacgcgtcctgggacgatagttgtggagatggtggcaataaagacggcgatgacagcatggtagacgccggctgggcctcctcctcgcctgtagactcaacgattgagggcggagcgaacgagaagggaccagacgaggcggccgactggatgggccgattgattctagtgttcgcaggacggggaccaaacgaagccgggtttgctaaaggaaaatgaccaagttggccttggttcatctcgaacattgctctgggcaccctaccagccgaagtttgtggtcgttcgtattgttcgtcatcttggtcatcatccgatgaagggtacattgtgcctgccgatactgagcccggttggttgactggcacggtcgtcgtgccctgaaaggcagtggaaggtctgtgaaaggcaaatacaccttcttctggctcactctcctcctctgattcttcaccttctgaaaagtcattcaaatccggtctaaacgtgtttggtgccgggcccaggtttgaaacggtcgaggccgcagtgtctggtctaagacttgaccaggcagtcgtggcggaggcggaatcggaggaagaggggtagccagaggtcgaggtgcctggccggtccgtcgttgacggcacagcagtcaacatcgagaagggtgtagttgtttgggagaggaaaggatcgagtgggttcaaataagaattaaagactgattgtagatgtacaagagggaaggctgaatcagaaaaaatggctcgagtcagctggttaagcttttcgcaagagggaagagagaaacaagagaagaaaaaaccgtctctctccacagaaggaaaaaggagaaaaaagaagagacaaaaataaaacgacttgtcgagggcagaccaagcagagaaggagaagattatctgtgggaagcaacaaagagagaagagggacgaacgagaagacgatctctaagagaaagactggctgacactctgaggaaaggaggatgatctctagcgatgaagaaagtgttgatgtatgtagcttctgcgagaaggatggataagaaggcgaatccaaacggacaatgcttaaatcgatggatttcctcaaagggtgaaataagcacgaggtctatttcaagttgacaagcggcgagcaacgagcgacgagcaatgagcaacgagcgacgagcaacaagcaagaacgacggaagacctgagctgggccttgccttgattggaagtaggtgggtaagcgagcgagtgtgtggatggagttgtgaatgagtgtgtgttccgcactattctatatctgtgtatcttaactcctgggtgtgcgtgtatatatccgagtggatcgagagagaagggaagaaatgatgaagagaatcgccggaactgaaagggaagccgaaagagcgcagtcagtagaaatgaaggcgcagccatcgatcaggcacatgaacacaagcacaggcatacggccacagacaatttttcgcagatagctgctgcctctccgacgataagaccaatgtggacaaagccgagacatccatgttttccttattcttggcttccgcccagtgcttatgttcacacatccctctcttttcacatattcttccacgcttccatatgcgctttctctgttgatgatatttaaatttgctttctctagaagagcgttcgatacccagacaaacattccttggctctaacacacatgttccatctcgagcttcagtcctttccgagggcctagatccctgcccacggtccgttcaaatagttccatcatcacgccaaactgaagagaaccacagcatacagacgaatacgtatcaatctcagctcaatacaaacacaagagaagaagacgagaccacgactgacgagtgagcgagacaacgcagcgtcccatcgtcctttggaagagttgtctcgaatgaatgcatgctgtgcttgaacctcgtaaaactagagcacgttgtagtaattgcaagttgcattcttcttcagtcaggctcgaacacaatacttgaacagaagatgtgacccactgaaaacactgtgccggcatcatccaacgtatctctgatcaacgttctaccttctctcggcacatgattgtccttcgtgttcggagggaagagaagagtaggcatttgtcaatcaacctgagcctctgaccggctcgatgccgatatagatcaccgactcacctgcttgccaaataccatgccgacctcgcccttgatcgtcttgctcttgattcgggcgagagtatcgtcgtgggaaccaaggccaagagtggaacaatggacatcggtcgcaaagtaacagaacgaagctagtactcgaacgtcgaacgaggcctaaaaacgggtttccagtcagatgatttcggatatcagttgggctctatacacctttgagattctttgactcactcgaagtgcctagagtaattaattccgaaaaacagagaaggattccttcagcaaaggggaaagaaaaagagagagaactctacatctctactcggattgaatcaaataagaagaaaagaaaacgaaacataccaaatgcccaccgagacacatcccggtagcagcgatcctcccgttacagctatttagctgagtcaacaagtcgattgataacgtacaatcttcatcgtaagcctccaccgtcttctctgcctgaattcatcaatatcagatgaagaagaaatgaccgttaagttcgtttcttcaaaaacggatcttgacagaagaagattaaacaaaccttgtacttgttgcctttgtcagtcccagccacgtcatatggaatagcctctggtccttcccattcatggaacgaactaggacaagcgacgacgtatcccgctgatgcgactgttatttttgaaggaggaaagacacatttaattctatatggttccttcttatttgtctttcgttctcgacagtgaagaaagaggaacaaaaagagcgtactgtttgaggcaaactatatagaaacacatcatccaaagacaaaacgttagctgacattactcagactcaaagaggagaaaagagaccaacacgctcgacaggtcctgtcacttggtagatctcggagaaacagacgacacccgggaatttcgcttctggatactctggaacgttcggttcgtagatgaactgtacaaattttcaagaaaaatatatataccgtttgattgtttgtcaccccaagaaccagtcaaacaaggaggagtgaagacagaaaggaaaggaagcaaaaaagtttcagagaaaacgtcttgaaatctattcacatcaagacttaaagaaggaaaagaaagaggaagaacgaacgacacgcatcgtatcgcccgattctgtcttaacatcttggtgagaagtcttgatgagcatcttttctgataattcctttgactgttaagtttgattctgagctacgatgtgtcgagcttgacagtatggtatctgtttgtccggcggtgagattgatgaaagatggccgcgagagattcacaggatagataatgatgaatattatttgggctaaagatggaagaaacactacaactactggttccgtcttctgcgctaattcctcccaagcgcggtttaagaccgcgcccattccgctttcgtaatgtagacttcatttcgtttcatccccctttcaccacccttctctttctcatgttctcagaagacacgtctagcccgcgacctgaccgaatggctcttttctcctttttctaatcttcctttttgttttcacctgtccgagattggaaaagagcccgattcacatctattccaagcgttcccctttgcaccattgggtgcgatgagccctggtagaaaggaaaaggcagtagaaaaattataccaacatctcaaaaaggaagcgacgagaagacaaaaagaggcaacaacacagaaagtaaacagaaaaccaaatcggaaaagcagtaaatcgagatgtctagaaagaaaggatataaatgaggaggggtgaggtggaaagagtgaagttgtgataatgacaagtgagacgaaagaatgggatgatcatttttctgatagaagaagattagactatgatacaccgttttgaggaccagaggaatcgtcgtcagtaggttaatttggaggagtgtcaaacgcgagcatatgtgtactaaccgtatttgccaaagaacggaatcaaagtttgggcgagagtgtacgagaacacgagcttgggtccgacgaccaagatctgaaagcaaggtagaaggtaaggggaaagattgatcagcgtctacagccctgaccctgctcgagacaacaaaaacatcgaacgaaccttgggggtcaatcccttgaagaaccctcccattccctccttcttgatcatatccttaatgaccgtcattccaccgacggagctctcgaaactagcctgctgaactctggtcttgacgacatccaacggagcggcaacggtgatcgaggcaacggcacctccgatggaagcgacgaagttctgagcgaacgtagcctgagagtagtcggacagattgaagaataactccttggtcattgcggaacctccgaagagctaccgagataggcgaaagattatatttagcatcgagttgacacaggagtggtagcagaagcaagccgaaagtagacgcagagaaaaactcacagcaaacgacccgggcgcgtttcgggccatggtccatccccatcctcggtagagagcgaaaccttcatccttgacgatcgagaggaatcctcggtttcggaacgcctcggggttagtctgcctgaggatcttgagaacatccaaaggaagaaggacaacctctcccaatccagtcaaactaaaatgtcgagagcagaaagaaacaatcagtttgtggaggcgatcggatgcgcttttgagccaagaaaaccacttacgatccagcagtggcctctctgatcatctttccgttcttctcaccaaacgttctgaagaagaagccgccatcatgtttctggatcaaatccctgaaccaaggctgaccaccgaacttgtaaactcgctgggcaaccttgtatccagcagcataaccgagtccggggaaaagcgataggaacttcttgccgacggcagcctgggcgtgctgtcggaagatgatcgagttgacgtttccgaggttgatctttgaggagaggtatagagaagaccggaagcgcgacagatagtatggaacatgagcactaggtctccaagcgttcgatacaaattgaactcacagcttccttgtgggtcatcaatcgcttggcgatagtcttattaatttggtgtccaaatgagtgacagaatcggcagtaccgcaaagatgcgatcaaagatcagtacagaacacagtcagatctgaataaagagggaccccgacggattaaatattttgaaatgagcttgaatactcacgtccacagggtgaaagaccatgagctcagcaacacctacacaaagcgaaagaggagaaagaagaaatcacggtgcaaacgttagtacgaaaaagtagataagaaaaaagtgagctcggaaagacactaacccgagaagccagatccaagaactcgagcagttccagactccttctttccagtcatagggggagacatgatggctacttagtaaaaagagggatcgaaagagaagacggaagacggctatagaggatgatggatagaaagagaaaaaagagaagagacgaaaaccaaggtgagaagagcaacggaaggtaacaaaaaatcaaggcgcagttatttgatatctttttgtccgacttcattgcgacgaatttccaccgaccaggtctttttgaatgatctgagagcgagagccatccctcactccttgaatctgttgaactcatttgtcctcagtatgggaaacatctcgtctgtttctctcacatgggcgatatgcattctcaccctgggcgacttgattctcaagaacaaaatcgcgcgcgtgacataacttctggattgccgccatctcctctttctatatcttgagttaaactactcaatccgttccgacctttcatagcaattctgcaagagtgcgcatctggtgggccactaacatccaggacaatattatcttgagcttgcgtttatcagatgccgaacaagcagtggtctagcttctacctggcttagatccaccaaggcaatcggctggccacggcctgataacgcggccgatacgatgcgtaacgcactgcgcgtaaccgcgtaaatttgttgaagctgtctaatctaatctgtgttcgcaacatttttgctgatgttccatgcttcttgaatcatatcctcatgaccgacttgcccactagctatatcgacccggatatcgtagcatcgctcgtcgttgagacctatctatccttccctgcgtcctgtgtaccatcaaagagatccaacggcgtccaagagtggacgcctcttgctggagtcgttctctctcgaacgaccgatagttctcccatcctcaagctcatatccgttggagcaggttccaaagttgtgcccacaattagaaagtctgctagaggagacattgtcaatgatctacatgcagagattctgtctatcagaggagcgaggcgttggattctggaggaagtcggtagatgtttgaatggagccgatgatgattggctcgaacagatcaccaaggaaggtagggtgaaatggaaattaaaaactggagttcaggtccatatggttcgtcctgggtaccacatcacgttcccgtatccaggattcaggctgattgtccgtttgttcatcacagtacatctcgacccttccttgtaagtcgcacagctcgactgttcttctttcagtattccttgcgctcagttcatcgaatcgttgtgttgtcctccctcaaaggtggggatgcctcgactgtacacctagccaatcaacaacaaatactcgacccagatatggctgctctcaaatcttctcaccatatgccctcagaaacatcttctgactctgctcctagcggcgtgaatgcaccgcgaaagtcatttgtcctcgcacgaggacgagacgggtactccagccttggtgttattcggacaaaacctggtcgggcagactcttctccaacaacgacactctcttgctcagacaagctagcggcatatactctactaggtatacaagggtccgtcttatcaacagtcgtcgagcctatctacctaagcactatggtaattggtgatatcaaaggactggtggacaatgggttcgaaggagagaaaatcatacacgaagagttagacagggctcttgtgcagagggctagaaatacatggagtagccttcaatgtatgtcaaacatattcctctcagcgttctttgaataagggtgtatgtatcttattcgttcttgcgcttgtggcaacagccgaattaccaaatctatcatatcgtcatcaccctcctcgtctgaatctcacgaaaattacattttcctactcaaaatcccttctcctccgagatacgccagatttggctatagctacaccttcaatatgtaagctttcatcatcgctttttccacatctgtcaatgtcatcttttaacaagttcttcatgtctacttgtgtataggtctcgtatacacagcggatgacaaaccagagcgtctggttgctctgggacatctccatggatctttcaaaaagagcatacaagccgctgggggcaggctacctgacaaggctgtatccggcgtttgcagaaaagtcttgtttgcgttgacgctggatattttgaacaaaacgcgtgatgagggctttgacattcggtgggtcattccacaaccgaagcacacttctttaccatctatcacttgctttcaattgattacgttctcatcgatgtacaacctcaggcaatcataccgatccctcaagaagtctttcctggcattcgagtatcagcagaccaaacagatcctccggacgcatccgatgtctttcttgtgcggctgggaagaaggagacagagagcagtgggaatcctttgattcagctggagacatcgaatccctagatgttgagaaatcgacatcgagttctgtatcatccgaaacgcctgtagagaagcggcagcgactgaggtgatggagtttgacttttgatatctccgtccaacgttgtctcccgtttgtctttttagctatccgaactatttattttatatttttgaattattatcgtcgagcatgtggactaattttgtttttattttgttaagagcgccattctatatattatcctacaacctgctctcttgtacatcagctctattcattgattgcagatgtatcggtcctgaacagatggctcgatgtaacccaatgattgtggtttccactgtgattgtactcacgtgactacttctggtcacattgtcaacgacacgcgagttccaaccctgcactttctttctcttactacttcttcatccctctccttatctcaacctcttcccttgtccttgtctctatattttctactctatcagtggcctcgtcctctgcagggccgatactattagaacgaattgtcaacaacaaagagaggcagagagaaaaataaaagatgcaaaacactcatcaacaaaatcaaggaatgcaacaacagcaacaccaacagcaaaatccttctccccaggctcctcccgcacttcacaatggctatggaggtcctgaaggaggaatgaccttagctggtgttctacactatctacaaaccgaatggagaaggtgggagagagatcgtaatgagtgggagatcgaacgagcagagatgagggtacgtaaaccgatttccttctcctgtcgaacacaccagacataccgtccttcaacctagctggtcgtatcgaggaaccgcttgattctgatgaactcaagttttttcctgccttttcggtttttgttcgcgaatttccgtttgtctggaatttgtaggctcggatagcgcttttagagggcgagcgaagatctgccgacaatctcaaactagatctctctcgtagggtcaagatgttggagtttgctctgcgacaagaaaggtacctattccattctaccgttcgttggttcagtcgagagagttgtcgattgacagtaagctgcacaatgctaaatggacttgatccgctcacttctatccttgatcaacataagatcgggcaaaggccctgcttctggagttttggctggaggagctgctactactgctgttgccgccatccctccgagtaagctatctactttacaagccgaagacagcaaagagaacggaactagcggcggaagcgatgctggatcggatgatggtcgtgagttcatattggtttgcttctgttgcttgggccagataccttctcttcactttaaatctgctcgtattgatcaatgtttgagtgattttattaagggcttccgaatggaagcgcctcacctcctacggtgaacaagactctttctgccaaaaatagttcgaccggccccccgtccaacggaagtaatgcgcctttacccagttggaagaccggagtggctgctgctggacgagatcctaagagtaggcagcgaagtcgcgactatcttaaacagtatgtactactctgtcattttgttttattttacttgactattctttcttttcaactaagcacacgcttgattgatttattgatttttgtctctttgtaaccatcaggtgcttgcaagaaatctcctacctgacttcacccaacgcccttaacccgcttccaaatagaccggttgctgttcctgccgcacctgcctcagcctctggctcttcacagggtgaggctccggctaccaagcttcctgctgttgttcagtcacgtcagttttctggaacatcatcaagctcggagatcaaacctgacgacgagtcacttatcgtgtcatctgctttctcggctcctacgttgctgcaacgaccccgaaagatgctctcgactgctcctccagattcacccaatcaaggtatcccgccgtctattcaagaggcgaaggagaaagagcagcgatcaagagaggaagctcggaggaaggaagaagaagtagaagaagagcagcaacagaaagaaccgaatgagagaaactctcacgcgtttaccgaggctccttcagctcctgctttggaacaaagagccaatccattgccacccgttcctcctaccgtttcagaagactcagctccgaaagatacgcaggagttgacagaacccaaactaccagcgacggaaccggctggagaggaaatggaggatcgagcggaagagggagagcagaagggaaaggccgagctccctgtatcaccggttcatgatactgtagaatcattccctgaaaactctacagttcttgcctcggatggggtgactgatactgagccagtcgagccagtcttggaagaaaagcaactggagaaggaagttgaagcagaggagaatgtcgatgtggcgcaggagaacaaatccgaggataaggatttggaggaagaagcgagcgtcttggaggatgattctatattagaaattggaaactcgaccatcgtgccggttccagaagtttctgctctgaccgagccgaggaaagagaaagctcaggaagcgcttgaagtagaagagaaggtggaaccggagccaaagcacgatacggagaaggagaaggtcgaagagttcgatgaggagacggtaggcagcggcgaagaacaaaaggctgaagaaaacgggtcaacgacagaatctcaaccggaaagcggggacaaatggaggaacacatcgaaagaggatggaaccaacatcaaggtgagtttgagctcttttatcatggctgatgaaaccgatacttgagctgatgatgtaaaccgcctctgtgtcatcagtctatgagcccaacaacaggtcgatctggtaagcggctgtcgtccctgaggttttgtatctacggaagatattgtgaacgagtaactgaccagaatatggaataggcttggcgcaaaatgatgaagaggagctaacggaccttgctcttgagccgcctctgcttgatgacgaagacgaagtgaaacgagaacctcccctgccgacaacgagcgataagggattgtggaaagctcgaaacctgcttcgtgggtgagtcgatagtcacttagtttcgaggtcaacgatttggactggaggttcctaagcaaatgtatttgtgaatgcaacttacgaaccgacagacatgtggactgtgtgagagcggtggcatttcatgagaccgagcctcttgttgcgagtgcttctgaggactgcacgatcaagttatggcgagttgatctgtctgaaattgtctcggagaagtgagtattttgtgctttcccttgattgtcttgttctttcttgcttattttcttgatgatcacgaaattcacatcaatcaaggtcaagttcgtctgagatcgagccgttgacgacgtatcgcggacacaccaaaggcgtgacatccgtcgtgtttgatgcgcccaaagggttgatttactctggttcattggattcgacgatccgagtgtggaaagtcccttcttcttcacagacgctattcagtccgcatgattcgtcggtgggcgtgaacacgcttgtcggtcattcaaattctgtgtgggggctcgcgcttgtaggtcgaccgagcgagggacaagtgttggtaagcgtgtcatccgatggaaatgtgaaagtgtggaacacggagaaggaaggctgtccactggttggcagctggccatacggagggtccagtttggaggggcagcaaggcgacgacagagcagagggaataaacaaggaggaagtgatcgtgccgacgtgtgtgagcgcggtgggaacggatgactctttggtggccgtcgggtactcaaacagtgtagtcaagattttcaacgttcacaccggtgagcaggtcaagatgatcgagagtgaacctgttgccggtaagtttgtttccttgcaagcgagcaattgcacccactgtcggtctgaccagagccatttgttttgacagatgaacaagagtcaacaaagcggcagatcaataaggtaatcactcacccgaccatgcccatgctcatcaccgctcacgaagatagccatattcggttcttcaacctcgagactggtttgtcacaataacttttttgtgatctgcttgatcgacgaagttttctgctaaactggcttggcatattttatttgaaaaacaggcatccaaacttatgaccttccggctcacgcggatggagtaacttctttgtttgtgtctcggcttttaccggagatgatcgtgtctggcggtcaggacgcgtcgcttcggatttgggattctccttcgcagacgctcgaccaggagttgacgattcataagaagaacaaggacatgggtgttttggacgtggtggtagggacgagagagaaattgatggctaccgccggagctgacggcacggttcgggtcttggtttgggaaggcaagggcgaagaccagagaagttgattgagctttccttccttccccccatgtgttctccttaacatgtttcctttgcctacttttattttcttctagatcgcgcttttccctcattctgctcgctctacataatgtgccgtttcgtaaccataacttttttttttcttgttcatgtttgagttgatatacccattgattcattctctctcaccatccgactggtcttccagctgtctttcgtccttttcctttatcgtcctttctttttgccttgatctttgcttcctcttttctttagtttctatatgtttttttttcactatgtaacaattcgtcgatgtgctctttctcccttcttctattcacctgagacaaaaaggaggaaaacaaaccccatgactcttgcaagctctaccctactacctcccaaaatgaacgaggagaaacacaaaatacactaaatcggggcgagcacttgcaccacgagtcagctgacagaaatctgaaacgagctggcataacgagtttaaagaaaggtttggaaggagcaactagacattgagtacggaatagtcaaatgtggatgatgcgtggaaatggatcgcccgatgttgaaagttcgagggttttgatttgctctgcatgatggagaacgacgctgtttgtacggttcataggatagagctcgggcttgagcctgtttaggccggtgccttgagcacccggacctcaaaatctctggatcctgtttcttctcgatttcgggaacaaaagatcgatcgagtaagataaaataggagcacggtgacataaacaaatcataacaagccaagaagaaagacatgaagcaaaatagtaaaataatctctgccgcctgggctaggtttgcgttagaataagtttattttgaataatattttgatcacatttaatctaattgttgcgcgttcttggaccgatctccatgtttctttttttcttcttaatcggcctgaagagttcaaacaaaggattgtcgaccatctgagacggcggcgggattaacggacgaaaaagccgggataggtgtgatgcattatccagaaggatatcaggaaaggaagggaaagagagtgtgtgtatgtgtgtggggtgtgtgtgtgtatgtgtgctccctgttcggatcgtgccgctggttctcatgcgggtattatctggccctcgcttggatataaatccagatacataaaacagagaacggaaggatatgtttcaagtagcgaattggcaagtcctgcagatccattttcggcggagtttctcatgcaagtctctcttcaaaggaagagattagccgtcagggacagaagcagaaggacgagatgaagagaggtattgtgagagagagaatgtgaagagcaaaatgagaaaagagagacaggtgtacgatagatctgcagaggaattaaagtttggagtaatgtgtttctcatgtcgccggtggtgcgcagtcgaaaatttatgcttccatcccaatccttcagaccatcactttttgttccctcgctgacccggccttgccacccccgagattgcgctcgcggtctcatcggaacatctttctaccgtccctttgatggcctcccccatcgtacacggcgtaaatttaaagtttactcactcaacaaacatcttgtaaacaaagcccgtaaaccgatagacatacggtactcatgaacacatccacaccgcacgatatgcgcgtgctgatcgccatgatgcgccgcgccaagcctattaattgagcacgtgccgccaatgaaacccttttgtctctgttgggtgcctgtattctaaattagttcttttcttcaagcttttgtttattatttcatttctaattctttcgtatgataaggtaaaaaagaaggcccatcgggggaaatacacacaactacacagaacacagaggacggagaaaagtgacaaagagatgatggataataacaatcatccaagaaagatcacaaaaacctaccagaatgattctcttttcaactctaaacagtgagatatgacaatgacctgatcggcccgatcacgatgtctgttgctcttggcttttcgctcttcgctcgcttcccctcattttccgtcgagaaattcatctatgctgttactattcttattaatattgttgctgctgctgctgccgccgccgccgccgctgcgattgattgcgcgatgtatttatcccgtctcgatctgtccgaggatttcagcccgatcatcgaagcgagtggcgctcgggctaggtttgatgttaccgaactttaattggccgaacaggctctcaggctgaacaaccttccaagcagagcgtattcagcccgggaaaaacaggagctgaccaagaagctcgtactgagtgcagtatagtatcaccggtgagtacaggagaggaagaataagattagcaatcaggacgacaggccaggtgggataccttgagacacagcccgtccagaggactgggtacgggaaagaggtctctcatggatgaaagaaagcgatgcacggaagaaagagcagggaaaacaaaagaagaacaggaatcaaagtgaaaggaggaaagagcaagagagagaaaaaaggaggaaaaaaaaagtcctgtcctagacgggaaatcgaagtttggaatgcatcgtgggggaaaccttgaatccttttaagaggaacaggattcctcatcataaacccatctgccttcttcttctcttcgtgctttcttttcttcctttcctcttctcttgtgtccttccctcttttacatttctcactcttttcatcttcatcgctataatctctacgtccttcccttcccttttctcgtcgttctagcagtttcgtccaatcaagacgaaatcacagaaccactcagcacgttttgtcaactcacctggcagaactaccttcttctcgtcttcttcctcttccagaccacttttctccttctcggatgtgtgccgctcctcctgtctatcttgattcgcggccagtgcccatgtcggccgattggaccgatcggtccaactctcagtcatcatcatctacatcggcacatctaaacgagcagaggaccttctcagttgatattcctatgcacggtccggattggatacatatatgcaaaggtggttgggagtctgttcgtccgatcggcaaccatgacgatgacagagcgcaagggtcgattgatggaaagatatatacgatccagcgagcacacgacgaatataaagcgaagactggtcaggtagggtttcctttgatcgatttttcattccccatccccttcttcctctcccttcttcttctccctcttctttccatctgtttgcttgtttgtgatcccatatcatgtgcgcgcgctaaatcagacttgtgttttgtttgttctcttcctcatcataaaggcatgcgagccatgtcgacgaagaaagtccaaggtaagtgttccggtctcgatggagaagatatctcgctttgaagcgcatacatgcgctcgtatgctttaggaacgaacctgtcggaagaaccatctcgctaatcatcctgatctctgcccgtacgatgacagtgtgacggaggggcagtatgctctagatgcatcaaccgagggattcagtgtgtctacggccagcctcgaaagcagccgagcggcagacgaccgagccggataatccacccctcaacgacagctgccgctagccgttccgctcgaggtactaccgacaacgcaccgaaaccgacgagacccacaaagatggcgaaaccctcggctaggacaccggtcatgacgttcaaacctcttgagactactcacgattcaccccaaatcgaacgtacctcgctcgcttctccatcattggggcaaccgactcttccatctacttcgtcatcatcgtcgtcgtgtccgacagcgactaggccggtcgttcctcacatgcgtttcgagatgagccagctgtctatggtgccggcagctccggcctccgctggactggtaccgatttgtaaccatatcaagcacccgggtgagcagctcgtcagacgaaactcgatgggtaattgggtcccttcaacttcttttgaaattggacaaccgggtatgtatatacctaccagatatgagttctctcaggctcatggggcgaccggacaccgttatgattcgaatggcccatgggtcaagcctgagcctattgaccaaaatttggtgctcaaaggttggaggccggtgggacccaatcgatcaaactcctctccatcagtcaatccgccagcatcgacctctctcacgacgtcgacgccgaccctggcgtcgaccccgttgtctatgtcagtttggtcagatgaacagaggagcgagcaaaacacatcaaatcaatcaactccgtcaactcacttgtcccctctgtcatcaatctcgaccgaggccacgttgggcgagacgacgatggctcgattcccaacagaatatcaggcggcagggatgtggaccgtgcctcactatgactatcaccaaacatcttaccatccgattggacattcctacgcctattcaaacccttacaccgagtacggtcgtaacgtggcatacgatctcatcgaggggaaggccacggtccgatcggatggtcatggattctgcggaacgacatctggaaggactctcggactgggcttcggggatagttcaatttcaactccagcctcggtaccgatgtcgacggtcacatcggcgctcgatctacctatcgagtcaagagagggacaaccgggaatgttgttctggggggacccctgagtggagaatattgagatgtgagaagccgatcaggttttgttctgtatatcttaccaaatttcgacttattcgtgtctcggcgccaattttcttctcgtcttttc

SEQ ID NO: 2904 - DNA, 1995 bp, Xanthophyllomyces dendrorhous
  misc_feature (1287)..(1296): n is a, c, g, or t
ctcatcattcggttatctatttgttagtttctatgttctttccccccccctcggattatgtacctcattgtcttatatagtcggctcgccattcatttcttcaatctctgtagactcttccgtactcgaaacatcatacaatccatcctgtatatattcacaatcaaaaactcacagcctatatgcactctcgtccttttcagctttcttctctatctcttgtttctcgacctatgactagcgcgcaaagggtacttcgggctgttcaagtgtatatatatacctcatgtttattcgtattgcctttctttctgatcgtgttttccctcgctttgttcaagattcttttgtacctaagttgtttgtgttggttctctccagtctcatagtcgccgtaaactgtttcttgctccagtttttttttcactctcctcgcagtcgttttgaaatgtggtcgttctcattccagttatcgatgtaaatttcttttgcttggccatcggtcatcatccggccgttcattcttatttttatttttatcaacctctcctttgaatctgttggctcgtctgtcgtcatagatctaaattgaatccgtctccagaacgtggagggttttcattctctttcctactgaagttccctgggatactcagcccgcatttactttcactgtcttcttctttccttgcccccgatcgaattaagcaccgtccagatcgtaaaatcgcggaacaaaaaaaaacagatgaagagaagaaggcaacgtgaaaagagagggaaagggaaggctcaagatagagggattatcatttatatctgtagcctgatgcatgttccgtcttggatgaagtctcaattaaagttgaaacaaggttacgtggaggagaagaagaagaacattccatgtgatcgcgtatttcagactacagcgatcaatggtttccttccaggtgtgtgtgtgtgtgtgtgtgtgtgtgttgattgaatgtgaattgatccgacagaccgaacgatatgagccggatgggagccctccgaggccgaaggcctcatgtcaatgccgaggtttcgatttgactgctaaattacaaaaagaaaagacagtgaccgcgatcatcaacggacgacaaattcagctgaaatcgggttttccaacttttctattaggtttcactgttgatattctgacggcataatttttttcttcccgtttcataaaaaagcgcacggaacaacccaacgagaatcatgagggataaaggtaaaagaaaaaagaaaaaaaannnnnnnnnnaagaaaagaaaggtaagcaaaaatgaatacaatgaagtataggttgtcggccgggaagaagtgacgggacgaagataggatcccgaaagatcaagataaagcagataacattcgaaaatggaaagatagatcgtgtttgttttccgtcggattgaatgtttcaagtttcacagtctacagtgactaccccttatttcacgcttcgacagacaaaattgaactcaaacgcattgaaagcaagcagattcgatcaactggatacatttcagtccaaagttcagttccgagtattctcattcccgttcccgattcgatttccgcttccgtactcagttccatccgaatcctcgtatccatcatcaaacacttcatcatgagcatgctcgtcatacacttggagaggcatcgcatcgtggaccgatagaccgttgtctggttcgtggttatcgctcaggtcgagggcctttccgtctgaagaaacagtaatcgtgacagtatccccgtttctgtcgagagttaaatcgagtgaagaatgtggtaaccagtcagataaggtcctaccggtcacacttgaagagatgaagagacaaacctgattcggccttcgacaagctttcgagcaagcttcgcgagaagttctttcgagatcaacctagcgatggacctagcgccataagtctccgaccaaccttccttcgc

SEQ ID NO: 2905 - DNA, 4735 bp, Xanthophyllomyces dendrorhous
aacgtcaatcgccttgtcaggtaaaaatctatccgggatatctgttcgacaaaaaaagaaagaaatgtaagctccgaaccctacagagtaatcggccatgacagtcaactggaaggaaaaaaaccaacatctttgagagtacacggcggctagtaaatccaaatagcgaaagagcaaaaagaaactttgagaatcgttctggtaaaccatgcacgacgagggatgagtctaaggaaaaatcatagaccaaccagtgacaagcgcagaatcagatattccgactccgtggtgaacttcatacctccctttgagtcctcgcaagatcgagatcgtcgaagccactgttggttcttcgaccttgaccggctggaaacgtctggaaagagcagggtccttttcgatcgtctagtatttcccaaaaatatatatcacaaacgatcagactcggttcttgctaccaacgcaggcaatgatgatttcgatagaaggtggaaaacaaacctttcggtattcatcaggtgttgtggctcccacaagctgcagccctcgtgcaagagcctttgcaaagcatgaatgagatgtgtgatcaatacaggcggctgatgacagcttgtagcgaaggatagatacttagtgaacaaagaaaactcacaggcttgatcatgtttccagcgtcgatcgatccctcgctctttccaagatttagaagaccgtgaatctcgtcgatgaaacatatgacctgtccagcttctcgatcaatgtctttcaagagcgccttgaatctttcttcaaagactcctctgactccggcgcctgcaagaagcgctgaaagatccaacgcgagcacccgcttgttcaacagggactgaaaaagacgaaagttgttcagtgttctgttcttttgaagattgataagagtgccaaagacttggaaagaaagtcatacttcaggaacttctccgttgacgactgatgtaaggtgagaaaatatataaacatgatgtcagtaacaatcccgttagttagaggatgacaccaatcatcatacctcgttgagctagaccttctaagatggcggtctttccaactccggcaggaccaaggagtaccgggtttgattttgttcttcgactgagaactgtaagttgcacccgatcgatcagctcagcaaagaattgaaaagtcaagacaatataggtggcgcttactttgaattgttcgcttgatctcatcgtctctgccaatcacagggtccatttttccttctctagccatctccgtaaggtctatactctatttgagattgatactcagcatgagccacagtgccgccactcaacagacagaacaaacgattgaattagcacacgaacaaattgcttgagagcttccccttcttccattcctcctcccattgggttcatcttgaatcctttaaatccgccacctccagatcctggcttgtctgcataacttcttctaatagagatagaagaaacgactgattgtcgaccaagaggtactacgcggccagccgcgacggagggagcgagaaggtggagggtggccctctgctgaattactagcggcaatggcgacgaccgaaccgatggacggagcggaagaagcctcgatgggattttggatctgatcatgtcagtgtgcgtgtttgagtgtgggtgtacgtgtgagagtgtatgagtatgagtatgagtatggatatggaatgatgtggttgacgatcagtcaaaggctttttggtcgctcaaggtgattccatcttgaatctgacgaattcgccgagaactttccagcgagttctcccatcacgctaaccatcgcgacctctcagattgaccgtcccctaccatggcagcacaaccacagagacacagacagtatcaacagcatcagcatcatcagcagcagcagcagcagcaacagcatcactcagcccaccaacaacatccagcaattaaccaggccggaggagcagccgggtcaaataacccgggtgggccggcagctagtgcaaatcagccccatccacctcaaccaccggtacctcaacaggatctaagtgtcattcttgttacgggtggctgtgagtctgtgctggtaacaaaggcctattgagagattcgtactgatcgcgtcaacttgacctgcactacactatcttgcggatgacacagatgatcatacaatcaagttctgggaagcatggtccggaatctgtggtagaacgattcaaaacgcagattcagttagtcttactcgttccttctcttgatgtctgctttcacatgtttggttgatccagcttttcagactaaacagtactctgttgacctgttcaccgtttcgtctgtcttgtcttgatacaacagaaacaaatcactcggctcgcaatctcacccgataagaagatcttggctgtagcaggccatcatcacgtcaagctttatgatatccaaaacccatccaataacgctcctgttcgtattgttatgtcgaccacgctgtctgatcctctgtaggcgtaataggttctcaacttgtatacttgcttttccgtataccaaaccggttgatcgtcatataaccgtagctggccacattcgaaggccacactggtaatatcaccagtttagcatttcattgtgaaggtaaatggatcgtcacaggtagtgaagatggaagtctcaagatctgggacacaaggtaagctgccaataacccttgtctcgtctgttccaaagttgcagatccaaaattaggctgattggaagatgaaacctgatgtcttattcaagaacatctcatattcaacgtaactacgaccatcgctcgccggtcaacgatgtagtgatccatccgaaccaaggagaattggtatcatgtgatcaggatggcagtgtgaaagtgtgggatctggcggagaatacgtgcacacacgagctggttcgtttatactgtttctgcaaagacgctccggatgatgcaagttgtggatttctaaaaggtttcggtttgcctttatgggacaacaggtcccggatgcagatgttcccattcgaagtattgccatcgcctcggacggttctatgttggtagcaggaaataataaagttagttcaactgcctgctctccagatttgtgttttgcatttccgaaccctgtggttgtcacaaagatctggaatcactcttatcccgttctctctttattttcttcctcatagggaaatgtttacgtctggaagtttgagccgggatcggacactgatttgcagccagtgacgatgtttcctgctcatccagggaaatacatcactagggttcttcttagtccagatgtcaagttcgttcttccccccctcatccaaaattttgttgtcctgtgtttttgagatatttcacctaacatctttgcccactcttgtaatttattattaccttaaactgcgatcttcacctcaaatcttcaggcatttggcaacgtgttcgtcagacaaaagagtgaagatctggtcaacagagaactatgagtttaaactcgaaaaaacattagatgatcatcaacgatgggtgtgggacgcggctttctcggcggattcagcttatttagtcactggtgggttcacctcggttctttctttatttcctcgtgccttcacttttttcctttacaggccgctcaatactctttgttgttttcaatgacaaacagcctcgagcgaccatatcgccagactttgggagctcgccactggtgaagttgtcagacaatatacaggtcaccataggtacgttcttctcatccgctgttctctgttccccactcctttcacagcgcatcacaactgacatcttatgttatttgtgaccgtctctgttgatttgtgtacggtacggtgaacgacttcatagagcatgcttggctgtagcattgaatgatataaatcttgcctaatcaattcttttcatctttgtattcttaactacgaacttcacgcggcttcactacttggtgcttgtaggataataaaaaagcaaagcatgcatccatcatacacaagatagaatttgaggattaagttagtcaagtaaaataattgatcaccattcctggcatatacacatgcaaacggaagagtttcagacgtgaactgtcaagattcataattctctctacttcttagccttcaaccagctctcgacgttctccttatccgtactcaaccattgagtagaagccaacacggcctcagaggtttgagcgagcgacatatcgaattgagatgtatctttaccagcgaaaaaggattggatactatccagatcggctcgagtactgagtttgttgtacgtgatgccaaccagtcggtttagagactgggataacgcaagagtgttcatgaaccaggtagaaagaatcagtaagagctttttctggattttatattttaattgggaccaggagaaaaaaagaacgaaccatggtgttgttaaaccgcttgtagatctttaaatatagacatcgaaacaaagtaaaaatgcgacctaatcaacgtcggctcgatgatgtatacgatttatcaaaagtgcagcaccacgtacagcgtcataattggtttggaaatagtccaccaaagcccttctagactttgtattttgagcgagacccataaagaagaacaggacgtcctgatctttgacttctgtaatcagc

SEQ ID NO: 2906 - DNA, 5245 bp, Xanthophyllomyces dendrorhous
aacgttctgccgaggagcgcgttgtcggtgggagccgtcaaagcgaccatggcgtcaaccttcgtacttggattagatgggttcttgtaaacctccttgactatatcgtaagcctcttctccaaggtggatgatggcgagtcggaaaattgcccgttgaatatcgggggcaatcgcattttcatccccgctggcaaactttcggaaagcctcagtcgcaaatttgatgacaggttcgtagccggcgattccagcctgagagaaagcgagcgttcggagttctttgatatcggggtcttcgtcttcgataaattcgaatctcagtcgatcgatcagaggagcaaagatcgttcgagtaaggtctttgatagaatttcgaacgtcttcgggctgttcccaccagacgctggataaatcagaaagggcatcggcgacaatagaccagacaactttcttttcctcattcttgaaatgcgagatcagatcgagcattccggttgttgacgaatatccagctctggctagcttgtaggcatcagcaacaagaccgactcgatcctcaggagagaatacgcttccttgcttggaggattctttgccgagaacgtcaagatgagaggaagaatatgcgacactggttcaagttcaagttcaaaacagagtgacacggtcagagatatgaaccatcctcattaatatagaagacgtgagcctataccggtagaaaccagtggtatcagcattgagcttataaacagtagctccttccaagtcgatggtgatctctcgctcagaaaggaccaggtccttcttgatttccgcctttccatctttgatgagaataagtcggaggggaatatgcctatgtaaaaagaggctctgagtgaagtcaccgaagatagtttggatagcgaataacacacgattaagcttagacttaccagatggtctcgtcctcctcaggttgaacgtttccggtagccaagaatcggttctgctgcatgtgaagcttgccgtccttctcagtagcggtgacgagagggtgaccgatctagatatcgaagcacaacgcgagcacacatgttcaggagaagggagatgtatcttgatgtataaaagtacataccttttgaatccaagcatcggcaatcttggggatatcgacgccggaagcctcctggattgctttccaaaggtcctgggtggtagcgttcgagtacgcgtgggttttgaggtaaaccgagacccccctcaagaatttatcctcccccacaattccagcaatcattcgaagaacagatgcaccctatcgtgaagttgtgagttcgatcaaaccggaaagctcgaagacattaggtcaaacatcaagtgtagtctaaatagagagttgacttgccttagagtaactgatggcatcaaagaattgactgatcttgttggcatcttcgaattcaacctggatggggtgacttgatcgttgtgcgtccaaatcaaacgctcggaagaggtgatcggttatgaaaacggatcggacgttccattcggggtaaagtctgatagatggcattgtgacgataagttgatagttcagttgggtagcgaaaccagatgatagatgcttacctatcaggaatgatgacctccccacacaaagtagctacgagcatagcaagaagcataatcagtaacgcgctgctgacgagataagacgatcttatgcagcttgtaattaccgaaagcctcgtttaaccagagctcgctccaccactaacaaaacaaaagatttgaagcacaaattgagaggaaaacgacggacagatatcggtttttcagccatcagtcagacagcattgaaagaatagaacgagagacatattctgtaccttcatggtgacatagtttccgaaccactggtgagcaatctcgtggctctgcacactggccacctgcttcttggctgccaacccactcttcttgtccaagagcaatactgaagttcgaccgagaatcaatccgtagttttccattgcctctgttgattatataggaacaagaaacggcaaaaggtatgatgtatcagctctatttcgacttcgcgacctgttcacatgagagaatcgtacgagcgtcaaagtcggctgtgtgaattgaataagagggaacaagagtgggaccagggatatcagtcaatagctatcaaagtcgtgaagaaatttaagatatatgacccactagcaactaaagaatcaagcttaggaagagcatagggaatatcgaagatttcctcgtatagtggtgtggctcgcttagtgatctctaacgcatagtcgacctgatggataatatcggaggtagctacggtggcgaacgcgtgaccaaagttgaccagatgcattaggattatacacgatgatgagaagacttctcaatcgaaaaaacatcaaagacaaaccatagattcgaagaggaacagtcttgccggtcagaggggagatgtaggaatcttttcggtactcaaagtatccgttagcaaacgctaagagataagtcgacatctatgcagcgcaggaagccatcggaatcagcatataggtctcctcaattgaattaatatgtgaagacatctggagagagaaagacagaacataccagaggtgatttttcgaacttggtaatcttccatccgacgttggctgctttttgatgagtcttgtcgatagtctttccagtcgttttagcggccacgtcgccttcggtcttcccagccgtggtctttccaatcgtcttgccttgatcgccttcagtcttgccggcggtagtcttgccgtaggtctttccgacaaggttgctgtcctcagtcttgccaactgaagaggtcgtggtggtcttaccgatcaagtttccttcggtctttccaagtcttagatctccctcggttttggccatgatcgtcttgcctgtcgtcttcccaactcccagatctccctcggtcttggccatggtagtctttccgacagtcttcccaactcccaaatcgccttctgtcttagccgaggtcgtctttccgacggtctttccaacatctccctcagtcttaccaagcggagtctgatcagtcttcgtctgaccctctgttgctccctgcgtcttcccttgcgtctttgattgaccgctgatcaactttccatatgtcttgctctccaatctgtcaaacacaccctctgattgaccctctacccaaggtcgttcgatcgtgaccggcatgtttgacaagttgacagtgtcggcctgagagatcatggtgaccgagaacgaagccttcatttctggctcatcccagcatggcatggcttttcgggcgtcggtcgcttcgaactgggtgagggtatagatggcttcttgtttcgtatctttatcaatgtaggtcgagatgtaatatccctgaatgttcgagttgaaacagataggaaacagagtcgaggccattttccgtttagcgtgaacgctcagttgcccggagattgggtgacaatcatgaccaagggaaagacactcacgatcatactctgacccaactctgctccccatcccaagttcaatttgatttcatctccgttcctccaattgaagccttgaagggcagcgatatcgaccacgacctgttcgttcttgtcgtctcttttcacagcagaatccgggatattgtacacggcctcggtctttgcggcgaacgattcaatgtgaagggagtgtatatggagagatgaatgagcgttgaagatgagccgcttgtcggacgcatcctgaactttgagtctttagaaggtgcgcatgagatagtccagaaaaagaaatgaagagagttgtccactttgtatgagcatgcctgggctcgatgtttctctcgaacaaatgacaaagagatacagggagatgaatgatggaagaaaccctcacaaaatggaagatgatccctcgaaagaacgatcacggagagacgtcttcagaatgatgtcgtaatgcaaaggcttgacgttcgtaggaagccggaaggcatcggtaatagcagggttcatagctaaacgcaatgaagagagatcagttctgtgtgtgagagagagaaggatagacgacggaacgaccaatgaatccaacagaagaggagatccgaaagaaaatttccaggttcatcccccgggtctatgcccgatgcatattgaggatacacgtggagaaacacgcgtcaagtgtctcatcccatcgaccctcaggcagtcgaccgatctcatacgtctgtgtttgatgttctcgaacaccctgtgctagtgcatgcctttctttgtgcatttaaagattctatgtcgagcaagggtgcgagtggctttgggaaatgttcttttctcctctttcttctttggccccttcgtccttggcacgggcgtcggccggatccggtctttctgatcgagggaattccagatatctcgaagaagatggacgatctacagataaatgatacagaaaactcgataaaaagacacttactcgaataagacctctttataacatgtacagtagtgacgacaagattagagtgaacgtttaagattctggagatagaagcccaggtggggatcaatctggtcatgagtaaaaaaacacgtgggggtggggagagattttttttaaaaaaggactggtaattctaataagagaccgtgtgggggatgtgagctcggtatcattccatctctttcttgtcaactcctcaacctcgctcatggatctaagcagctcattagagacattttatatatggtgaagtgaagaggatataaaacaaatacaactcggaaaaccatcacagagtagaatatagacatatgtatttctcgaccttatcgagccatccatcctccatcaacctacaaaagcacgcaggcatcaaccgatctgtcagattttgtcggggtcacggataataaacgacaaaggagaatgttcactcacagtcacacactctccacacacgtaatccgatccttttccggcgaggaacaagatggcacctgagaaatctgcggggagaccccatcgcttggaaggaattcgttcgaggatctgtctggaccgagttggatccgcgatgagagccgtgttcatctcggtcgagatataaccaggagcgatagcgttgacattgattcccttgccggcccaatcgttagagagccccttggtgagtc

SEQ ID NO: 2907 - DNA, 11504 bp, Xanthophyllomyces dendrorhous
gcctccttggaacgatacgagcgaggcaatgttgatgatttttcctctgtcttcgccttctttgcgagtctcgatcatgtgctttccaacatccctgtgtacatgaaagagagtcatattggacggtcagttgtctgtctaccaaaacttgatgaagagtgaacacgaacggacctggcgagggtgaaacacgtgctcaagttaacctgcaagacctcgttccaatcttcatccgggaagttttctgaaggatgtcttcgttgaatgccaccgcagttgatcaagatgtcgatcctctttccatctttcgtaacttctttgacgatctgaccgacagcttcttttgatgcaagatcagctacgtgaatcgtggcttgtcggcccaaagctcgaaccgcatcttgtgtttcggtgttttcagctgaaacagatatagaaagatattttttaagaaccgtaaagagaaagacaccatgattgcaaagattgagaacaatatagacctactggatcgctgaatgaggattatatcagctcctgccttagccaaagtaatggccagatgagcgccgattcctcttgttcctccactacaaatggaatgagataaatccgcttgtgtcaacactcgcgatatcattgtcgtagcgaagagggaaagagagaagcagtagagatgtaaagaacaaagattgaagatgaacaggacgaacgtgatgagcgcggttttacccttgagcgagaagagagactcgagatattcagacgtagacatgatgctcggtatagtagaaaagattcgatggagttgacaatgagaataagaagaaagaaagaagaagaaaaagaggagcaggaggagcagcaaggtttttatctttgaaaagacaaggcgggggaacggtcacttttcccggtcgccggtttccggtccggactgccgaagcttggttgttattcctttcgttcattcacctttttgagtacaacttccacaagtatcaggttgcaggggatcctttgtttgcgagaataagtgataacacattcacagctgcatttaattgcggatagagtcctctcgacggcaaattctgatacgcaaatatttctccgaagcctgcattttcctagggaccgtagatgaacatcattgagaagggcgggatatctcgacagtggaaatacgatgaaaatacatagagtggtcataaaaacaagacggtcgatccagatcaaagtgggtcatctatccctagttccttcttggtccagatccacaggtcctcttgaagagctttgtcatgactctgctcgctgctttcaatctctttgacgtcgatgacctgatagtatcttccacttgttcctacgtcttgatccgtcgccaatttggtcacactatcagcgaccttctcgacggggaagaaatcaggaaaccaccatcgagagaatggattgctcagaaagaaccggaagatcacgccttgtatccccgcggcccatcgatacagctttgtcgacatgacccccggatcgagtgcgacgaccgtccaaccgacatgtccttcggattgtgcgtgatgatgaagggcataggcaaacaagacgttacacaactttgacagtgcgtaccgacggaaaccttcaggctgggtgtccagtgccggatcggtaggaggatgagcggcagcctcggccgtggtgtagttcggcggaggaactcgcttgagcttcggatcatgagtcgaactagcaatgagaacgatccgcgcggacgtcgttaattgggatcgaagaaggaagaacaagtatgcctggttcagatgattcactgcaaacatctcttcgtacccatccggtgagatatgaaccttgtcgacaaattggatcgccgcattgaggatcaaacaagagattggagggaacccttgagagaggtactcatcgacaaacgatttcgttccctgtttggttgatagatcgagacggatatagaccacgtctgtttgaccagtgagtttgttgatctcgtctgccacttggccgttagatcgggagcaaatcacgatgaccgtccgggaagatcgttcggtgttggctcgggcaagtgcataggcggtcgcttcacccaggccggtcgttccacctgtgataaggatagtagatgtatatttcgtgtagtccatggtttatgagagtacgtgtttaggtgggcgagcaaaggaagagagaagaatgaaacaagattgtaaaaccccatcttccatcttacatcttaaacgccaaagttgatagcatgcccggttgtatgcccggttgtatgcccgatgtgcagtggatgtatccaatcccaggaattggtaatcgggtttcttgtcttcctttcctcttggcagactcgatatcagtttggatcaatacccttcatcctgtaatggaaaacgcaaagctagatggatggaaacatttgagaaacaaaattctatcgagaagcttctaacgctatgatgatttgattgtctagatttgaccctgctaaggtcttttattcggtctttccctttttttctccattctcacttgtagacgagactccgtcctccgctttccttttcagtccgccgttcgtacttgccgtcgtagagcttgtgcgtgtgtgtgtgtgtgcgcaaggagattcacaaagaggtgaaaggaatgtccaaccataccgggttagcaagccaaggacaagataagaacaaaagagagcaaagtcaaaattccattttcttctaatccaacactcaaaacgctttccatccaaacacgaacgaagacgtctaaagaaaagaaaagtctaaggaaagaaagggggttctctatgtccaaggacgaggaaaacttctaatgatgtctagtgttcataacaaagagaagaggcgaagaagaaaaatatattatacgagatagaaaagagtgatcttacttttgagcagagaagtactcgagctgtgtgaggtttccccgattacatcaaagttgttcagaaccagttcagtacaagctacgccgacggcgaaagagagaaacgacgtacgctgctcttgggatcagtcttgatggtagagttgttgctctcagggtcccagttggcggggcagactacgtcagaagaacgaacaagtagacaagatgatgagcaaccgcgtttgtcgacctatgatgaacggcaaactcaccctctccgtgctcgtctgtaaactggaaggccttgatcaatcggatggtctcctcaacggatcgtccaacgggaagatcgttaatggtgatcctagataaaaacgaaaggaacatcccgttcagcacaccaactctggaatagaacctagagaagaacgaaaggggctcactgtcggagagtacccttgggatcaatcaagaaaagacctcggagggcgattccctcatcctcgagaagaactccgtagtctcgagctaccttctgggatcgatcagcaagcaaagcaagcttgagatcaggtccgagacctgtcgttaaagagtgaacgaaaggcggaagtcagaatgctggatattgtgatataaaagaggagcgagaaaagcaaacgcacctccctcctgtcggggaaggttagcccaagccaagtgagagtactcagaatcacacgaaacaccaacaacctcagtgttcaactcagcaaacttgggaagagcagcgttgaaagcgaggatttctatgagaatgaatgaaggggtaatgattttcgtcaatcatcaagtcaaaagctgttttttgtaaagatgaaatcaggaaccgtaccggtggggcagacaaaggtgaaatccatggggtagaagaaaaggacgagcctgaccaaagaggaaacccaagtaaacaaaaagttgatcagacgtctagaacagtttttatcaaggagcaccttcaacactcctgatccctgatcctaagcctggaagactttatcactatcaacagtactagcaaaaagataagcgaacgcaccactttccctggaaatccttgagggcgacctcttcgaaatcaccgtctcggacgacggtacccttgaagtcgggggcgggtcgctgaacaagagccttggacattttcgttttgttgatctgagattggtgaaaagaagagacgccgtatgattgaatgaagagaaaaggaggaaacagaaggcaagagaaggaaaaggaaaggagaacgaagagggaggaaattgcaaaagaggatatttaagtcagtcatgtggctttgacttgagagcatccagataatcgacacaaaacgttaggctagtaccgcatgcttacttggagaaaggggtagatgtggatggtgatgtggatgaagagatggatagacgagagaaaaatgaaaaaacccggatgggcttataaagaaaaacaatccagtccgacgaaatcggaccggtctagttgaaagaagtgtggcgcgacttcttgcacctcattcgtcgaccggtcgaaatattgaccctttgagttattttctttcttggtaacaaatgacgttcacgattggaggagtagaggtagaagaaactctctttgtatacacacacaggcggaatgaaaaaagaaagagaaactaaagagacagaaacaagtagaaatagatcgagacttctcattcagacatgcttatacatctcactctattcatccgaatgatcatttcgaggaagaaggcacaatccatcatttgttagttttctccatacactttttgacatacgaatttgaacataataagggaggaaaaggtaaccccaactcaccaatgtctttgcgttctccttctcgagctcatcaatcttgttctgcgctgccttcatctttctcaacagatactctgacctagcgacgaccggatccaatcttgactctagtccaagtctagacctcaggcttgctacgaatggtagagaaaagctgaagatcgattttcgagaaccggtatggctgatttctttgagtgagagaagttcagtctcgtatgatttgatatcggccgcgctgagcccgatcagctcggagttaaaagagatcgtctgggaggcgttaaagacaggatctatcagacagagtggtatagatccagttagcggtatgctatgcagccaaagagcgagaaatgatgagtatcatagagagatacaaggacggaccttcaacctgtaagatggcaggaagtgcgaacaaaaagtatcagcaaaaaaagtcgcctcggctttcactccgattctacgaaacgaactaaccagctttcggaacgtggcatgcatcatcggtttaccaggcttgaccgtcgatggccagccttttatagtgtttggatccaagaaatcatacgtgagacacattgaccaacgtaacaaaggaagagaaaggagagacggaccattgacgagagtaagactgatgacttcggctgcttcaagattctttagcttatcttccgctccctctgatggcgggatcgaagaacagatgcaagtaagtcagtgaaacaaccatcgatataggaagcaggccaatggcaaaaactaggcttcactgaaagggaacgacatcaacagagactggtatgggatctgtccgattatcaataagttcaacctcacaatttcgtcaattcaaacaaaacatcacagataggaaaggaaggaagactcaaacgtacatcagatttcttagctagagagctaacgatcttccaggcttgagctcgagaccagggtaaactctttgcttcttcagaatcatcaccaaatacggattttcgaagttccacctgagatctctgtagaagatcttcgacagattcgctctgtttgtaaatcacatctcctgttgtcagctgaagaagggagggagcatgaattgatctggctcgaaacgtcggatactcacaatcgacagtccactcctgactttgttgatcaatccttccaggtcatttaatcgaccaccaaacaacccgatcaaccttgcttcctcaggatcaatccctcttcgttgtccacttaataaaggcccagctgacgatctgtccaaattgagtttgtcagccacaaacgaaagtgaggtcgcttgatcggcatcggctaaagagattgtgttaatcggtttggaaggtagagctttggccagtgattttgaggcggacgtattatcacacaccacaatcacttgcgcgatctgagttccaagataccgatttaatcagcagccatgtgagttatgtagaaaggaaaagtaggaagaagaaaaaggagagttactctgttttctaccagggaagcactccactctgcaatcgtgctccacaactctggctttcgatcgcccttgctagcgaaattcttcaagacaacgacaggcagggaattgatcgaatcgttctcactctccaactggatccgatctttctccttttgagcctccatggccactgctgtcggtgaggagagagatgatggtaaggcctgtccgagaggtgaaccaagtgtggtcgagccaacggtggaaagagagaggaagagggcatcttcctcagtaggtacatccgtggggagaagtcgttcgattccgtagcctgtgcatgtatgtgtgtgcatgtttaaactcctcctcgtcagcagggctcaaaagttgtatagcagagcaacaaggcgaccccatgaggagtgaaagaaataataaagagacgtacccaactcgctcatgatcccattgccagctagatcatccaatctaccatcatgccacccaattctcttcagtctttccgcaagctcagttctctctgactctcttagcgcacaaagttctttgcgtttgaccccgcttgttcgttcaagagtagagtcttcggagacatgcttgagtgcagaggacactagatcaaggatttgtttgagctgggtagggaaatctgtactgaagccggctgtgaatatcagatgagatgagttggaatgaagggcagagtgcgagatcgggcgtcagtgatctaagaggtttgtatcaggagaatggtcaaaaataattcctacttttttgaccgatgagaccgacggccgccagatcgatcatctggttgaaagatgccaagaatccaaacattggccttgatgatgatatgggcaggagtggtgagcatcagtatgaaaggaggctttcgaggaagataatgatagagaagaggaagaaacaaaccaataaccagtctgatgagcaagaattgaacacatctcgccatcggtctttcctttagctattgctttacagtcaatcacaatggattttctttacgcggacattgagagtaagttcaatatttataacattaacatccgctagcttcattagggaggcaaagatatcacatgcgcaagagagaacataatggacaaacttttgctcggcagagaggatctcgtctacgagagcattctttccagaccctgctggtccggtgacgaagatgaatccagagggatattctttcagccatccttccgtctgtttgacagcttcctgtctctccctccaagcagactgattgacaggttcgcctctcataatttctccattaccggcgtcgataccgacgtttgcgttccgtccatcttctagatcaaggcctgtatcagctaggttgaccggggaagagatgatgaaccgatcggttggttgagtaccaggtgctggaggagagatcagccaggcgggaaggactgaagacgcgatttttctagagtactgaactaccgaataacctggaaagtgatattaggtaaaggaaccggattagctgagcagtgaaagaaggcaaagaggggagagtgaggaaggaatatacgaagaaagaaatcttaccctccagatcgaaccggccgttgactttggatacaacaaagaactctctgatagggtcaaagaacgtgtaactcagggttcctagcaaggcgactagaatcgggagagcaattctgggatgggaagagatccagtctctagctgcatgtgcctggataggggattggtaggtaaacgctaaccgagttaacgtgcccggaggagcggatgaagagggtgggatagaaattccgtgaagctagttggaagatacaagacgatgatgagagttgaggtctagaggggcaccatactacagaacgagagaccttggccagatatctggcgcgacaaaaaacagactcacacaagaaacagcggcggtactagaccgtaggcgagaaaaaacgagactagcacttctgagggttaacgggggcacaggtgtgggtggtgtgatggtggcaagatggccaaatggtctcaacaggtcgtacagtctttcttggttgacgtccggtccttcgaacgagaccgtcaactgggatgaggggaaccgattcaggtcttcgtaccatggatgaccaaggaccggatggatcttgcccttcccccaccatgcccaggtgcgaagacctccgaactgatcgattgcttgctggaaagcgtgttgaatttctttgagggtgtgtgcccggtcagaaaagccttctgattcaccagacgatcgcccttgagagattggccgatcataggaaaaggtgagaaaaacaccacctgcttttggctgtctttctatcttgagcaaactaaatccatgagcattgacgttggaagcgatcaaggagaactggtctaacaagtcgtcctttctgagtgaagccagtactgggcgagggctaggaataaacaaaaggtcaatacggtcgctagaactactttagaagatccatatggactcactctgccttcccgagctggatggggaatataccggacgcataaaactgagcttcgacccgttccaccggcggctttggagtcaagtgaatccgaattgattttgatcgttcgatattgaattagctctaggatttctattgaacgctggtagagacgattaaacagaatctcacctcataggcttcgtcgccaccaaacgattttgaattggtctgagttggatcgtatgacgagccgaattgaccgagtgacgagctctggctttgtggattgatcgttgtctctactgcttcagaagcaaacgttctattgaacagaccaccgagtggccgagaaggccgatatgaccgagaagcaaaccgggagacgaccactcggtgcatgtgattgtggtcgtggtcgggaagtattcacgttggacaatcagatctgtctttttaacaagcgaattacctgaaagcagagtaaaagacaacgatctcgaggtagagataaaggtgaaggtgagtgtagatgtataggtgaaggcgaccagagattaataaaaaaactctggtgacgtcatgccttgttttgtccgaccggcttggcccaaggaatcagagaagaagagacatcaaagcagagtgcgcgacggagagtaaacacaacatccgagatgtataagttgatcgatgacaacatcaaaagagagagaaggatgccatagatacatcaaatagagagatacacatgcacatgagggagagatgactaaagaacagttacgccatctttcccacggcgagaagcgagtaagtatctctgttgtctcttaaatctcttccatctcatggtcatggccagggtcatattaaaccctttctctcatctctctcgatcctttttaccatcactcgctcgctcgcactcgtatctgcatctacatccgcactcgtattcacacttccctttatcaaactctataagacgagctatggctaacgacaactccaggtcgtgagtttttctctgtttcatctttgggcgacacgatgttcatctactcttgtctgctttcctctctcaccatatgaaaacaagcgatatcacgaaatgggccagcagtgacggccagttcaaacgacaggtctcttcctttagggacgttatcgaagagggtggcaagtttcagccagaagcaggcagatatcatctgtgattccttttttcttttcctcgtgcataatctcaatcgctaatggctaaccatttgccatcacctctctcccatactcgataggtatgtctccttggcctgtccttggtaagccctttcatcttgcaatgtttatccatctatttatccatccttcgcctgaactggggcacttgctttttttcctgatattcctgcagggcccatcgaacgttgatcgtccgaaagcttaaaggactcgaggatattattggtgagtcctattcgttccctctgctctcggtcactctttgcctattgtattcatcttctctggtctcatccgctttctctcatcagacgtttcggttgtccatccgcacatgctcgaacggggttggtcgttcgaaacgtccttccccggtgctacaggtgataggctcaagctcggtggaacccatctccgggacatctaccaccaggttcagccagactacaatgcccggtaagtgttggtttctttcttcttctcccgctcttgtcttctccctcttcccgtctgctttatcctttcttccttcttcactttcttctcctccgcctcctgtcgtctaccctcacttgagtattcaataatctcttcttcctctttttgctcactgcagatacaccgtgccgacagtgtatgacacaaagacaaagacgattgtcaacaacgagtcgtctgaagtcatccggttcctcaacaccggcttcaactctattcttcctgccggctcggacaagcaagcactcgatctgtatcccgatcacctgaaggcccaaatcgacgagatcaatacgtggatctacaacgacgtcaacaatggtgtctacaagtctggtttcgccactacccaggaagcctacgagaaaaacgtccgacctctgtttgctgctctggacagactcgagcagatcctcgaaggcggaaagctgtaccttgtcggagatcagctcacagaggccgatgtcaggtatgttccgagcatttcagttaatcgtaagcggccctacgaaatttactttgatctggtctttcttagactcttcactactatcatccggttcgacccggtttacgtcggtcacttcaaatgcaacctcggcaccagtatgtctacttttcttttttgctcgatcatcctcgagcgcacaagttgacatacgagattcctatcttattcctacttggtcgcattctcagtccgacattcattcccgaacctgaacaactggctcaaaaacttgtactggaagaatgatgcgttcaagagtaccaccgattttggtttgttcatttcatcatgtctcttcattttcaatcgttgttgttgttttcccaaaactcaaccttgcgaaaactctaatcaacagatcatatcaaggagcattattattagta

SEQ ID NO: 2908 - DNA, 5515 bp, Xanthophyllomyces dendrorhous
attattagtacgttctatcttctgcactgtcaagtttccacagacaaacctgtcgtttcttgatcactgattcttttatttcatcatcaccatagctcacatgttcagatcaaccctactcgaatcgtacccgtaggcccagtaccccacatcgagcctctttgataaggttcgatgaggcctcggcggttttctacgtcgtcctttcttattttcttttttgggttgtgtatgcacttggacctgttccgaaagggtctgttgtcttcctttatagaatactactgaactatgcatatcttctcctgctcaatcgctcttacatgaatcccttaattacttctatatgatctagtaaaaacctactctgaaaaagagaacaagtgtgcaaaagaagagatgaagggtttaagaaaagagtgaacaacatagtcaaagtctagtactcaaaaagattgtctgttatgtcaggtatatttgttgtgttagggttatcgcctttcaccgcgactctcttcgtcatcgattcccatccatcaccttctgtcgcatacatcacctgttctagtctacgtctgattgtcttttcgcatcaagtttatattccttccatcgaaggaaaacctcgcaaaaccgatcgaagcaaccgaacaagcaacaagaaggtcgggaatcaaaatgacaaagacggaagaaaaaacccgagatcaagatcgagatcataccaaagaagcaaaaaaagaagaagacgccgaaccaagcagaacatcacttcctgcatccgtaccagtcccgaccatatcatcgatccatattgcaaaagatctgatgaatgaggctgtcttggagctacgtatgagttggtccggcaaggttcgttctcattttagaacttttagtctggatgaagccgtcagaattagagacttgtgctggatttccagagtcagcgaaagtcctcgacgggcaatgaacttgtctgagagggagagttatctagcatttggatccaaatgagagataactcatagaagtttctaatcaagcttctttgtatctcacttgaatacatccttggggatttggaaatagatgttcgaacttaaagtaccggagcaagataggtccgttccttctcctcttcctctatcttccatatagtttaatgcagtggtaatacataaatgagaagatctatactgaaaaaatcatccgggaaatgaaaattaggatatgggacctcaagaacctgatctggagtctgacggaagtcccgttggaaagaatcaagctcatcgggctgactacgacgaaggcaggaactgggttggaagactcggtcgttataaaaagtttagggctgaagagtgggaagaaatttatgatgctcggttagttcctttcttcttcatgtatccttctgctatgggactctggaggaagaactgccggggttcgttactgatgaagctctggaactgtagggacgagtgtggagaacagttttaaagagtgagcctccttccctgtctaacctgatgcaataataaaatctcagagattaatgacgaattggtcgtgtggaaaaagtccgacgaggcttcaacaaaaggaaatcatcgatgattttgatatagattattcaagcgcgcagatccctcctcacgaggttcgtgctgtgtcttttactttcgaatccgtggtcacaccgatcctggatggagacgatgttgcttgacttatttgagaggagtttactcaattagcatgtattataaatttcataggatcctagaaatcagcggaagatcaaggaaacattcgagaaactccaaatcaatgttcgatctatccgttcaatttctgtaacttctagaatgatgaaagagtatcttttgaagctgatccagtgcgcacatcttccctttcttgttctcaagattatcaaccctcctcgaccaggaaagaagctcctcgtattggacctagactatacactcgtcgacactaagcctctcatttcaggctcgctccctccgctagaatgcgctcgaccgaatctacattcgttccttcaaagagtctaccaggcatacgatcttgtgatctggtcccaaacgagttggcgttggttagaaagcaagctgacagagctaggtatgctgggagatgaggcagagcggatgggattcagaatttgttgcacattagaccgaggttccatgtttaccgtctttggggaaaaagatggaaaagaatacaagcgtatgtctgagcgaaagatggattctagatttgatcatccgaagccgtcattgactaagtcttgactttgaaaattcattgttgtttgtttcccacagatgagtaagtctggagacagatctaatttacttttcgttgtatctgttctgaacattcgtaactatttttgcttcgtcattactcatgcttcagggtcaaaccgtgagttctatacacatacacagcaacaagagtttctcttatctctaagtactccattctttctggctctcttgacaaatccgacaaaacagtctagagcttctctatctccaatttccagagttttcaccggcaaacacgattcatatagacgatctcagtcgaaattttgcttgtaatcccagggaaggattgaagatcaaagcttataaatcagcagaagctgtggctgctgaggctgcgggagggtcgaatacatcgacgggagaggaacatggggagccgaggagaaagagggacaaagagttggacaggttgggtggttatgtacgtttgccacattttgatttctctcttcttccttctttcgttccgttttccttgacagtcaggtcgagagggaaatgatgtcggtgaaggttgatgctcttttctttcattacgtgattgggatgtactggacgtccgatagctcatggcgctctctagatcagacaactttagaagagatgtagaccacaacagggtattctatcttttctactttttcttcttcttctcgttatctatgttcttttggagagatggaccggtcatgttgacctactgatcctcttccattcattttgtgtatgtgtgtgtgtttgtgtcacgagtttaggattggccggcatacagaagacttgacaaacagaaacaacttccaccagacgggaacttccgttgagacggtttcctattcctacctgattcctttatttaattctgtttctcatgtcttgacaccgcaatgtatatataagcgttctggaagacgtttggagcaatgtattctaggtttggataatgctgagaatcggtttgctattgcatgaaacaaaatttctctttggctccattaaataaaggacccctaaaaaaacccaaaaactaccatctgggatctcagatgagacaacaacaagagaagaaacaggagtgcagcagtacagcaggtacagagagaggaaaacggatggagcgaaaaattagatctcgccaacagatttcagaccggtctccatccagactctgctccgttctcgatcagctatgtcctgcgcgctcgctctgaaaaaatgtttactttcgtttccattcgtcgattcatcagtcctgttcgttacaaggattttttcaaaatccaaaaccacaatttaggcatcatgattttagatggtatgaagggcaatgagggatataaggagaacgagagcataagataaagaaagcagcgaattagaagaaggacgaaccatcggacatgtttggcttctttgtcgaggataactttgacggtactccagctgaatctgacgagagaagggtatccaaatatcgggtggagagtttgacgaaggaatgatttggtcgttgggtcttttttccgcattattgcacaaaataaaacaatcaaattcaaataagaacgagatgcaatgataggtgaaaacaaaggtggatggaacaaaccagaggggtacccggaacccatagcaatctcttcgcccttccctacttcattctccgactcaaccgtcacctcgaccacgacgttctcctcttccttaccatcctcttcctcctcttcatcatcatcatcttctatagcggatcccttcttcttctttcctccctttcttacagctgcctttcgttttctacctacagttccatcaagtccagatgaagatgtagatgtcgcagtcagaggtgccgggttggatttgatcctgtatggaagattttcctctggatgaatccaatgggttatccatcgatctcttgtgatctgatgttgaaagaagatgtaagaaaatctttcagcaaaccaaagagcagagagaacaacaaagaagacatgaataaacagaccttggctgctatacttgcggcactgacgatcttgaagagagagtctgcctttggacaaactgtgaaagaaattgtcgggaagagcgcagaaagtttcgcctggtatggtccacatgcacctagcgcatcgacgtaacactgacaaacgggaaaggaacgagtaagcagaagcacgagaacacgaggcgtaaagaggagcatgaccaacttcagctagatcaattccttttcgcaagacatcacctataagccctatagtagcttcctccgcctgtttgttcaggttcacaggagctattcctcggagcatatctttggagatatcaccaggtgataaaacccgtgtagcgtaatgcaattcgtggtaccctccttcactatcctcgccgcctttgtcaaccgagggaggatcgttcgggttttggaaaagatcaaagagatagtctcgagtggaatgtgaaagaacttttgaatcatcgaacccaagcgtgtcgagggtagagacaaaggacaacggcgcataggcgcaagcgtataccataggacctgagcaagagaagagtgatctagtagtcagcgatcaaaaggccaaagggtctgatgtctgatgtctggtgtctctagattttctgcgcgcacctagaacaggacctcgacctgcttcatcgatacccatcacccatcgctctctctctcgtttagttcccttagtttgagtctcgctctcggctttggtgagttcggtgtccttctctgtgtctgtctcggaggatgaagtgaggaccgataaggtatctctctgatccggcaagtcatatttctgacgagtccatgtcgaaattggagaatgatatgtataagagaaatgcagaggtcgcacaggctggggctgaatcgggtcagtcatgttggaatggatgtatagtaggtctaacgagatacagaaattaagaggatagttcatttaatgctctacgcctcacgcgtcaactcttcaatcgaacgcgtctgggagacgcgtctaacatggtaacgactgacgtcatcagtctgtaacccacggtcacagcgttttcctcggctcccctatcgtcatcggtcgatgggagaagagatgagccagtcagacaaaagt

SEQ ID NO: 2909 - DNA, 20284 bp, Xanthophyllomyces dendrorhous
actatcatcaccctagaacttcattcgcaatctatcaaatctcataactatgtctaacaaggaagccactgatatctcttctgctgctggatccaagggtaagtggtttacttgtgtctgtagagaacatgcgttggtcgtccgaccaggtgctgatcttactggttgcctctcatttttcttttcatcttttggttgtctatacatcaattgaatttccttcctaattctctcatttgttgttcattctattgaaccaaacgcttcattaatcaggactcgaggctgccggtggagtcgccggagctttggagaaggagagacagtaccgaggagccaccgagggcgagggtggtgagtccatctccggacatatacacctacgaatcaagttatcatactgacattcaagctgattcggtcattcttccggatttctttcagagatgaaaggtcaggatgcgcacgctcaggaccacgatgtgactggagagcagggtagcggaaccggagctgccaactaggcggtttccttccctcattctgatttttaatgatcgatccattgtaatctcttattgtctcattgtagctgttaagatgcctatgcgtgtatcatgaatgctggcctttgatttgatctctccctatcgttattcctcttgatctcacacgatcacctttggggagccacaatatctactgcggaaagctagcaatgacatctgatgagtcaagcaccgcgagttcacgccgcacaacgtccgaaatcgttcatacctgtcgtcgtttcagtcaacagccactttgtcctacttggtttcctctgcctttccctttccattcataccatactattctctgcagtaccagtattagtaccagcaccagcatcaccatcactgtcgccaccttgactgccacgttagccaattacatcatccttaatcccgttcatcgagcctggacaatcattcttccacagacgattgctgccagaaccatatcaacattcaaatgcaatgaattacctttcatccctcccgtcatacttctcctcatttggtctaccttctttcccgactctgagcctacctcagaacattcaaaaacggttgtttgcatatctcctcaatagatcgataggtcatctcgttaaaggcggagaagttgacccagaaaggttgaccgctcaggtcagacagggcaaggtggagattgaagggttggaacttgacgaagaagtacgtccgttgtttctagtccaccatatccttgatcagtccgttatagctgatatgccaactttgggactgtatcaaatattctttgtgctgattatcacctcggtaggctatcaatcgattgattccactttctgtgccactggtgttggaatcaggttctctgggcacattagccgcacttatcccttggtccgcttcctccgccaaacccacttcagtaaacacagcagatccgtcttcaacaacagcttcctctccaacatccgggatatccatatcgctttcccatctacatctcaactttgtagttgcgtcccctgcttcttccacacctctatcgaaatctaaaacttcagcttctcaatcaaaaatagaatccgaaccgatcgatctgactcaaagcgtcataagcgtcaccgaagacttcttacagtctgagctgaatccccaggagtctagggatctggccaggagtttcgcaggggttcaagatgtatcgattgatctttcctccacaaccaagaacatcgatccgtttgccttggaagaaggcgaaggattacgggaggacgaggaagaggaggaagaagaggatggggacgaatggatgccccctggcgctatgccaggctccaattcaaaggccagagggggtggcaaaggaaagtctaaacttgcagcagacgtaagcgaagaaggaaccaagacctttctcaaaggcgttatcagcggcttagtaaagcgactgaaagtcgatgtgaaggatatcagagtcaggatcagatacgccgatatgccagaggacgactcggggatagaattcgagtttgcggtcggaggagtgagatatggtgaggaaggagagtccaactcgggacccttgggttcggcggctcaggagttgagagttagcggggtttctgtatctaccagacactcggaatcttctctcagaacatcggattctcactccgattcagccgtctctgcatcatcaccctttacgtcttctactgaatctgattcatcagaagatgaggatgacgaagaggtacatatgatgatgtccaaggcaacaatcgaccttcgacagagccacctgagcgaaaccatctttgctagtgcgcgagggggatctttctttgaatcgagcgcacagatcacaagagaacattcttcaaacgtcggagagaagaatgcaactttgtggggagagaagtgggaaagattgatatacgttggaggagataggaaagaagaagagcagaatggaggagatattgtgttctccatcagatctcaagagagagggggagaagggagcgcacggctttccgatactgggctatcgatcaaggtgaccatccctccagtttccatcctcttacttcctcttaccatacaatccatactctccatcacctctctcttccaagcccacgcgtcttctatatctccctcacctgcgcccacttcatcaccagcaccgtcttcatccatcaaagcccttgatatccatctctccgtccatcttcaaagtttctctacaggaatcgtccactctgccaaatcaccttcggaaagttcgagagccacattctgggcgtcgaacggaaaggcaggtttagatgtggattggctggagcttggaacggatgaaacggtcgtcgagtgggattcaagaagtttgtgactacgacccgtagccgggtctagtagtcgggcaaaaattagagccactgttcaagacgtgtatatgtgggaacatagggaggagaaagaaaatgaagagatcggcgataaataccaggggggaaggtatagcacgatctatccgattggagtggtcaacccggagctcgaaagagagtacaatgtgacgggactcggagggtttcctcagtttgcttttagaaacgaaaagacagcaggcgattacaactgggaagaatggaggagcaggagaaggggaggtagagggagaaaggcaattgttttacagcaaaagattgaggacggagctggttagtggtcctttctaagatcataacagtctcgctttcatctgttagtaggcactgatcaatcaatgtcttgataatctttggtatgaattgtccgtctttaggtttcgagttgaatcttcctccaattcatcttttctgcgatctctcgttaatggaacggctcataccatggcttgaccgtatttccgcctcttcttcgcctcaaccgacccgcgcttcttatcaacccaagcctgttcgaacatcccgtacacaaatgcccgcttacaagaaaccacttcgggtgatcgatgacttagaagcttcaaccgagctcaatctatccgaagaagtcgaaactgatcggcctccggctctgctagttcatatctctgttattcgcgtagaggccaagtgtccaacagcgtctactcattatccatcgacagacgctttcgacaaacaagaaaaacgaagggcgcggtcagggacattggttttggatcttcaccaagcgtccttgagcatgtttgcgtcccatccttctcttttgccttcatcaagctccgtaaaacaaaacgggtatcttcccagattccgcgctcatggctatgagcaacctaaacttgaaactccaccttgggtgaacgctgaatggacaaacctaaccttgttctttgcaggtgcttcggatgacaaggctagagcatttgtgattctgggaccattaagagcgggaaacgacggacttgacgaacccgagctatcaccagcaccggtggacgaagatgctttgttgcccagaatccaaattcggttggatgacttaccatcgaaccgatctggatctacggtcaaccatcgatctggaccgaatcaaggaagacgatccaatccaactccgatcgaacttgaaagaagggagaaaacaaaatcgatcggttttcggattccttcagtcaagatggacttgaagaagtcgacgatggatggcctgcagtactttgcagatgacctgaccaagtggtcagctgagactcttgcatccgtatcagcaaacgacgcagcgaaagaagagggtgtgtcggaaggggatgtcagattgatgggaagtaagttttccggaatgaaagttgttgaggaggaggacgaagactcggaggctcgtggttcgagagtcatggaagagaacgagggagatgtggggttgaaagttcagttggatgttttcgatggtgagcatgtgtggttcccttcctccaatacatcagttgagcccatgaacttacttcagatctacggtatgatgtccgaatctcaattacagtggatgtactgttgagtgttttacggtcaacccaattgcctcaacttcaaccagaccgaaagcttcggatctggggtgctgatttgagcgtcacagccgaagtttcttctgttgtcaaagtatgtaatgtcttcgttttgcttcggatccaaaacatataccgacaagattcccccttggttaaattttcagaaaaagacgttgatcaatatcaaaatcctggatgcgttgctagaggacatctcggaggtgatgaaaccagtcactatgttcgcgcgcacgaccaatcgaagcttggtatgtcgttttcaacatctgttgttcatcgatattatctcaaattaactttattcgcatgattttctgcgtgtgtgtggcttcttttccaatttaattgatcaaaggatcggctttcaaagccattgttgtctattcgagccatcaacacttcaaacctggactcatcttccaaagagacagatctgcagatcgtctcttccaactgtatattgtttgaaagcacagatatctcatggcttacggaactatcactcttcatcaaaccaccggaaggggtgagtcttctgtctttatatttgatcagctcacacttttctgaccttgtctcacgatctgtgtatcatataggcttttaccgatgtagaaccgactgacgtgattcgaataaaactcgagatggaagacacatctgttcatctacgagcgccatctcttccaggcgctctagttctgacatttggcaacgtcgcaatttctacgaaacttttgggagaatcttcgaaaaaaaccgtcgatgttgctggctcttcgatccggctgttcgtgatcgacgatgtcggaacttctgttattgaacgtgagggagacagttcccgaccaatcaatgctatgactcactggacggtgcgcacttttataattttcttactattcatctatgtagtcgactacataactgaggtctactctttcattgcgttcatcatatgtctcatcacaacttttccacctcagaaactggggtttgctcagatggctcatctctcgacgatcgagatcatcgtcgacatcgctgaagaccaccctcggatcaaagtgggttttttagattctgttttatgaatagagatagttagaggtttggttcacgaaccggttgccttcttggtcgcttgctgcttactttcaggtcgatgttcctatccttcgattgcaagttatgacttgtcctgactctattccaacaattggagctataattggagatatttccaacgggtttgccaggtaagttaaataaaatgtacatatgacatatgactcaagaccaaactcacaacacatacctgcctccaccagcaccgataagaacacattggaaacgaacccttctcctgccacaagtagcatcagttctagtcggccggatttactttgtaagatacttcatcacccagtgtcaggcagaggctcgtgtgatgatctcatatatgatttgaaataccacagcgagtattgatgacgaagcgttccgtcaaccaccctctctggtcgtcgatgcggactttatcaaagatgatttgcctcagaacgccgactatctacatacgtatcggccacctaccgagcctctcgaaccgttgtcatctttcgagacgattggaccaggtcttcccttcaaatcaggagtcatttcaaatatcgatggagagacgattcgtattctggatccaagaggtattcagatcgtcgaggattattggtcaaccttgttaacacagcaacgcgaggaggtagctgagacgtgagtacaatttccgtgaccgagaacacctaaatctcttattgatcacactgtttaaccttcattcgtcagaactgctattccaacattaaaattccgacttcgaaattgtgacgtgtccttttgtcttcacgatgggttcgattgggttcatactcgtaagacaattgagcatgaggttaaggttgttcgtcgtcgactggagaagattcggcagcttctcgcctctggtcaaactccggacgaaagcattgaacaggccgggactacactctttggatccatctatgtcggagcccctcagttctctactgactttgatgccagtggatatctgggggcgcttgcagacgatgatttattgcatctcgacctcaccgataccgcaagtcaggctacctcgttccaatctatcaaaggccgaccaagaggatcttcttcagcaccatccaaatctcgttcgaaaaaacccaagcttacccgatccaagcatgctaggatcgtaatcaatctacaacaagtcagggctgtggtcaagacttatgggttaggttccgaacttgcggctaacatccaagttacgatccaggatttggatgttctcgatcaaatcaaaacatcgacttggaaaaagtttttgacgggtatgcgatcggattctagggggaacactagagaagcggactcgcatatggtctctatcgagctgaaaaacgtcaggccactacctgacaacccctcggaggaaggccgtctcaaggtacgtcgatctattgcaacaggtgctttcgatatatgggtattgttcgactaacgtatcgcttggcttgcatacgttacaggcaaaaattctgcctttaaggctatacgtggaccaggatgctcttgactttctcaaacggttcttcgctttcaaggatacccgatactcttcttcagctcctcctgattcaaaggagacttactttcgtgagttcgctacgatcaatgactctgccttatcaaattgtcctaacataacctttttgtatcgtcttgaatagaacatgtcgagatcttccctgtagagcttaaactggactacaagccgaagagagtagattatagaggtctccgagaggggcgaacgattgaactcatgaacttctttcattttgatggagccgagatgacactgcgcaagattactctcaatggggtccgtcgccctctttttccacacagttctctacattattgttgctgaatcatgctgatggttgtctgtatggcttggtacaggtcactggatggccgcggatctttgataccctcaacgacttatggactccagatgtgaaagcgaatcaactagcagaggttatttctggagtcgcaccgattcgatcgctggtcaacgttggatccggtgtcgctgaccttattcttcttcctatcgagcaatacaaaaaggacgggcgtatcgtccgtggtgtccaaaaaggaaccacttcgttcgtcaaatcgaccgccatggaagctcttaaactcggagcgaagcttgctactggtacccaagtcattctcgagaaggctgaacacgtccttggtggcaaattcggtcaacccatcgaaacggagaccctgcaagacgatcctttacgtcattatagatcagagaatgggggcagtagcgatgaggaggctgatgaagtcagtcgatacgctaatcagcctgccgatgtatccgaaggtatctcgactgcctataaaagtcttagtcgaaatttcaattcggcagccgagacaattttggctgttcccatggaagtttacgaacggtcaggtactaatgtaagtgaaaggaatattttgtgctattcaatgtctgtgccttttgtactgaactcgatcccttcgatctctcgcttttttcagggacctgtacgtgccgttgtccgagcaattcctattgccgtcttgaagcccatgattggggctagcgaagctgtcagcaagactctcttcggacttcgcaacactcttgatcccaatgccattcaagaagcagaggataaatacaagtaattgcatcctttgttcttttaacttattcgctattttcgcgcactctttttttgtttcctatattttctctctttgtctgatttttacagtctcaacattgttgagctttcatagggtttatgtgctttaccctacattccctctttcctgtcatccactgtctttcactcattttttcaccaatcagttgtatcatccaatcacgcttctgccctaacgaccacaatgagtatctagttcatcgtttacgtatttgtttccccacagtccactactcagttttgcattcgtttccatcaaccagcactctggctctgcttgccatttacagtttcttttctcttcgcttcttcaagtttgagatgatttcttcgggatgtttgttgcgatgaatataaccatttatcgtttcgtaattcttagagtgtgaccgcattagtctggactgagagccggtcaagcttcgacgtgactgaagagattagttttgatctgttgacgagagaacaaaaacacatatttagaaaagcgctccacagagaaaggagtatggattgactgatacgagagcaagaaagaggaacattgacttactctgtagccaactcgtcttccaaccttgcaagctggtgtcgtccaagagctgcattcctacaaaacgaaagaacatcattttctcggttagtagaacagtcacttggtgccagccggaatgattcgtcgaccatgaatagaaggtaagagggcagatatcaaacaaactgtttttgcttcatttctttgtgttcgagagctcgagctcgcatctcctccaactgaggccgaaggacgttcaggtgattttcaatctgatattcaagtatgtgatatgaaagattaattcaagttagcaaaatcgatagcggtctgtcgataaaggaggagaagacacgcacggtagcgactctagatctcaaaccgccttcttcttcgcccaacgtctttccaccgacctcctcgttcagttgtctcagctctgcaaaccaagccttctccatatcggaaagcatcggctgatgacgatccatcaatccctgcaacgtcttatcgactcttgagatcaattctttctgaacattcctgaccctttcaactctagcctgaaggccctcctttgatccatgttttgatccaaatctcatcgaagctgtgagatcttcaatcttcatcactttatccatctgtctctcgagctctttgagttgaagatcgagtctggcctgaacagctgagccagcagagagaatttcacgggtagatgaccggaagctctggattgtcttgcctagatatcgaaggttatcaggtgtgatgctttccaatgtcttggtctgtccggacgggggaggcggtagagcaattcgtgctttgagcggaagtgaagatcgatcttcgagtatggtcgggacgacaaacggatcagttcgaaggtaggatgtataatgagacgaaggggatggaggagaagaggaagaaggtgtaggcgctccgagggcgagaggtacaagagcaggtgaggaaggcgtggcaactctgagagctagttcgagggccaccagttgtagtgacgatgttaaagtcagaagagagtaagacagatatacgtcgctgattatggcgaccgactggataggagccgacgttctggaaaggattcgcaaatatacaagaagaaattacagatgagcatcgtcctgaatttttcctctccctttccatttttccgttgatcagatatgattttgaaagtatcaaaacactcactggccatcctctgagaccgaatccactacgcagccgaccaaactaccgactcctcttccgacgaccctccctaattcgacttccctcttgtcctcatcctctagccctaatgccctacccaacggacccatccagctcttcataacgatacaatgcacaccaagcgcatggtgtacataaacggtgtcttcgtacaaggggtccacaaagaatgatggggatgttgctcggagggctgttcggagagatgaaggtagggatctaggagaaggaagcagagtgatggattcgtataccgataatgtagggtttgattcagaaataaccttaagggccgatgaaaggaggacggccgtcagttcaaccctagtttgtaatatatcaatctgttgacaatcatgagatgagcacgtaccgttttgcctccgctccatacaccttccatcttttctacctccagacagacatctactcttccatccttccacacgattcccaacacccctaaaacttcgcccttcttaccaatctcttcttcagcagtcccatcttcccccaacccgaccatgaacaaatccgtcgcacttcctgtcaagtcctcctccccctcctcgtcatcgatttctttcgggggcggatcaaacaagaatggaccttgcacggcggttcttttgagcgatcctttcatgtcctctagcttcacctcaacaggttccccggacgtctcttcgtcagatgcatcttcgatgtcggccgaagggatttgtcggatgagctggtcaatccactgtttttgggcgtggtaacgagcaagaaggatcggatctggtagaacagtcgttatggatgaagtagaagaagaaagtgatggcgaatgtaagaacgatagcttttgagcggtgacagttgacaacgagtagatgagcgatcgtggcaatcgacttgaaattgacagcattgaggcccagaaggcgttacgttaatcatcttattcaatgacttctaacgtttggagaaggtgcatacacaggcacaccaaaggatgagcactcacgcaacgctaggtaggaatgggcaaattccatagatgtctccattttccattagtccgtagatactgattgaaccccaatcgccctcgcccctaccgagcgcgaagctaaccgcctccctactcccgggttcttcggccgcccagtatcctgagtttctgcctgacttcttgtttaacatgggaggtagtagtgaaacaacctgttggggctcctctgcatctttcagaggatcgtactctcgcagctgaccgtccaaagtcaggagcagcaacgaagagagcgtggaggataagggatgccagagtgccttggtcaagggagatgacgatggcgaatgatgataactgcctatagggatagatctatcgatcgagttgtcataagagtaattagttgatttaccgttcttgttcatagatagagatatgaaagggtgccggagaaaccaagtatactacataccggcattcgaccgtcggagtgaccaagttgatgtatcctggtcggggaagaacaatgaccacaacctgacgagatcccagaactgcgagaagtttgccagtaggcgaagggacgagcgacgtgatctcaaagtttagattgggggttcgaagtgtctgcacaaacagatgaatcggattgttcgaaacattcagtaacagattcaagttcattttgaaaagacgaaagaatgaaagcaaagacagaccttgaatgaacctcttcctccgctcttgacctctcccaagctacacatcctgatctcatggtcgacggccactatcagatctcctcctctgacaaccatagtggaccgtttggcatgcttgcccagtcctcctgttgggttggctgctgtcgaagaggaggctacgccgaatgcttgagctggcgcggagggaagagtaaagatggaatgggaaggaagagcagtcgaaagccaagactctgtactcatcttggaatgggtgagagtgtgtgtatggatgtagatgtggatatgctatggctcgaccgataaaaacgagaggtttgatcagagacgagatgacggttgaaggcagactcagaaggaaacatactcaacaccatcagttcgttggacctcgtttacagatgagccctccccacttgacgatacatcatccactcgaacatctcacagagtacagaatcaatgcgcctgacgatcgttcgagtcagggattccttcttcttttcctggttggctcagtcgttggatctgtagcatggagctcaagggtacggtcgattcgtccatacgaccttcttgctttcgaccaacaagaggtcagcctttctttctgttctcactcgcttcatcttgttggtaaagatgatgggttgatacgacctcgtcttatctcattctcataaggtatctttttgaatctgatgaagcttcttttaaaacgaacgatacgtcaacaagcagatcattctacctatgggccttctcctgtttctctctgcagtcttcatcttgatctgtattatactcacacataagtctcttctatccggtaagtcttccttgtggtactcatctcttcgactttatgtctcgtgattgagtgttgtttgcttttcaaaaactgaatatcacgacagaatccataatgcccatacctaatctgggcatccttcttacctcgcgctcgcgttccctcctcgctccaactccaattgagaatgagcgcctgttcattcccatggaagacgtagagcatatagtgatcaatgaagccctatctagattctctgtgattggatttttagagattctaagaagaaaaggaagagagcatatcgttgtcttccctgtacgtactcccgctcccctctactcgctcactatcagaaccaggatcgtaggattttgaccatcgttctttccctgttcttctagacgctactgcctccaacaaaatccatcatcccaatctaccaagatctccaaatcattatttcatccaagtcctgagatctgtcatgttcatcgttctgtctggtgcgtgaatcatttgccaccatcctttcagaactccgccatactatatggcttccgcctattcagccaccgatgttccttcagcgtctttcgtgtacaatgccaagagcatggcgacaagggagaaagatattttatcaaatctatcgactgatgtaaagaagagggatactcggcgtgaggagcgcgcgcttattctacaataggaaatcggtgtggttgtatatcaagagactagtccaactgattttcagtatataaaaagatgaaagaaagataaaaacagatgaaaggagagaaatgtcaagaacaaaacttgacgtgaatcatattactgtgcgaaaaaaacgctcagaatcaacagttgctcagatagagatatcagcgttgattagtccggctgtcaaaagaagggatacagtccatcagaatctcccgtgtgatttagaatgagaatagtaggagataggcaagaggatttgaaatcagacgaaccctgagaagccaaagagtagaagatagagtccttctttgacaacaggttctccggtgtatcaaactctgcaacctgacctttgtccatgacgaggactctggtagaatgcataatagtatccaatcgatgagcaatggtgattgtagtcgtagctgcaaagtcagggcctcgaaggatctcctgtacagcagcatcggtctcaagatcgatctgaacaatcaaattcgtgaccaagaatcagtacgaatgcaaatggcactcataaaggagtagaaagacatacagcggaggtagcctcgtcctgagtcatcatgggcagggttatggataaaacgtcagattgaacctgtcccaaagtaaaaaaaattgaaaaggagaagcgtacaagaactaaaatcctgctctctacagatacaaatagtacaaggacgaagacacaggatgagtttaacatctatatatgaatacatttggagcagactgccaacaaacttacttcgaagcaatgcccgggcaaagcagatgagctgcttttgaccactggataggtttccacctccttcggtgacagttccgtcgagtcctccgttggcctcagcgtatactctaacatagatcagtgtatcagtcagatgcaccagtattgacaaggttatcctgagcggagaactcacttgagatgtgcgtggctcagtgcctcccaaattagcgtatcagtgtattggcctagaatgattaggagaatatcccaaatacaaggttgagagaatagcgatcagatcttcgtttttattctcagaaattgtagacatgattcagacgaaggcctaccaataggatcaatgttctctcgcaaagttccttcaaacagttgaggatcttttttttggcaagcgcacaaagtatgagtatctttactgtatcaaaactgggggatataactgaaaagacataccttgaggaatgatcgaaattttctatggaataaccatacacgatatgagaagagtatgaaaatcagatttcgatgtttcggactgaaaacagacaaacgaacgtacacttcgcaagtcatgtaaaccaattgtgccgatatcaactccatcgatgaagatacttccggcggtggcttcgataacctatcaaaataaattacagcgccgtatgtatctcagtacagttcatcacctaatcatcaggagagtaagaaaagacttactcggaacagagccaaagtcaaggatgactttccagcacccgttcgtccacagacaccgatttttctagaaattgtgtttgcaaaaatatatcataagaaactatcgttcagctataacgcacaagccaaatcagactcactctgcaggcttgatagaaatagaaacatcggagacacaagcgggtaaatcgggtcggtaccgagtagtataattgttgaactcgattgcgccctatttacaaaattcactcatgatttagtgtatactcgggcgtgctataggaacagcatgggacgcagacgaacctcttcgggccacgactctctgggagtggtctccgagatctcgtcaggtgcctcggcatccaaacgggtgtaattgatcatcactcgctcaacggaaacaatgtttgtctcaacctcactggcagatcgaacaacccaattgagcgaaccctgcagacaggtacgaaccaccgatcgacaggttaagttatgagtgcagatgaaaaaattaaacgatgctgataggagacttaccgttacagagaccgcgtaagacatcattagacccacgagaccagcgtcaacgttacgagagactattaaggcaaccacagagaccaaagcagccgccaacatgattaacgatcccaaaaactccagtcgtacagccaaccatctgatacggatttcggaaattgaatgtcagttgtgaagatagtgattgatgggaaaaaatatgcaaacgtaccgattgaccgacacagaaggtagataacaagcgttgtttcggtcgaggaatctgttcagacgataaaagcaagtagcaatgagtaccgatgtgaaataatacacttgagtcgatagaccacatggacctacgcttcgttatgagcagagaatcgagcggtttgggaataagctcggatggaactgagtccacttagagtttcaccgaaccaactaaagatcggcgctcgggacgtagagtctaatctcttcagctctcttgatgaagcaagatagtatcgcataatctttcggtagatgaagaagattgggatcacaccgatgagaatagaaggagctccaagaccgatgacaaacagaacaccgccaacactggctaaagttcggaaaaatccagaaaacgttcgaatcaagacttcgtcctatcacagttcaaacaaaacacaactcgatcaggactcgatcaggactttctgtctgaaaagcagagacgtacgataacatagatatctcttgagaaaacattaagaattcgaccctgaggagttctttcgaagaaactcataggacttctcatcaaagcgcggaaagcatcatcatgaagcttctttgagcaacgaacagcacagaaagtccctgtttcgcaacgaataaccaaatcagtcagttacggaaacaaaaaaccgtcctccatcagatgttgtagaagtctcacaaagcagaagggaggaaatcatgttcagtactgaagcggaagcaccagccagtccgtagaagaacagatagagtccgatggaagctatatgcaacaacagggcaagatcagttgaaccgcactctaggtatatatccgttttttaacattttacgtactagttcgatgttcgacaagattggcttcaccccagttccgcaaaattctgagaaatcgaggaaaatcaaaccattctttagttagctgcgctgaataaagcgcccatgatgaatacccatgactcacaaattactggcgatctgacttccctgagctgcaaacgtagcaaacaagaatgcgcatactccaacaaagctagccgaagagatatatcctttgtatactgaagagctgacttgaccacgctccatagcttccttaggcttagtcgaatccttcatgcgccggatggcctgggtcttgctctccttagcggatctgagtggaaagagaaaaaataagataaggatatgtaagccggaggtgaattattccaatgtgatcaccgagcctgaaaaatacttgcaagaggaccgcgttatcatcattcaagctcatcttggtctccagcttgtcggtcagagattcagtatcaaccatcgtggagccatcggagctgtctgctttgggagtcccaggcgccgagttaggagctgattgttttccgagggtgttgatgagattgaacaaagcggagtttcgctcctccataacctgcagagtgaagctgttatcaacatcttacagcaaccaagtgtgtcgaacaagaatgacttacctgatcataagtatcttgctccaaaacctcaccgcctctcaacatcaaaagtcgatcagtctttgccaagaacgcaacagagttggtgcacaggactcgagctcggtctttgagcaagcccttggggcctaaaacatgctcaaatagatctgcaaatagtcgagcatgataatcagtaaatcgttcatgtatgccggcgatagtgatgagaaacctatgaacttacgagcagcgacatctgaaaaaggtcgcagcaattagtcatcatcaatccagagtgattacagtcgcatatcttgaaaaaagtttccgaagcactcacggttgtcgacagcgcaaagaggatcatcaagaaggtagatatcagctcgcgcgtaaacagcacgggccaaggcaattctcgctttctgtcctccagatagagagactaacagagagaagatgaaaggatatttgacatcaggaaccaaaggtaacaacatgaacaaaaacaaaaacaaaacgaagtctttcaacatacctcctttctctcctacttccgtttggtctcccaagggaagaattgctaaatcaggaggaagcgcacaagcgtctagaactaattgatagaatttaggatctataatagaggcatacctatatgttagtaaacaagccttgatctaagacaatcaacaaacatgtagatgtagaagataaagtaccataggcgtgtccaaataggatgttatccttgacggtggcagagaggacccaagattgttgagagaagtaagcgatcgatcctcggacagtgacctgtccttctcgtcttgtcatttctcccaacgctgctgatagcaagctcgactagatcggaaaccaagaagggagactatatcgtcaaaccagataccaacggaccaagaagaagaagaagaatagacaaacctttccatcgccgactcgccccaatacagcgacaagttcaccctttcgggccacaaagtctactttcttcagagttgacgactcagcattcttgttccatgtgaatgtcccgtttgtgatctcaaccaacgagtcgcccttttgatactctgatggggatttaggaagtagaactgttcggctgtctttctgaagctcttcagcgtctaagaagtccacgagtcgactttcagacacaagcgcctcgatgatggatgagatgatcatagacaacatggccagtgctgttttgaaccggatcagagatatgctcatgagtcagttcaatagcgcatcaaacaccttctgtgtacactcttcactttctgttctttcaaatgtataaaaaatcgagaacatgatactcacggaattgaagcaaaccaaagagcgaaatagccgggaaaatcacatcactcgtcaagggtttcttactcgttaacgaatatgacgagaaggtggcgaacgccacgaggaagggggtagatgcccagaaaaagttgctgaatgcgttgacaataccaatccttctaatcatgacgagttccaagttgtttcggacgtccaagaccttttcagagaaagatttttccctataaaacaaaaagtgtaggaagaattttaaagcacagaaaccgtcagaatggatgcttgattgaaacttgaacataacaaactaaccaagcatagagtttgatagatttgatgtttgataataattcattcatcaatctcgtccttttatccttgatcttcatctgcttgacctgaagcttcttttgatatctgttcgatcacgcaccgttcggtcagttatgtgataagcttattaagcttgataccgagacctttttcagttgggacaataatacatacctagcaatcatcgcgttcagaggcagagaaactaccatgacagccacaccgcagaaagcagaccatcccagcaaactatacaaagattgacgctcacatgttaaaaccgagcctattcaaacgcgttgatcactcgaatataaacactcacttgtaaagcgacacaaacgccaagataatctgcaagggtccagagaagaccatctgtccactgtcaatgaagagatgtcgatgaaattcagcataccattaacaattatgagcaaagtgaaataaaaaataaaatcaaaaacgctgactattgcatcagatcagcgagacgcatagcatcaaccgactgatgattccataacagtgttgagtagtatgaacacaatggccagttaggacagaggtcgaaagcagaagagaaagggagtttgctacacgagcgtacctgcaagttaacgatgtctcctccagccctgccaaccttttctccattgctcagaacgagtgctttcctatagatcaaccagacgattccagtcttgactcgcatacccgtagtgaacgctctgtcaaagtattgatgcaacaagcaggtctggatgacagccgctaggaacatcgtcaaagagatggcgattccttgaatggcaggagcaggcgtcgaagtttgatacgtagcaacgtactgagacccacagcatttacgcgattgtgttagtgtgcagatctctcgtatgaaaacaataatcacacgccgcgctattgggagagaagcataactaacccgaagaagcaatctcaaaagctgaggctgggtgaatgacaagaggtcgtttaagattttcaagacagtcgcagtgaggtaaggccctccgtatgattttgcgagtacaacaaacaaagacggatgtttggccttttgaccttcgacctgtttgacgggatgttgagcatgatgcttaacccgagcggcctcccagtttttatataacttctctccgagaacatcggccttatcgtttggatccactgttgcagatgatagacgattatttgcggtagccatagccagaaagagagatggat

SEQ ID NO: 2910 - DNA, 11804 bp, Xanthophyllomyces dendrorhous
aggtatagattcacacagcccatgtcacgctttgctcaacgccacatgtttagatgtgagctggcatctgttgatctttcatctcgttttctagaagaaaaagataaaaccttgcatctccatcacctcgaccattctcgtcttgcctttctttactctcttcctatctcacgttcatcgtaaagaatcatgaagactgtttctacgcttgctatcttgtccggtgtggccactctttcatcccaggtggctgctgagcctgttgagtttcaggtgggtgttgacttcgttgttcaacataaagattatacagtgaaagcagttgagatgaattgtcaaaaatctcacaaacgcttcgtctcttgtttataggcctctacgatcaaggctccttttgttgagcagttcactcctgagtgagtaccgaaccaaacatagtccgaaagcaatcatctcgtcctcgatctgaccacggtgctgtctttgttctctcttgttttcagctggcggtcccgatggtccccgtctcacgccacaaaaaagtctcctgtaggctctggtgagacgttctcctacgttggaacctggtcggtcgagcctccctcagtttacccaggaatccctggtgacgatggtttggtcgttaagtccaaggccgcccaccatgcaatctcagccccgatcgagggtggaatcaaggtcgaagagggaaagcctttggttgttcaatatgaaaccaagttgcagaaaggattggagtgtggaggagcttacgtcaagcttctctcgttgggaggagagcaggagggtgcagagttttctgacaaggcaagtctttgttgttctcacactcattactcgtcaagaagctcgaagcaagtactaaccagtacagctattgtctttatactcacgaacagactccattctctatcatgtatgattcttggttatgatcttatacttggttgtgttacccaactaacttgatcttgttacttcatcaggttcggacctgacaagtgtggtgccaccaacaaggttcacttcatcttccgacacaagaacccggtgacgggcgagtttgaggagaagcacctcaaggccacccctccccccaagatcaccaaaaccaccgctctctacactttgatcgttaagtaagcaaccaaagagaatttgtctcaggattacaaaagtcgtatactgattcttcttacctctggtacagccctgacaacactttcgagatcaagattaatgacgaaaccctgactactggatctctcttggaggactttgagcctgctgtgaaccctcctcgagaaattgacgatcctgaggatgtgaagcccgaggattgggtggacgaagccatgatcaccgactctgatgctaccaagcccgatgattgggacgagagcgccccggcattgatcactgatgaggaggcaaccatgccggaaggatggttaatcgatgagcctgatttcattccggatcctgaggccgtgattcccgaggagtgggacgaggaggaagatggtaagtggttattccattcaaaccctgaaaacaaaaatcacaaccttttatcagatatactgactggcccttcgtttacttgtgttttgacaggtgattggatcgcacctcttgtgtccaaccccgcttgtgaggaggcccctggatgtggtccgtggaccgctcctcagattcctaacccagattacaagggactctggtctgctccgttgatcgcaaacccggcttacaagggtgtctgggctcctagaaagatcgcgaacccgtccttctttgaggacaacgagcctgccaagggattggagaccatcggtggtgttggtttcgaggtctggacgatgaccgaggacatgctatttgataacatttacatcggacactccgtggctgatgccaaagctttcgcggacgagaccttccacatcaagtaccctattgagactgccgcggagactgccgctttggacgaggatgtcgaggataaggctgttgcccgaaccggactgagcaaagtcactggcgtcatccaggacaggatcgattttgttcgagacacctggcctgaattctttgaggaagccgtcaaggattggaggagcgctatcaagacataccccgagtttttggccaccgtcgtcctttctgccctcaccatccttgcaacccttgccactttgttttcgtccctctttggaggagctcccacgacgatccagtcggcgcccaagacaaagaaggttgctgtcgtgcctgctactgaggtcgagcccccgattgtcggtgtggaagtcactgcatccggagtagagcgacgagaggaagagctaaagcagaggaagggcaagggacgagagctctaaatgaccgaattggccttgcccatgatctgatcctgctttctctcccctttttgacgtctttgttgtgtttatgttttcatgttttcaagttttcgatcaaaatatatcttgtgcttggaccgtcttgccgtttctttgctctccatatgacgcgttgttcgtgtttctcttgatcatttcctttcgtttcttttgtccttattttgggagatcgggcctctgtcctctttatttttctctttttacccttacaattctcccttcctcccagtagcttatcatgtgaatgaagatgagaatgcttgataaaagttgtgtgaatggtctgatgtcatgtgtgaaacaaggagaaaacatactagggactatgcggcgggcaggttccggaactgattgcccgcttgtttttttttgccaacgtttctttttcttttcatcccattctctagttcagttcatctcttcaatcgtgtagccggtcctctttgcttttcaacctttgctctctttcattctttttttttcttcctcttctacccctttcctttctttctctcttatagaaacgatagcctgctatttgtgtcacattaatctaaatagatctgcacaatataccggtaagtgttttccttcaagcaactactctgtaccctcggtctgctcgcatgtggcacaaaaggggtattccatactctggtcaatgtgccatgcttgttgcaggaatgcactccaaggctttttagcaaggacatcgcaccatacacactcgcctgtaggttggacacgcagccttgtgcccaggaatgagatcaggcaagggggagcaatgtgggaatgaattgattagcttgcgtttttgagactgagctgatcgattcggcggccgatcaaaccgatcgagtgtatctcggtgtgtctgtgtgtgaagggtctgatcactgacttttccttcctcctcttcttttctctgtgtgtgtgtgtgtgtgtgtgtgtgtgtgtgtatgtcggcacatatgcttatctgtgtgtctatgtatatgtgtctggttgtatccatggtgaaccaaacagggacaaaatagaagatttggattgttggtctctgttcaacttctaggcatcatccatcgaccttcgcatccacaatcgtgattccggatacctcgaggcatgttcccagcacttcttctggttgaaaattagttcagtctccaaacgcttccttctcactaaccatcgtccttgcccttgctgtctcctgtctctcgcttcctctcctccttccttctcccttcttccctcttttcatccttcccctgaaacacagctagatctttgattgtgttccttctccgttcctgacatcctctcgatgggtctatttttcaagaggcgtaatcaacctacgtcctcgctgaacaaggacgcgagtctctctaccagcactggtcatagcaacacaaacaccggcaacgctacgcaggtatcgacttcatcagcggtgtaccttcacccgttaccaccgccgccatcatcgatctctacccgatcctctttttcgggcagtccgtcgtcgtcgtccttctcccccttgccttcacctcgagggcccctgaattcaatcccattggacggtcctacagaggttctccgatcagcgtcatacgcccagtttacttcacactcatccttgtcggtgaacgaacaccagaacggattgagtgatgactctcgtgaaaaagaacctgcatatacccaaccatctcctgtgcattcaacatttgtgctacctgatctttccctctcgcctccaaagttggctccgttcaggttgtcaagaagctcgctctacgtggacgacagtcagagttcgttctttggagaaggacggtcgccgaatgaaggctcgacctcgttgggacttcaggtggatatgaatcagaccgaacgtgttgtggttgaacctgaacggagagtggacgggcggttggataagagaaagtcgttcgatgtgacatcgagaccaaggtacgagtgagtgcatacgttctatgatttttgtaatcgaaaactcttggatcaacacactgacatgcatacgtatagaattaatccgccgccggtgagcgcgccgataccctctgttacccctcgaacacctcttggccctcctaccacttcatctctatcattgagtccaccacgaagccatcctcctctccgaacgaccccttccttcccgcttccagctcgaccaatatctcagagtcagccgatgctaacccagcgatcgtcgacccctatacttcgattgcacgtcccttcgtcgccttgtcaagaggacgaagatactcctgtctcgggaccttcagcgtcaacaacatcggtcctacaaggcaataaactgaacggccgtcgtcggtttttcggaatgttcggcgaggggaacactggtaaagaaggctctgtcaaccgtctcgcagaccctccttcgactcggttcgaagatcttactgctcagactgttccgagctcatctcctgtaaatactacctcaaaaattgcgccctctggaaccacagttgctatcccccgaccgttaccagctcagccggccccaccacgaccatcaacatcattcttcggttaccctctgaaactgggacattcctcaaagccatccgcttcagcagccgctgaggatggacgaccgccaagccccgcagaatcctttaaggttatctctgctaggaggattactacaccggacgatgtgaccaaccacttgtcgtcgtcatactttccgagcacaaacatactgacgccacctgtatcggcagtctcgccagggccgggaacttcccttccgcccacgtctgctacttatccggggctcaggatagaacaacccggaagtcagttaaggaccaagtcaaacgagtggtctagggccagaaaaagtagttacaactcagtcttcatgccggatgatgaggaaggagaggaggaggaggaggaaccgatggaggttgttggagaacgaaaagtctctgtgggcatctttagacgaagaagaagttcaatggggttggaagatctagcgagaggtactatcgaaccgagtgagaagatcgaggagcccgataaaagaaagaacggcctgccgaacgtcgggtcaaatgctgggggtgaaagcaatgatgatgatgaccgaccattggggctgatcagaaaatccgtcgcggatttctcagaaattagtgccccgatcccgagggccaacgctacgcgaaaggatggcttcatcgtcgcctccagagaacgaaggcagagcacgttcacagccgacgaatcggacggtccacctactcctgcgccttcctctacacccgtcccggtatccgctccctcaacgtcgataaacccccgtttcccaccttccatgaccctctctgctccttcggctgtagttcctctcccaaaatttgcagatgattggacgcaatctccatctggaattgatcatcccggaacttcgttcttcagaccgtccaggtcagtctccccttaccggcctctaccgtcgccaaagtccgagtcatcttctccaggtcgaccttcgacgaacgcaatacccagacggtcgagtcctttccaaccgcctttgcccgtagaaagtatgtctattggcaactcaccaaaagaactatcgaaattccaagggccatacagcgtatccaaaccggccgctcctctttctaacaaaaacgcgcgtaggtcgtctgcttccactgtagactcggaaaccgagtcggagagcgacagcccaaacgaggaggccgagttgtcgtcggcggatgctcatcattattcaaccgctcgaaaatcggtacctgctcttgcctcacccgggcgcaacgttaagaattcaagctccacggctaacttgtcgagagtacttcctgcccgagctaaatcgcctgcaacgtctatgctttcatctcgtccgaatgtctcaggccgattcacccctaaaccactagtgtctctcccggataacatgacaaagccacagttggacagagaacgctcacttgctactcgaagggcttcaggtggggatatcgatagatcaatcgatgcaagggacactctgcgacctcctacgtttaaacctgttcctgcgcgccgagggagcgagtccgtattaacaacatcggccaatagattgtctgcaatggagatcgatgaggatagcgatgggtacgggcacgacgatgatgttgtggctggccaacgtttcaagaaaagctttttgatcacgaaacctggagcagtcgttgttaatggtggggaaaatgtagagtcggcttccaaacctatatcggggctcaagaaggacaacaaagcaaagaaagtatctgcagaggtggagagcgattcggatgacaatactccgttgggaatggtctcccgtaagcttcctaccaagccgacaccaggtcctgtcccttccgccagcaaattgtcgctcaatgtgattgcttctacgcctcaagccgaaggttctgctcggtcagccggaacttccacgaccaccactactcctaccatcaagaacggatcaaaatcaaagttgacatcaacctcaacgtctagctcgaacgattcgttatcttcccactcgtcccagccctcggcctcatctgcactgaacttgtctgggagagtaacgaccagtaccactgctcaaccaaaatcaattcttcggaaaccgtcgacttccacaatatatattgccaacaatgaccagaagatcgcacaatatcgaggatctcaatacgacgttccagttctcaatcaagccaagccgccctcatcctctttgtctacttctccttcagctaatcaattcactcccagatcgcccaacaacactgagtattcctctcagggatcggccgtccttggaaacccaccccggccggcgtttcacaattcctctcaccagatgacttcttcgccctcatcctcatgcgcgtccgggataacgactggggattctagctccggtcaaatgccgatgactccgaaagaagtgtcattggacgacatacagaaaagtcggcatattaaagaggttggaagtgttaaagaactgggattgggaaaatctggtctgggagagggcgaaagtttggatgagaatgagattcagaagagaaggaatgagagaaggcggaatgaagcgagaaacgctatcaaggtacgttctattcacttttcatcgttccaagtgtgggattagttctaagtctatttgtttcatattctcccttatgatatctttctggcaatgtagctcggacagattgttaacggtacccagccgatcgaggaaacagacgatgatgatatgaccagtcgttatgctcccgttgatcgttccgcttggggaggtaatatgatgcaccatcctccctttccgatgtacccccctcaaggattttatccatctatgcctatgatgaatggggatccgatgatggcattccaaatgcaaatgtccatgcaggctcagcaggctcagatggctatgcagatggcgatggctcagatgccggggcagcaaggagaccctcacatgcagtaccaggcgatggttcgttctctccactttcgttgatccgtttgtcgccctctttctgacttgtgtgtgcttctacagatgatggccaaacagcagttccaaagcatgatggcagcacaagccagtcagctcgcagctgatcaatgggagacgatgagcatgcatatgggaggtgccgcttccgagatcggagggcccacatcttctttgcccagaaactcgatgcgaccgatgggcatgggtgtgcctttcggcgatagtgtctatggtgggggttatagctcgtctgcttatggtggagaagactcgcatcgacggggtagtgcatctgcaataggaggtggaggacctgcgatgtctggtgggaccgctggaggacattggtctgggtctagatctgaatacggagattcttccagacgaagtcgaagtccaactcttgtacaggaaggctcggccatgaggacgtcatcctacgacataaatctatcagttccttcggctcagcctcgatcgcgccgaccatctggctccggtgtggctcggttggttgatcagattccctctcaaccttacgctcctccgtcctcttccgtttcttcatcttcttttgcgcctgcgcatcgacctataccgggtcaacgacagagttcttcttcaaactctcaatacggacaaccaccggatcgatctggcatcttgggcgaatcaaaacaacctcgagcttctttgcctgatccatctcaccagcagcagcggtcagctaaacaccgaacaagcagtggttattcgctctcgatggaacctccaatggctccatttgcgaaggaggaaatgcgaagtaggtctccgggccgagttagtccgagaagtggttcgccggctggtcggaacccacccacatcttggagaggccctccaacttgattttatttacaactttcattctttcaagttttttctctttttttttccttcattctcgcccttgcgtcagacatcttttcagttttgcacatgacaacttgtcttttcgcaaaaggcctagtctcttctatacatcttgtttcaaacaccatattgcattgttcactcctttcttacgttctcatcattcctgttcatctgctttcgttttctttctttcctgcgcgatgcatcaccacggacttttctctatttttctgcttgtagaccctcattccacattcactctcattcgttcagccgttggacggttacctcaaagcatgcctctctttccgtttctttttctctttgttttctgcatatggatactctcttggttaccaattgttccccttctctccttttgtatacgttctttgctttgtctctatttcatcgtttaatcaatcttttttgattttgtcttaccatttaggtctctattcattctcttaggaaggaagaaacaatcacaacactcggcaacgagagaaagaaacatgtatattcctcctcggactaaaaactcgaaataccttctgtttctaaggaccgattcccatctgtttgtctatatatcacgaccgaaacctggcattagtcttgtgctctcgtctaaaaaacttcctcaagtgagaagagaagaggaggctgaccgtttgtgcttgagagagatttgcgatactttactcgacaccttgtcttttgcccatcgggcggatcttaaagctttgtattgatatttgccttcgtgctgtttccgtgacattcagggtcaatcaaggaagagaaggagttgttagcgagcaaagtcgcgatgaagatggcgatgataaggaggaaggatcggaatggaagaaggttggggaaacgtactgttattcttttgtttgaacttttactatagatgagagttttcaatcggccccagcccaagtcgagaacacacaaaggtcaaaggttaatgaaacccacacacacagatatgaaatgaatgagaggaagaaatgggaggcgtacgagctggtgccatcgtaaaaatcttcttcctcttcttcctcttccttcttcccgccttcgccttcaacgctagttcggccatctgcggcgcctagtgcattttgttctatatcatttgtgcctatgtctatacctacacctgaaagcgagcgatttgagatgtaagaagacctgtgatctctttggaacccgtttatcggcgttgtgttcgcccctgatatctcgtctgctctggtgggttgtacggagccggattggctcttttggctgatacgactgtctaaacgctcgaggggttcgacctccatcagttgatggcttggcatatccgatgtcgatcggagaacatgctgttttataccaagtagggttgtcgcttgtttggctataagagtttaaaaaaattaaaaaaaaataaaaaaaaaacgtcttcgataagtatagagtagatgaagaggtgtgaggacaattgggcttgccttcatgtacgaggttgagcgatcggtctttctttagtaaatgctgatgcgccttgatttaccaaaccccattcagattgattctgtcagtggtttgaaaccaatcgatcggcatctcttcataaggactttacctttcccagcccaggtctcaatgatatacctagaaggattacgccgatctccttggccctgttcgtctcgtttctggcatctttactgaatgcccagagaatagcttctgctgggtcggatgttgcaaatatcgggatggcaacgttcataaggacaccatcaggtacgtctacaagtctcaatacaccgataccctagcaggtagtgcgaaagatatgttcagctgaagatcacatcgaacctcttaagacaagtcgacggttgagaaaagggtagaagaacctagacgtacccaagtagtcgtttttcgttttattgatccttgcttgtttgagaatctgatgatcattgaggtcgagagtctgtagcagaccgccaacagaagcggtggttgttggatctcccaggcatacgttcccgaggctatcgcagaatttgcactacccgatctccgccgcgactcgttcgcgttcgtagattcggaagctgctgaggaggaggtagcgtaggggtcgctagagattgttttggagtctgattcagtatcgatcgttaccgaggacgaagcgatgtgttctgaagggacgtttgacaagtcgattgctttaactgaatgtatttccgcagagactatatcaaacccgctgattcctttagggaggctgatgtcaatgggtttccatagtagtgaaagacgtctatttggggaaagaatggaaaagacgtgatcaggtgaatccgtcaacgtgagtaatatatgcatgttcaactcttacaggacaccccatccaatacctccagcctagacaaagacagaacattgtcgattatagcagcgtattaagtctctacacatttcaccctgaaagcaagagagaaaagtacatactagaggataccacctataaaaaccaagcgaaaatagaatgcattagaacaagttttgaaccagcatcatagaaggacgttacacacctcgtgacttcagatttgtttccgaacacatcgcccagagttgaaagatcaattatccctaaagagaattcgatcaagaacaccgaggttagaccactcgatcaacaggaacgtcgttcgtgggtattcagaagaaacccctctctcaccaagaatagggtcatgttc

SEQ ID NO: 2911 - DNA, 3468 bp, Xanthophyllomyces dendrorhous
gtttcggactgggtctgttgaaccttggcggcttcgatctgttcctgatgaatatgtttctccttggcttccaggtgaacgatatacagagcaaacgagacaaagctcaggatgatccatggagatagttggcagtatgctagaaaggctagaaaggaggagaacaatatatgaggtatggtgaggttgagatgagtgaacgtagagtagcccatccttttcctttgtagattccagggccaggtagatggaagtgtgtgagcaactgatcggaactgtccaagcttatgaggtgtctgatctccttcttcccataagcatctctgtgtcttccgatcgacctgtacggaactctattggatgtcaaatggattcggttgatgttggtggctatccgttttggtgccttgagggattaacggctccggccggcagggcaaccctaacacagtgacgtcagcattgctgcgcaaggatacttaggcaagcggggctcgatcggatatttgatatctgtgtattcatctatttgtggccacccatctccgtccctccatttggccatctcatgatagccagctcacattgctggcagcgtacacgtatacatacacatacacacacacacacactctcacctacctacatctatcaaagatgcctaggctgatcagatcactcgtggtgctcggcctgacgttcatctcggtcgtccaggcagggacgttccaaaaaccggtggtggagattgggatcaaggatttcaaagacaaagttctcaaaccagatgttagaacaaacctacctctcttgtgttttgtcctcgacagtttccttactgatccttcgtatcctcctttttctgcttacacatcgcacttagagaccttctatggtggtgttctacgcgccctggtgcggacactgtaaaagccttgctccagagtatcaagccgccgctcgaggactcgacccgctcattccgttctatgctgtcaactgtgaagaagcggcgaacaagccgttgtgtggccaataccaagttcagggattccctaccatcaagagtttctccagaggtcaccgatctccaccaaaggactacacaatggagaggaagaaaggaccgttgggaggttacgctggtaatttggtcaccgacaaagtcaaaaagcttagagttccgaacaagggtggtgtaggcgcgaccgaaggactcaacgaggtccagggttttatgaacatggttcgtcgtccctcgttctttccttcttcgcctctcctgagtttccgcatcaacttatacgtgctcttgttgtatatatatacgtatatatatataatttaacttgaaaccccttaggaggacaccaagcctcatgcgctcctcatccacccggtttctgcaacaattcctctcatgtggaaagttctctctcaggtacatgctggaactagcttcgggtacatccgggatgccgatggtgagctcaaaaaggcgctcggtctatctgcaagcgagggagatgataaaaagccaaagattcttctctgggagaagggtggtagctctacagaaggctggaaactctacgaaggtctgtttccttcttttcctttcgctgattctgttgtccctcttcctaggaaaaaaaagaaaaaaaggaagaaacaacgactgggaaaaaccactagattgagtgttgttccgacttaagaaagattcgtttaaaatccgtttgacaggcctgatgaagtacgatcacctctccgcccatttccttggcacgtctcctcctccctcatcttcctcttcctcttcatcaacccgatcctccccctccgtatctgcgtcatcttccgagcctgcgtcatctcctccaccgaatgcgatcaacctgagacgagcagaagaacgcgcaaaggcagaagcgaaatgggctgccgaagaagcgaaggacgcagctcgacgagctaagcttgaagcaaagaaactcgcggccaaactcgccagagaagccgaagagatcttcagccctgaaccgactcctgaagcggacggagatagaccgacgggaacaaagccggagaaaccggtcgtaccagaagtccctgcgagaccgagtgcgattgtcgatgaagactcacaacctgccgccgagcctcaagccgctcggtctccttctccttcttcttctgaaaaggcacatgtcgctgatgctgatgtgaatgctaccgctgccgccgctccggaagaaacgaacgatcgaaagattctcgactctgcccaagaatcgcccgctcttgtggtcgatgaaccgataggaggttctcacgaggaggtcatacccgaattcaaagtcgacgacggaacagtcgacgttcctccgatctccgaggagagaaaacgggacgaactataaggacgaaaagtaggttgagaacgagaaaaagagaagaaggaaaggtaaaacatatagcgtgtcgatctttcttttcgatcagatgttgttttgccaaaactcttgttttgtttctacaccaaacgcattgccactggtttagctactcagtcagccagtcgattagtacatgagaagtatcttggaaaagatgttactcttaagaggagatgaacaatcaatgggttttggaaaatagaaaatcgacatgatacatagatccagatctcccattgaaataaaagggggtgcgtggtttttttttggtcttttctcgattgtgtaattgcctctccaagaactgtccaaagaactaatcttcgaagcatggaaacgacttgatttgggaaggggaacaaacgcgcatgacagatttgaacatatgggtggagacgacgggggatgaaaacaaccatttagaaagagatggcggctcctgagaaagcacaagtacagaggagaaagaaaacgagcagaagaaaaacagtccaacacgatatatgataatgcatccaaagaaaagaaaacaccaccgatagaaacaacatccgaaccaaaaaggaaacaagtacgttaggaacataagaagtgaaccagagaatatatggacaaaagacgaacccttggtcttcttgtctcctccaagctcgaagtgcttgcatcgcttgagggtcatctgcatcttgtactctgcggaaaaaaagagagaacaccgaagtaagatgtctgtttatgatgtctgtagttgaagttttggttggaaggaagaacgaactgcagacggagcactctgtttgaagaaaaaaacgacagaggagcataatcatcaaaagtctgcatacacaagaagaattcaaaataaacaaaaacgtacccaatcgaaggacgaccttcttggtggtcttagccttcttgtggaaaacgggcttggtctgacctccgtaaccggactgctttcggtcgtatcgtcgctttccctgggcgaagatggagtcctttcccttct

SEQ ID NO: 2912 - DNA, 32319 bp, Xanthophyllomyces dendrorhous
atatgtaccttgtgagggctaaatacaggtgtacaatcaaatttcacaggtaagtcacttgtttcaaaacggacgcgttgtccagtcgttgacaatataccatgaaagagtggagaggatgagcgacttacgtgtgcttcttgcaagccttacccttgcagtaggttcctatgaaagataataaatcaagccgtgtaagcttttccatacgtacaactttcggatcctcgaatccaggccggagattcccttccaaggcgagccatatcgtccagtttgtcttgatcccactatgatcaaacaaatcccgacttcttctgatgagtcctccgccacgtgatccccaagttccttgaccggctaagtcttccaaatctgtccatcgactctttcccttgaaactgtcacgtttatccacaaactctttcgatgcactggaatatttgtcgtctgaagagttgttgaaattgctataactcacgtcgagtcttgggaacgttgaccatcttgactatgagtgtgaagagaaggagggtagtcgaaagcggattaaggaaagaacgaagaaaaggagcaaggcggcagtcgagaagagatttttgatgataagtttgacggagattgatcgaacgttccgagggaagaatttatcgattgtcgttgcgattttcaagagagcagaaccagagcagtacggagggaatgaatcgttttgtcgagtttagaagatgtccaagaaaagaacattcagggttttccatccaacacaaaagataaatccgatccaacccaacccagcaaggagaccagcgaaatacaaggaaaaaaatcacaattttttgttcacactttcgtcagttcagcatgttctttcctctctttcaacggacaaatccatcaagacggtaaatccttgcacacaaaaagctagacgaacctgattgagacgagacttgaagggtggtgctgtggcctttctttcgcctgacaaagtgcttgaacccgtcgacgatcgagcgtgtatctgactttgtgggccaatctgactttttttggtgtgaatatatgaaagtgttggcaagtatttgaaaaattgagatcagtttatttaagtaacacataatcaaggccactcatagaacaccacacagcctcttggcctttggtatactatgctcaatatgatcgtcactcttgttgtcgtcattcaaatagctctttcttgcgcagactgacgctgtatggttctccgataataataagaagaatcccctggttcccagttgatcgtcaacacagaaagcatatctagttccaaacatacatatattccgttgatcaaaagccacagagaatattcttttaatcatgctaaactctatgtaagaccgacaagatggaaagagaagaaaaggaaggagaggacaagaactgattcgcaaggtttacataaagtcatcgtcgtctccgctgtgtgggtcatgcagagatagaatgatttgtagagggcaaacgtcagttgatactcttgtaggtacggccagttaagcaagcaatagacttactcatcaagcgcgtcggtgtaggctcgagtgtcagccctgtggtgaagcaggtgggagaaggcggtccatgtgttagctcatgcgaccagataatcacaatgtaacacgatgaagacacaatccaaacagaaaatcaagccacgcactgggagatgttcttgcttccacccaactgaggctttccctttgccggcgtcttcttctttccactagccttgtccctctgctcttgctgcttaatatttgccaacgcgttcaaaccagaggcggtctttcggacctcgctatccttcagagtctcgcaaagcgtcttggcatggaactcgacaaagtaagcaaagagcgggttcgagctgtgcttcgagtagatctcggaatacaaccgggcggagaatgcctcgagatcggccttagtctttggcttggcatccgcgagcgaaccaacggaagcatctgataagtgtaagtccgatgtttgtataagacaaacgagttcaaaagagcgacaaagggaaggaagtgagtcagttgagtgacagtacaagtgggacagggggcgctcagcgcgcatatggaccacttgagttgcttattctttctgataaatagcaatacgaaccaggcttgctggagatagtggtgtctcctaggagatcagaagcgtttgccagatcagcatcgagctccatctgcttctccaatcgtcgtcgctcctgaggtgtcaactcctcttcgggatcaatgtctccagcctcaatctagatatgattttattcatttgtttttgaatgagaaagagatatcaagacgaacagaaacaaaggctagaagtcagagaaaccggtgaattgaaagctagcgaatccatacaacaacgaaaaagagacgtaacgtacagctcgcgctcgctcggcttccttcgcggccaatctctgcttaagagttcccttcttcttaggtggggcgacgacggttggagcaacgactttcttcttgtcagaatcggaggcgtcccagtcgtcctgaagagttgataaatgagatacaccaatcagacggtcaacacgtcattcacccgacaccgaccaatcagccgctcgtttcagaccttgttcttttccttgcgacgcgaaaatgaacagggcaaggatcagaagagaaagtgatgaacggatactcactccctcgctctcctcttcgtcctcaccggcaaacctagactttctcggaattatcaccggaggcgtgttcgacgtagacttcacagctggcttgataggagcagcggtctcctcgttatcagaagcatctgatcgtttgtcaaggcattcagtaattcaatcgttcagcgaaggttgaagccgtacagaatagtatatgtcagttgtggttattcagaagaggatggagatgaacgcgagagcagagcgtttcacgttctactgtattcctctctccctctgttcttgccttttgcatggaaacagcacaaaggactgtaaacacagggagagggacagagaatatgagaaggcatcatctaatcattcactcaccccagtcagacatatctttatccttttcttttattgattgattttcttttttggaaagctaaagagtgttgattgttcttattatgctgacaataatcaagaaagctggaaggcaatcttttttctcttttttctttttccagtgagctggaatccattgtaacagccatgacgcgtgatacaccacgtggcataaagctgtacaccgttagtcacccattcttgaccatcactttcccgacttctggtcgttcttctcatttcttttgttcctcttcgctcgaatttcttttgttctgtcgggtttcgatttctgttctatttcacaaaatcaacaagtcgaagcaatgtcggaaggagcgtagcgaagagcagatcaaacgccgcaaaaccttttcaattatcctaccaaggaagatcttccagctcgatcaacataatcttttgtgcttatcccactgacggatgatggttctgagacaataaactcctgggacgtacagccagacttgttgacctcgtccatttgcttttgtctagatccacacgtttctctctagcccacagatatgttctatcactatttatgaacgatctctctttctttttaaactgaccgtagacaatggatcgaaaagaacgagttatcaataactttgcctatccctttgatgagctaatgcgacttgtggtccgtcgtgagccagccagccagccaccgttcattatcatccgtcggatcggccttccatctatacctgattgtttaatacagatataccctgtagggaaccaattccgggtggtttatacacattctctctctttgtcccttaccggcccttactatccgctcatgtcgatcgttttctccccttaaacccaaaaaaaagtgacaggttcctttttgattgacatgccgacattgacaggtttttttccttctcttcctagcatacatgggttttctataaagacttcacaagagtggcgagtctgtctcgttctctttctttcttctctttctttcatccacacatcccttcagtacaactccatcttttctttctaccttgcctgtccaccagtaagacagcatcaacttcgatccatctcttctatcagttatcgccatcgacatcatcgttccagcacccgatcctttcaccatggccaccgtatctcgtgctcctcgccgccctgcagcgatcgactatcactcatccactcccaccagtcagcctatgcaaacacctagtcaggttgccgctagccctcagatgtttatcgagattctcaaatcgcttggagaatgcgccgagttggtcgagcataacgctcatccggccgatacgatgtcctctcttcgccaaattatctcgcttgtcagctctctgagcattgccgttcttatgcctagcaattctcagggtaagctgtttagaagttgatcctcgctcccggttttggcactgactttatcgttccatctctgttaatcgtctccaggccccggttcttgcgttacgtcccaaaagaactttcatcggagcgacagtagcgtctcgtttgacggacatgagttttcaacttctgaccctgggctctcatacagccacagcaactccgagtctggtatgttcttgagcgtctggttcggcactaacgaatgtttgcgccagtctattcgttgcgaacagctatacttacatgtgtctctttcaaaaacaaaaatgaatatacaaacaaaacgaagattcttccgtctcctacaaatgggaacctccgtctccggcatcttcccctgcttctatggtaggcaagcatacggctcgagtcgttcccgggaccccttatcatgctcgaaaaccctctcgagccccgcttctcacgcccccaccttccgaccgtcaggtttgcaggcagctttctacccacgactctcctctgtttcctgcactgccggaaatccaagatcgcgaaaaggtcgataactcgctgggattgaagttaggattcgagtcgggagtgcttcctctcgggtttggttcgtttgtctatcttctcttgtccacatgtatgactaccttgctgacggagtgggaaactttacgaccaacaacagagtcctcctctattcctcaagcctctgacgccgatttcaatcatcgagcgacttttcacaggcaggctgatcgtggtatctccgaggcttatgatgtgaccttaaccttgactggatcgactaccatcgacggaaccgtgttccccttcaggatcactgatgcctattttaatcccgaggcgagtgatttcttttcaacgttattaaagtatcaacttggctaacactcagtgatcattccatttgtttacaaaaatagacctataactatagcgagagtttatgccgaacggatggaacaggtatcacgggttatagatacgacaaccggttagtgtcttctcttccacgcaggatgacacaaggtctatgtaccaacaactccttacgtacactttctcccaataggaacggatcaacatatattcgattcgatgagccaaccggtcctcgaacgtgcttcatggtgagagcttctattatgtgttctttgttgcaatatgaatataccatgactgatatgacttcctttttcatataataaacttgtaaagcgtcacacccaccctccccatactattccgccaacttcctcgtctagaactctccactccaccagctccccccagctcatccggcgtgcttctgacggttccgccaagggcaacatggccgtctggtctcccttgccacggtcccctgctcagatgtccctgactatgaagccgccaaaattcactttaagctctcccctggtgggtaacgacatgggcggcagtgcccctatgggtctctctgtgaaagatttctggcggtaggtactataccagccgctttgagacttgcatattcactctgtacacgttcctttctcttgctcgcgttgtagtccttctttcagtcctttccctctgtctctcatctttcttctaattggtagccctctgatggttcctctcatgttatctcaatctgctttacgatcttgcctgtctcttcccatatctgcccgaccttaccattggaggatatcttcttgttctttcattttgtcatctctttatctaaaacgtcgactcgatatgtcctccggcgacgttttgtagctttgcccattcatacctcgcactctgctgggttgctttctcgtgtgttagtgtttctcatggttctctacatgcaatctatctcattctctttacacaagatgtttgtggacttttttctggattagggaatggatacacatatgtatatgtcgtacaacgtctgatcggaaaatcaacaaaggggtgacgctctaggaggcgaaccgagaaggagcacagagagattcgaagaaaagggcaagactctaacggatgaaacgcactgtgggaacaaaaaaggtaggcagatcaacacaagcatccgaacaaaagacaaagatcgaagacggagaaacgtgacatactgtaggcgagtaggagagcgccccctcccgtggctgtttatttgtttgttcgtttgtttgtaggattgcagatatagtctcggtaagttgtacgattcaatggttagagacaaaagaaaggataaagaagcataacgtaccgacggtgaccatgtattgaaggatcgagaactatgtgtttcaacagatccgtaagagaaatagacagagcatgtttcttgtttgagtcccttacttgccggctttgggatgaacaatagaggatcgaacaaagacgaggaaggagatctataccttggcaccttgaatttgagttctcaaacctgcgatctcgctttctatccgagtatccacctgcgatcgtttccaaccgaatcacatgtccatgcaaggaaagaggagttatcactcagtgtttattcatatcggacggatgtagttagcagtctaaagaagaatcggatacagacctctttgatcttcagttcgtgaagggatgcttcgtctctgatccgacctggatgatcatcacacgatccgttagctatcgatcaatgacgacgagaaaagaaagaggaaaagaaagaggagacgaccaagtagaacagacctttttccagattcagatccaacctgacaccagcctgagttcttgtgatttgctctttcagctgttgtttcagcttttccacctcgttcatcaacctttcgttctctcccttcatcagattctggtcctgcttttccaagacctgaagttcagatttaagttgagagaaatcgacattttgggtgtaggattgctgtatacgtataagacaaccaagataagttcatgtcatgtacctgccaaaaaccaacacaacacgcatgacacaacgataaagacgaaccttttcttgctcacttctcgataccattcccgcactcatgttggtcacactctcgtcgatgacttccgccaaagcattcataatcccctctgcttgagttctaggaagaccttctcgttcaagcctgttgacgaacgcatgggtgtcgaaatgaaaggaggctccgggtgaagttgggtggaacgatcggctgattggtgtatgaagaagggaggaggaagacgctatacgaaagggctggttgagaagaggaatcgatcgacggagcacagggagcgacatcttgagtaagaggtatgacgaggtgtgtttaatataagactgaggacagggtagtatgagctagagatggtgagggtcaatatatattgtatatattgagtgttgggttcactggtcgatgttttagcgaaaaaggagaaagaccgtgtccaataacacataatacatcatcatcagcagcagcatccttagtcttaccatccagcactttctcttcctgcctctttcgtctctaaaaaaatctttgttcatatcagtcaaaagctaacgcagcaatgagctggacacctcctcgttcaaacccactcaagccgaaaccgtcaacgaaatcaccctggatcaggcgtcattcatttattggtttcggcggaccattcattgctttagtactgggaaccagtttactcatggtcaatttcacaagtaccaggtaaggttttcgctcaagctccttcatctagtagcttccagagcttatgtaaagagagagagagataccgacttgtaatcaacacgggagggaaactaaaagctaatgggcttgagagaactttttggtaagataatccaggtatgaactgcacgatcagaaacaaagctatgtacgttcaggtctcctctatatctcttttctcctcttctatctttgcctttcggtcttcacctttacgtccaggccctttatgtccgggagagagagagagcagatatatatatgaaatacatcatgaaagccgaagactgatatcaatggacatattttgccgcgcttagatgtcgaaagaggaactacaagcgatcgacgagaaaccttttgatatccgagaattctactacgttcgttcccttctctttcccgtgttttcttgtcttcaatgccggcttaaacatcttgttccttctctctcctgacgactacttgtatcagaaaatctcatcaaatacgcctatggatgacgatgtggtcctcccacctgctcgtccaatccgccctcctacaaagaggctgaagaaatccgagacattgttcgataaaccacctccggaggattgggaggtaaagcgagtcgaaagaccggttggggtggctcaatggggagagatgccgaagagcaaagaagaacaggagtttgagagaggaaagaaatgggtctgatatgtctatagtatggtgacttctcaactttacttgtcataggaatttggagttttcgggtttcggtgttcgtctctggctttcagacaaaaggtctaatatgtgatctttcaacattgcgatgaaagacaggaatggagatatataacaaccaaaaacaagccagccggctatgattgaaaaagaagatatagctaattgaattgtaacgaagaagaatataaatagagagaaatctgcatcccatcccttcccctttgggttctaaaatccctcgccgccatcgtcatcatcttgcctgttgatcaaatctttagcgatggcttccatgctttacttgacctccttgaggatcctgttaatgcaatcgcccaaacaactcagggtcagtcattctccaatagatgaggaggcaagacaagagaagaaaagacaactcacatcgactctcgggcagggccgtttccgatccactctacaggcacaccgaggtaagactcgatgaactcgatgtaggtcttgcagttctcagggagatcctcatacttctggacgctcgagatatccgacttccatccggggaaagtcttgtacttgacctcgaccttggccaagtactcgagatcggccgggaacccgtcgagctcctttccgtcaacctcataagcgacaccaatcttgatctcgtcgagtccgtcaagaacatcgagcttggtcaagttcaaggtatcataaccgttgatctggttcgagaatcgaagcacaacgagatccaaccaaccacatcgtcgtcgtcgaccggtggtaacaccccactcggcaccgacctcctgcatggtctctccaatggactgtcgagatagtaaaggattcgagcgcaacacacatgagcaatgcaagacatcagcctttgtcaaatgcttcaaacaaacacacaaacacaagttactgacgttcaactgctccgtagggaaaggtccaccaccaactctggtggtgtaggccttgacgacaccaatgaccttgccaatcatcttgggagggatacccaatccagtgcagactccaccgatagcggtagaggatgaagtgacgtaagggtaggttccgtagtcgaggtcgagcatcaacgcgttggcaccctcaacgaggactcgcttgggggtagtaattgccttgtggaggtaagacactccatcaacgatcatcggtcgcagtcgagcggcaaagacctaggtgaagtaagacccagaggaccgcgcgtaaaaaaaggaagagaaagacaaagagatgtcaaacttgggccataaaactgaaaggacagaagaaacatatacacgaaaacaaaaccgaccttatatctctcaatctcagcctcggtatcgtactcaaagtggccgtatcgcttgattcggccctcgacgagctttcggaacttggtagcgaagacctcatggtcgtacaagtgatgcactcgaagacccgatcgagaggccttggaagagtaagctggcccaattcctcgcttggtagttccgatgctgtatgcggaacaaaagtcgaccagatggtaagttccaatagataactctcaagaagagacaagcaaacgaacgaggatccaccgagctcgacctctttgaggccgtcaacgatttggtggaagtcaaagacgaggtgggctcggtcagagacgaaaagccgaccagcgcagtcaaggcctattctcagcccagatggtgtcattacaattgtttctatcagttctcatctttctaaaatgtccgcgatcgacaaacagatgtaacgaacccttcttctccaagctctcaagctcctcgaacaagctgggaacgtgaacgacgactccgcttccgatcaaagcctgggcatccgggttcataagcccactgggaagcaagtggaagtcgtacttcttcttagtctctcccttgccgacgacaatggtgtgcccggcattgtttcctccggcgcatcgagcggtcacgtcggcatggtgggcgagaatatcgacgagtttacctttgccctcgtctccccactgggatccaagactgtatagatgaaagatattagcttggcagtgagagaaagagggactcccataaccgagaggaacctacacgacggtgaccccggacttggctacgactgaatataacaggaatcacagagagatagttatgattataccaaggaaaacggaagaagtcgacgaagagagaaggaaaaaaaaagatagaatggtaaaaaaagaagtcagtgaagcaacagagagtcatcttacattcccgaaatctccgatcgagtatgggactcgagaaaagagaccccggctcgagagcattccgtttttcaacagctagcaacaaagagcagtacatacggttatcagccatggtgtcaagtgtgtgtgtttgtgtttgtgtaagaagttcgcacaccgagatggatcttcttgctaaagagaagaagagagaaaggaaaaaagtagaatggaattggaaaaaaagcgaaaaagcggatgtacatcatttggggaaatttggggtttgattggtcaaaattggggtaggtctgggcaactctagggctgaacaactgtcggttactaaccgcacgttccactagtatcaacatcatctctcggttcatagaacacatacacaagcacttacagtctcgatcaaggactatcagatctatgcttccttggatagttcctttgatcttgttaacaccgctagtggtattctatcgggtatggtacattttacctcgaggatatcttcctcaaccctcatccagtcgtaccaaggatgtcaccaacatcaaggataagcgatcagataaagtcgttggtgtcttcttgggttccggtgagttgtatgctgctagctcgttaatcgtctcagatgcattgaccccagcgttctaacacaattaataaacaaacaaataggaggtcatacatacgaagctttaaaaatactagacatcatggatgcggccaaatatgctggaagagtgtatatttactctgctggagactctatgagtcttcgtaaagccatggagtttgaatcatccttggcttcagctgagatcccatcacaccagctcaagaagagcaattctttgcaggcattcttgacaatccctcttccgagagctcgtcaagtcggtcaatcatatgtatcatcaagtacgtcgtgtttctggatgcgcctctatccgaatttacgtgtgtctcaaatttcgttttactgctctccaatgatcagtcttcacaaccctgcataccattgttcatactctctatcattttactataagtacggttatccattcgcgtcggtcgagtcggaagaaacctttcgcagatatcctcattctgaatggtccagggacagcgacatgccttgtcttggctgtccttacctctcgcgttagtcacattttccgtctcctgttgactccttcgtctatgcgctaagaccgtagtcgggatgacttcaattcgaaacctgtcatccctagtttctaggtcttccaagtccgaggacgatatatatcgaatcgttcgctagaacaaactctataagtctttctgggcggatcttacgacctctggtcgataggtttcttgtgcaatggccgggtgcgctttcaccagagaaggaaggcctacccccaggaagcaaaggggagtgtgtcggtgttgttgtttgaggcttgaatccataaactgggcgtttggtacaacatagccgtcgctctcacaaattgtaatcaaaataaatcataatggataggcaacagagaatcatgagggaaggcaaagaaatgagaaaatcgaaagtatgtttggtgctcataataagaatcgaaaacaatgaaacgtgacgaggtgtaaacagggtatatatcaggcaagaaagaagataggtgttgaaacttgagggatatgaagtaaggaagccagtttcaaatttcatactcctactcgatggaccacttttttctattgatgagatcagatccagaccaccgaaacgtaggagtcagtaaactggccattgacatgtctggaacaaatttggagggatagcttacctgtcctgagaatctcaacacctctctcttctccattatatacaacgttctctccaacgcatgactcgaatagccctgtccgctcacgaactccctaaccagacttgcataactcgtgctccatccgattggtaacctcctcctgacttctctttcaatcttctctacctcttcgttaagctctcctcgtgtgagaccttcgacagaaccagcagagacggcgtccatggtagaatacttgaaaagtcgaatcgcctcgtccacatggaaaggttgaactgacgtcgtgagcgtcatcttggctagagattcagagattcggatgatagcttccagttgtctgtcgttggccagttcataacataacggtcagataggacgatgtaggacgaatatgaacgaacgaaatagcaaaaaagaaaagaaaagaacgaaccgaacggtgatagggatggaacttcgctcatcgttgtctcgctccacctgctgaacttgttttctcagcgccacgaaatgactacttaacatctccgacgcttcctgggatagccgaggcgcacacctcgatttacagtaggcgacgtatcgtttcatcttgtcgatatcgatctcgcccacagtttcgcttcctgtcggtcggttcatgtggatgttcatcacgtgttttgctatcgtctgcagccggcgaaagcaaagcagattgaaaaggtaagaagagaaagaaatatgggaaaaaattcgtcagtcagatggtccgcagggaaaaagacaaaaaagtgagaagggcgcactcgatctcgggattcattatgctcatctttgacaataaagatcatatcgaatcgagacaagattgtcgtttggaaatcgatgttctgatttgttcgagtgcaccaacaacaattccaaaaaagaagaaaaagaaaaagacagttttgttcagctctatccatctcgaccaatgcaagaatcgggaagaaagatagtgtcctcgtacctctccaggactcttcatatcatcataccgaccgaagaccggattcgccgccgccaatacgcttgtcctcgaattcaagatcgtcgtgataccggcctttgcgatcgagatagtttgttgttccattgcttcgtgaattgccactcgatcctcgtctctcatcttgtcaaactcatcaatgcaaaccacaccaccgtccgcaagcaccatggcacctccttcgaggaaaaattccctctaatcgtcatgtccaaacgtgagagcgaaatttgatatacgacggaaaagaaagatgaagagcaagattgcagcagtacagtcagtaaaggacgaggaaagatgcacgaagtaagaaagacagacgaacggtgacagggtctctttgtaccgaagccgttaaaccagccgcactacttccctttccggatgtatatacggagatcggagcgacctatgattccagacgaacaagagtgccgatatgatcattttccatcagccctgttgccgttcttcacctaactatctaccctgcaacgaacgatggtaacataccttttcgacgaacttcaacagttgtgacttggccgttcctggatctccaagtagtaatacattgatgtctcctcttaaacgcatcccgtccggaaggatcttcttacttcctccgaagagcagacaagcaattgctttcttgatatctgttgaacacaaatcgatgtttttgagttatgtttctaattctttggaaagaaaagagacagagatgaaggatgatatattgagtcttacccaaatttccgaagatactaggcgccacacttctagcaaatctttcataaagcccttctcctcgactgatctctccaaactcttcttcctcttcagcggtgaatcctctggagccaggggaggtcgcgagattggtatctaattcaagacctagcactcggaggtaaggagttcgaagcgctggagcagatgcgtttcctctctaacaatcacatgaacagtggtgttttattggttattagtgatctgtcgaatggtaatagagactagttgagtgaggaaagaagaatgacctacagtcttgccagcttgataggtcgagtagattccggtgacgatgactctggatccaggaacgactttgcctgtcaaatatctgccattgtttttcattaaaagtccgtcgatcagctatatgtttctgatgccttcgttgaagaatcaaggatcggtaaactgaaaagcgacagcaagaacgaacctttcggcgctgagctgcatatgtctaggcaattctcctactggaaccgcatccggtgcttcctgaagcttgatcatctgttgatcgacaaaccgacatcggtcgtgcatgattacatatggatcgagcgggcagtctttcactgttcctggcatggcttctctatcattggatatcaaaaggaacatcgagtcgtaaatgtcagtccattcatttctcttgagctcatacaggaggatagagataaagataaagagagaaaagaaaggaagggctacgaacgcttcgcatttccttggcaaactcctagctcctccatcaccaatcccaccagtgacggccatgaccttggtactccgacagcctttgcattgcaggtatagacttgtcgctcgagaggaaagtgtcgaagccgaaatgacgatccctggcagacgaactaatgtagtcaatgtgtctgcctaatagttcgcgcgtatatcatacaagttgacgagaaagattcaacacatgagcaaataagacgaaaaatgagagaagtaatggttcgaggagaagggtgaaacatacagtcaactctctgaactgaatcatgttcattccactcttcaatactgcctgcatttctgggatctccctttctgcgattcccaaaagtccatcagcctgcgttgcgccaccctgcgtaaactgttccctttctcgttgttgttgctccctttgctgagcgttcattgggtgaagaatttgccgagctgatttaagaatagctgattccaactgtcaaacatcaggtgatatcatgataggcaattagccacgaagaaaaaggttatcactcggtctaacatggaaataagttgaaagatcaatgacgaacgagaggaagcatgtcgcctggtttctcctgaaccatctgggctaattcttcattataaacgacaagatcccgaagatctatctcgacgacgttttgtcgagccagaagggaagagcggattcgatctctgcaaatcagagtgttatgtagacgaaccaaagaaggcatcaactttcaattcattcgcctatttatgcaacgttaagagacctgatacaagacttaccggtacttgaactctcctccaactctaaatccttggataaattcgaatagacttctctcgattgctgcaggtgcatcatgaggaccttggtgcgaaagcaccgatacggaaaacactcggtttgaatcaaacccagacctagggaggtgatgagagattagatatttcattatgagcccggttgaaacaagcaaggcctgatgagagaactaagactcacattcttttttaacacaaagattgagagaggtagtgatgactcttcgagcagatatacagagagaaagagttgctcggtgacgatgttaatgaatagaatgagaacagcggacaaggagaaaacacgcgcactcagttccatcgatcaacaagtcgcgttttcatttacgcaacgcgacgtgacttgattaggtaatcagagcaaccaaagattctctgcacgacaaagagccaagcttctgttgcaagaaggatggaagagcttcatttgaaagcagctcgaagatcgttcaagatagaggacatgagcagattcgaacagtctttcagtcgcgttctatcacatagccgaagcaccgattgataccaagttggtctcttgtccgttacgtcttctccagttcagcgtggcaagtagtggtgtatgatttagcacgtgtagtcaaaagccttcccttcctttgtctgatgcagatttccttatggtgtagaaatctcatcactagacttgttctgttatttcagaatgtaagtgagagtggtatatgatcatatattcgataaccagcatctgttggtttggctgcttcgccaatcaacgtgagacccgaggaacgaagtatttgtatagaataatgctagacgttctgatccgtggtccatgattgaaagaagggatcaaaatttaggcagaacagagctcaatcatcaatatcaccttccactgcaaatagctcacacaatctcagttcagacaaatccgtaacaatatcgatggtctgtaaacttgaaaatgaggaccacttaagatagagagaaacgaagatgatgtttgagatacgatcaaaaatcagtcgatagccggtgatctagaaaatgttgatacagaaacatgcaagatgaattctgccagacgatcgtctgtctatcaaaacacatcgaactggttagatttactcatttagcagcttgacccacgtcaagagaaagacagatgcaaagatctaatcatgaatatcctggcggctatgaggaagatattcgtcgattcaagagcgtacaagatgagtgaacgaaggagcagagataattaaccaaaaagtgatcaacttctgcggcatttctttacttctctccctgccttctcctatcatcttccgagacatcgctttggtctcatcccccttcagatatatagaaatcaatgccgacgccggctcaagacccgctccttcacgatccatctttcatatatgcttcaactcccacgctctctcggacagcatccgtaggatcagctcaacctggctctcctgcactcggcaggctaccgggcgcattcactcccgtagcaagctctatcccaggaaacctcaagaatgttgttctcggtagaggtagcttcggtagaccaccctggtatgactcaaatggaaagacaagagagtgttatgtcattggaatcgccggaggaagtgcaagtggaaaggtcagttggctcaatctatcacactttctttgcttatcctatacccgcatgatagatactgaccatcttcatgttctgacctgctgcgaatcgttcttcctatattgacccttacttcaatagacaagcgttgcgagagaaattctccgccagttgaaccatattccaaacgtattaatcctttctcaggattcattctacaagcgcaactcgcccgaagaaattgttatggcattcgagaacaacaaggattttgaccatccagactccattgatttcaaactattcagagagtgcttagtcgatctgagaaatggcttggccgttcaggttcgtatctttggttttttattctctagatatcagtcaagacagcaccacttgtgacgctttccgagtgcgctgccaatccatatgaagagctgacactatcttcatcgctggtcatgacatcattatacagatccgtaagttcttcttcctgagatatgcttctttctctaagatcgcaagtttaaagctcacccgtcgaatttacaatgaacacaatactgatgatcaaacttccgggacaacttgtagctgtttactcctttgttcaccatcagcgtatgccagagacatcatacctctatggagcatctgtcatcatcgttgagggaatcctggcgctgaccgatccaagccttagggatttgtttgatctgaaaggtaggtcttgtacatatgtcagtccgctaaaggagtatgttgcataaatggactgatcttcgttattttacccttttaatgtgcagtgttcgtcaatgtacgtcgtcatcctcatcaattatcttacgcgcatctctttttccttttttttttttggagaatgaagagcgatcagggtgtcttatttctttcatttgtgtgccggacatacgacattctatagtgcgatgtgggtttatcctcttttgctcaaggaaagggatactcgagacgtcaaactgatattcatcatcctttcccgtcaaatctcttctcatcagaccgaccttatgctcgcgcggcgaattcgaagagatgttgtcgagcgaggaagagatgttatgggtattgttgaccagtatcttcggttcgtatgcttcccaaacattccttctaaatggaagtcgactaactatgtgtctgggcggaaacaaggtttgtcaaaccgagttacgacaacttcgtgttgccttcatctaagtttgcagatattgtcagtggtttcccggtctgcattcgctgttattgtctttctggtattctgaacaaaggtatcggcaaatatactgtactgtcttgatatggttgtcagatcgttcctggcgcgcaaaacaatgtcgctatcgatctgatcgtgactcatatccgacgacaactttccgagcgctacatgcgtttccggtcgacgctatctgcccctgtgaccctttcttctcaaccttcctcagcaaagtcgctctcttcttcgaccgacccatcttccacattatctccgtctcccctcgcatcaggctcggataagactgatccacaagtttctgttaacggtaaatcaagggatcatccgaacttggtcctggtcaaccaaacgtcaggcgtgaaaggcgtagttactatattgagagatcgaaagacgatcagagaagacttcgttcattatagcgaccgccttgccactatgttagtattcccatattccttcatcagggaagccctcatagaagtcggactaatcttaaatgttcttttccaccgtgggtgtgatacttcgatgacacagagtggtcgaggaagcgattgggctattcccttacaaggacaaaaaagtcataaccccaatcgaagaggtggctgtcggaaaggtcttagatcttgatccaggcgtgagttttagtcctgttatgtcgggatgacggtttcgtttcatatgtcggaattaattgattggtttgggtgggaaaaaattgagcagaaaatcataggagtttcacttggtcgttcgggaggtccgttggagaaaggcttgaggcgagtcgtgttggacgctcgactcggaacgcttcttattcatgtgggattttctttcttctcttttcgttttggtcacctaacccgccgactggatggaggctgtgtgctgatattgtgtcccttttaccattgtctttcagaatgacgagactacacaagagccactgctttataacatggtccttcctggtttgcaggagcggtctttcgcagagaaagcttgggtgttgctacttgactctcaggtgtgttccgattgtgaggatcggtaaggcctttttatcagataattgatcatccttgtcgtgtttgtcggatagatgggaactggtgcttctgccctcagtaagtctgcttgtctgtttgcgaaaagatcggaccgttctttctttgctgaataaccgcacatcttccttttggtgttttttttttgcattgacagtggccatacgagtcttattggaccaccatgttccagaggatcaaattctcttcctcagtttcttagtgtacgcccgttgatttccttctcacctcttaatctttcctcatgacctcggttctatcgtgaactcattttgtctatatctttccgatgaacctaggaccccgcattctttgaaagcgattgaaagggcgttccctaaagtccgaatcatcactagtgcgattgattacgagttagaacagatcactcatcaccgacgcgttcatcgaggttctctctctgaatcaggtcagggacttgcatcaggattgggaatcaagatgtctgaatccatgtctggagtacagggaaagaacaagtcggaggagagggtaaaggaattgaaagaatgggtggttagacctggatgcggagatatcggcgatcggttcgtttctttcttcttgttctctcccttgactctcttactcctctcgattatatcagctaattgggatcgttttttgatcaaaatagctactatctggtctagctacctcatcacagaacctaaatttgatatatttgccaatctgggtatacagatgaacacatctgctcagcctacatgagtcgatgacggaaggatctatgaaatatgactagaacaaagatggagatctcgagatcaagatgggtgtatttcgatgtattgaacttgatacatttgagaaacaaacggcccaatgagtaaattagtgcgcgcgcaaaggaatggtaccaagcctaagtataagcacaaaaacttttgaagaaacgatgagaaatatggatgagaaaaatgccatgatagctggccgaacgatcacctctatccctcatctctagtatcgacttgtgtgtggacctggtgatgtttgcttctatgtcaatgaacggaaagtcaggatatcgagttcgttcggaaactcattcaaatgaagcaaggggaatggacaaacagatgatcgactctcgagaatgatcttccacaatcttgaatcatacccacatgcggtttttctgctgtatgaatggatttaacatgccctttcaacattaaagtcaattgcctatcttctttcggagttggtagacaacctgtcgtaaatttgcaggacaaactgtcttaagtgaccacttcgtctagcaagaggtgtatgagagggacgaatctcgtcattcagatgttacatagaaacataatacccaagattaggagagcctacctaaaccatttctgacagccctcagtagtacattcgaatacttttctctcctcttgttccgcatatgtgatcgaacctgtgcttcttttcgaaataaatgacactgcgatagacattgctctcggcattcttccaaactttctctttctggaagtgttcgatccgtggatgacagtagtaattgttcgagtgtcgtcatcggatctgacgatctttaggttgatacgcattgggtctgctatatccatcgatttcatcgtatcggatgttggtgtcgaagcacgtgaggaaaaaagagacagagtacgctgccaaacttgaggttgtacttttctggcctattgggtgaatactgttgaatgaggacgggattgactgggattcggcgcgcggttggtcatgacttgaggtggacctagacgtatgactcgaaagactggcagtattgtcttgcgacatttttgataatgaaatgcagtgttgatagatgcgactatactcgatgggcgatgaagagcaatcagttggtctgtttactcaatctttcggttagacattagaattctcaagggagagtgcaagattagaagtgaacaaggaagacaaaagtgagtaagatagcgaaacaaacaagccaaggcaatgttcagaggaggtttcgatctcttcatataagtattcggtaacacaatcagggtcagtgtcgaatccaatccttgaagaagaagacatattctcaaaggaaaatcaagagttgagattcaaagagtcagtcgaacgtcgtcgagtcggacgaggaggtgagctagcatgccagccgtaaccaaggtttacatttgatcggtaaccaactgtagattgatctcattgatttccttgtcaccttcaatctctccctgtcatctttccacttgaaggacctcgagcatgtcgcctctaccggcagcgattctatcgccatcaccacccactcgtccaccactacaagttcagtcgcagtcggacgactcctttcggacagcttcgtcttccttctcctcttttgctcgaatcaaacaatccatccccgccgagttgactccactctcggatggagatggtcaagctgtgaccgatagaagccttccggtagcaaaagctctaccaatcgtggaaacagacaagacgcttgtatcagagagattggaggccttgctgaaatcattagtgatagagaacaagatcaaagatggcgcggagaatatgcttcaggtaagccctcagttcagttacctatacgccctttggatttggtggatcttcgagacctatatacgcatatgaatccatcgaaacgccttcaacttccgattgggaacactcagttcatcatgtcttcatttccttcgttctcaggtccttgagtctgctgtagaaacaggatcagatagaaacgatcttcggaaagaggtcgagggcgaactgagagcggccaacaagatgattgtcacaatcttgaacgaaatccaagaactcaaagagcacccaggtttgtgtttagacaatgttcactctcctactctgtagagctctaacgcctgtcttgtcttatcttgtcttgaagaaatttctcgcgcgcttcagaagaaagtatcacagcaggcgtttccttcgaatcagtcgacgcgtcgacttccgccgaaactcagctctgctaacagcagtagtagtactaccaacagtcataacaacgtcatcaatcacccagcttcaacttcttcttcttattcggctatgcaaaatatgcgacatccccgaccgattagtccagaagatgacttccagaccatcttgactgtcgcaagagctctggtgagagatcttgatgtgcaaagtagggatgacggaaagaagtttgaggacgcaggaagactcgtcggagtcctcaaaaagaacagaagggttcggtatgatcttgcaggtcgagaggacgtcttggaaatgtgagtcgactctgatcatgaccgattaaccatccgtcttcaatcttatcattgatcttgcgcgggcgcatgaatgtaaacacagaatattcgccttgatctcggaaacaagctcaaaagaactacgagccactggatatagggtgtttagacacctacttgttgattcagagggatggaaaacactcgagcggatgggaattgattggtacatcattcggtaagtgtgattgttctcatgttcagcttgcatctctgtttctaagagcgcgcgcatatatgtttatacagaagcatttgcatacttctacaagctgatttgataaacttcaattatatatggtccatccgatgtgtacagcacatttaccagagatgtctcatgcgctcctgaaaagatacaggcgctcaagctgatccgatcggttttgaacctcccgccatctccatttaccccaccattaatatctactccttcgaggtcaaaatctctgagtgactatcgaaatctcaatgatctagaaagacgagggttcaggagaagcgcaaaagttccattgagtgattcggtgataaggacgttagtcagtttagcagagaacggggatgatccgtttagatttgttagtttagagaccttggcagaaattggtaagctttgccttctttcgcagaaactgttcgtacactattcagcttacctatcacatatctatgcaaaagcccttttggacatccaaacacttgtcccctcaaacgctatcagagttcttcttcaatgcttctcggagggaccacatgagttagcgcctgccattgcccatgtgtttctgtacgtcatcgattgtccggaaaggagggagtcgttaaatcccgggatggatatcgaggtctgtttcttctccgctctctgacgtgtctttctcttcttatattaactggtcgtcattttttttcttctttactatcaatcgatagatggctctctctggatttacagatgttcatggttctggcgaggcttatctgagcagacttagatcgagttcaaaggttgtttcaacattgctcaagtcatggtcaggtgagttcttttccctcttttctcggtatcccctctgccaatcgctcttcgctaacgaatttatatatcctactctgattttccttataaaggattcttatatctgtgtatggacgatcgaaaagcaatccggtccctagtcgattctctcagagtaccgaccgttcagatgagagtcagttcacgttactttctaaagcatcgtaggctaccactaatcctattttcttttgtttcgtctctcccgcgtattatgaatgatgtcataggaagttctgctagatatgttttttgatatctttcgcatcaaaactccgttttggtaccatgcgtttttagacgaccgtcgtttaacaagtgagccatctccttgacttatactttctagtctttacaatcacgcgtttcttcaatcatctctcgtcctcatgtactgattcttatccctttgtcgagaacatagtgtactcaaaagacttcaggtccaatgcttacagcgcatcaggaaaagaaaaggaggacccagacaaattgacattgattgatcattacgtcgctctcgtcctcagcgtctttatagaggtcggcttagtcgacgtatgtctctcttcgatatgtttgttctctccgtaccccctttttctactaagctaatacaacaggaaatattaattgatcaggcattaatcgatatcgtggaagaagcattggacatattgtcccgcaaagcaacattgttggtaggcgaacttctagcattgtccaacaagctccttccatcgaccattgctgctcggattcaagtgagaactccgttttctctccattttttttatctgtcgctgatgccgctatacttactgacttgatattcatcattaatacttaatatttgaaaacaaagtctcttcccaggttgttctctcatgccgcaaaatttgcgaaacccgaggagagaggtaaagcctcatctgctctgtcagctatcgacagtttgaacagaaatcgaagtcgattgagagacacgacagctgtaggaacaaaggaaggtagaaaacggtgggtcctcttttcctctttcgcccttctgctctgttgaatgatttctgagtctgatctgactctgattttttattttttattttggtggaaacggggacaaagatcaaatccaatacaggaccctttgttgagaggtcagcgacaagtagaaaatgtcaagatgagaatgggtcttcagatggatgatcggcagtttcaagtcttactcaatgatacacaggtctgcctctgttccatagtttcctattcagaaataactttgtctgacttcttcttttccttgatctgctctggctgaacatataggtcttgttctctcgagaccacaataagtggaattatgatgtcctgatggggatcattcaaggtccattgttgaaccctcgtcggttggaagaagctctgaaggcttcaaagtttggccgcaggttgctgtcattttttcatccattaaatcatcgattttcagatgtcaagaagacaaaggtacgctaagtcgatttttggcttctaacatggactgatcatcttactgcatgtgacttgtgttttgaatgagtgtagccgaaccttcgttgggtgaagctgggttgcgcgttaatcacgacattactatccaacccggacggtgtggcgttcttggcagcagataaactgttacctcagttgtacgaatgttttgcggagctcgatcatgtaagttcatcgatccatttaaacgtctgattatatctcattcccttctcttactactctctcttatctgtaccggcttgttgtggaatgtgatgggttcgcaagtatcatggctctgtcaattcggacccgttgttgtcgaaacaccgattagatgatacgctgacaagtggatatttcgagatgattggaacgttaagttcgcatccagaaggaattcggtaggtcattctcttcgtcgatgtatcctctttcctccatgaacatgccagatgattctcaagcttatgctattcacttgtttcttctgtcttctatctcttgcgcggcgcgcgatagtctgcttgaaaattttaaaatgtttaccttgttctatcacctgagcgacttgaggagtcgtgaagatcttatcaaagctatcatcgagaatctggattacactaggtgagtttcctcttctatacctatttctcttaagatttgataggctaataatactatcaccgttaactggacacagcgacggacattcacggatcgtgttatcaaaagctctcacatctagttatatggttcgtatttctcttttgatcttacaccaattgtagtctctattgatctattcatcattccacatgtctttccagcatatccgactttacgcaaccgagcatctcggtcagcttgtcctttcctcagccgatgccaatccgtggacgcttcgcctgttgatcacacagttatatgatccttcgcctgaagtctgtgagctggctgttcagttcctggaggaagcctgtgaaagaacggacgtgttagagttggtcgttcaaatgaggccttttttggatcatctgggtgatattggccatcctctactactccggtgggtctgtcttacttcgttcacttgctctgaatacggcagttttaactgatgggcctgaaaatcacctcgaatttaaaaagctttctttcgacttctgtcggatttcgatatctccatcaggttcactatctcaatcgagagttggattactggtttcatgtaagtaaccttcttgagctttgggggaaaagaatgttgctcaggtaatctgatcgttgaccactggtatatatgtctttttgttcaatcaaaaataaggaacgaaacgagttttatgtagtgcaggttgaggtttttctctctcgggcattctatcctgctgcaaatgacgatccggatgatcttatgtaagttgcgacttgctttccaaccattttatatcgatacaaatctaccgggaaagacgaccaacgctaagctgcttcgtgattgatttaaatagcgcattcgatggaactgtccctgctcacttctatggcgagctcgttaaaacggccgagggttgtcagatgctaagagagcaaggccattttggcgagtttgcagagtttgtaagacagaatgggatggagtgtgttgattctgatgtgatcaacaagttgaagagtgtgctttgggcggtggtgagtcctttcgttccatccaatatatctagtttcatacttatatttcttctatgatagggccatattggatcaacgagaggtggttttccattcctggaggaggaagacttgctcgaggtcattgtagacatagctgagcagtcgtctgtgttatctgttcgagggtcagtactagaacttcatccgaatgaacagtttctaataagaccaacgagatcttacgtgttggatatgtgtggacatggacacgctcttcttgcctttcaataggacatgctattttatcctaggcctcatatcgtttactcgcccaggagcggacttcttgatggagttcgattgggaagctacgaattcctctaccggacaacccacagggttatgtatccctattgattcttcaaagttttcttacgtacgttcacgatttttcttcatctcgcaataataaacgaaagagagacttatatttaaacgattaactcattattgtacgcccgctctttctgttgtatagatccaaccatggaagccgattcgaagcttggagccgtcgggagctgcgttggtgatgccgacatcaattgtcgaacagagcgtgctgagtgctataggaaacctgagcaaccacgtacaagcttctgcttcattctccattctttccaggtatgattctttttccatgttttcatttcccgtctttggtctcacaaatcttgatgcctgcttttttcgtttggattggtcaaaaccacatgtagactcaaacgtacacatcgagacctgttttcatccattccacttttttatcgagcgcttcacatcctctcatcgactcatttccgactgcccatccgtcgattcatctttgatctgtttgatatcccgatgacaccatctacaatccttggacttatcaactcctcactcaccttgaaactcgaacctgcattgcccgatgcttcgacctcgtctttgatgataggaggagccagatcgccagcatcatcttccacgtcaatgaagctgaagaggtcttcgggacttgagaatcttggcaggtcgagatcgacaaagagaagtctcaagagggtcggatcgaaattgtccagggaagacttcaacgtcgacctaaaggacccagatctaaaaccgggtcttggcttggtagatggtgagcggggtgaggagaagggtaaactcaagctggaaatagatctgagtgtggacctcttgagcggggaagaggatgaaggcagagagaatggggccgagaaagccatgacgcctgttgtctgttcaagaccagccaggaaagtcatcggttttgcgcctgtgcgatgatcaaacgcttgttctttttctttcctcctttctttctctttcttttaggctctctttgctagtttctgtgtctgcctctcttccttcttatcactagcttgccgagtatctacttcgtttctttctctctctctctctctctgtttcttcggggtttcttgattcttctttcacttatatcctcatcatcattcgtccaataaccagcggatgtcataccttttctccatacaacacttgtcctacattattctgccctggacatgatatctgtttgtactgctcttctcatcctccttttcgttttcttttcttttctctctctcacacgcttccttatacccatccctagatcatgttgtatctattcgttcatctctctctaccatgtgattgttctgaaccgaacgagagtttgttccacagaggtacatcccacttaggcccccctttttttttacataactgttccgctcaaccgagacgaggcgacagatgttgaaacttcatgcttagactttcggtgttctcattcgctcgctcgttaatcaggcacagaagaggtatcaaagaagaagatggagaagaatgattctatatggatttgatcattaaaaaaataatggatggatggaatggaagatgatagaagaagaagcagaggaagtaaagaagaaaaggacacagtgaagggaacacaacacaacacgaccgtaaagaagagatggggaaggaaaggaaaagaaagaagaaagaagaaagaagaaagaaacccgagggaaaccggaagactagtactcgagatgagcagcataagaggtctatagattgaggaagtaagaaaaagaaaagatctcgaagccgacttcctgtcctctttgctccttcgtcttctttagatttttgatcgcaacccactgccagcctgacccacggcgacgacctgatcgaccgtacagaccgaacctctgtactctggcaagtaggacgcttgcgagaacagactcttgaccacgggagaacccttgtagatgggtgtgagagatccggcacagatgtcaaactctgtaaagtgatcgtaggacgtctcgagagtgtcttgtgggtttcgatcgccttgggtgatgatcgatcgagcctgtagaaagcaaggatggaaaacaagaaagggagaggaaacccgggaggtcagtttttttactgcgagcagagaccgagagagagagacgaagagaaacgaacctgagtgacagccgttgggttcgtagggttcaaggcaatgagccgtctggcaaacacagcggcggtagcgtagttctgagccttgttccagacagacatggccgaccgaagggcgagctgaagatggatcggctggagtttacagttggcaaagtaagcggccagctcgagttgccgacggacgttttcgggctcttctttcgcgagtcgtcttcgctcgatctccatggtcattcctaggatgtattctcgacagctgtcgatcacctctcgaacctgctggacctgcgcatcggtgttgacgacgacgagcatcatcgactggaggaccgatctgaataaggtctcggcctctgcgaacttgccctttttgacaaagttgtaagcctcctgaaggtcggtctgaacgatgtggttcaacgaagatcgaacggcgggtaggatgtcgttcgtcgatgtcgtctgtgggttccgcctggcgtagagctttatcgggtcgaccgagccgtttccttggatgtacacatgggaagcttggtaggtcgaaaggaagagcggcttgaggggctcaaagttgacggccgcgatctgctggttcaagagcttcatggcggtctcgaacgaaccggcggcgactctgtcggccgccagaggcgagttccggatccagatgtcgtactcgctcgtcccggcctgagtgtcatcctccgggatggcttcctcgacctcggcctcctcggcttcggcggtgtgatcagggacgtcgttatcgagatcccaaccctcgccttcttcctcgtcgtcctggccatcgtccccgttcaacgggttgtccgccccccaggcgctcagctcagccgcgccagccgtggcggcctcgttgctggacaccggcagagcgggagcggccgagccgccggtgagcgttctggcgaaaaagttctcacccgtcgacttggacggccagtcttgtcggaacgactgagtgatcggcgtcgggggagccaaggtggatcgggtgaacgaacgcttgggcacatcctcctccgtcatccctgcgttctcgaggatcccttcggccgcctcctccaacccggcggtcttggcggcaaagtaggccaaggaatccatcccgacctctcggagcacgttcacccgttcctcgacgtctcccaagtagagagagttctggaaccgggccatctgatctcctcgcttgccggcgatggtctgcatcatcttgagtctctcctggttaccggtgatgaggtagaggaatgagagtcgatccaagttctttgtcttttggtaagcgatctccacgatctacagacagggtccgaagggatattggaaaggataaagagaaagaaaaaaaagaagaaaa

SEQ ID NO: 2913 - DNA, 472 bp, Xanthophyllomyces dendrorhous
tctctctctctctctctctgtttgtatctctgctttccagttgcttgtccttccacacttcctgctctttctcgcccctcgatcttgactggtcctctttactgtaagaccatctgtatgactatcttatgttttccctacaaagtctcgctgttttattttgcaaagatcgtgtgaatatgggagaaggtattgcttggcctgcctgacgtgacatagtctggactaatcaaaaacctgtccataactcggaggacaccgacacaacgaggaaaacaagagaagaccgatgacagagagtgaatgcaaacaccgagaccgaagaaagacaactgtcgaatgtgggctgtgagtatgtaagcatgacatgatgagaactgggaaaacgagaaaacattcccggggaaggacgaaaggggaaggaaggtagagcgatgaacattggaagatatgttccagacaaagatctaga

SEQ ID NO: 2914 - DNA, 1197 bp, Xanthophyllomyces dendrorhous
aaaaaagaagaaaaaaaaaacagagattctcaacattagtcccaacaaacagttgaccatgagggtttctcctcaagagagaggaaagaaaaaacatgaagaaacgaaggtcgatcgcaccttctgagctccctgcttgagagcctgttcggccagtctgacccagacctcctgcttttctaccgcccgggccatctcgagagcgacgtcgaggtttccacactcgatcgccagatcaaaccttgtgctctgatcctggacaaagtgcagggcgatctcggcgtagcccttcttctggaggtaggcgatgatgctctgaccgacgaggttggaggttcggatgatctgtagcatctcatcaaagttttctttggcgagcgccagcttgaatcggtactcggtcgggtcaatctcgatcgttcgaggtcgaccggctcggtcgagacaatggacgatctttcctttgatcctggtcaggtagattggctgatccagggtcttgatgattccggtgtcgctgtaaggtataggtcggatgggggtttaggaagtagcaacaagttgaccaagaggtaaggagagtaaaaaagcacacatcagcttcgaagctttctcgcgtcttcgtgcaatcaaacagaaagaggtacatacccagaggtcaaggtgtacttgatatggttcaacgtggtgtagaccaagatacctgaatcgtcccaggcggccgacttgattctgatagtctcgtgaatcatgcaagactgatcgagactcttgttggcgatcgtgatggctgatcggatggtggtcataatgatggtgatccgacatccccgctttcgtcagctcgggaacagtttggaaaacaaaacaaaaaaaaaacaaaaaggaggaatagagaatagtagaggaaagaaaagagtaggagaactgactgtgcttgcccaacaaggcgacctggctgttatctgcgttccagatgacatacttgatcggctgggtggtcaactcgttcagcactcgctgctgctgcaagtcaaagagcgagatcgatgtgggtccggcgaggaggacacaggccgttccaccgtagaagatctctctggtctcgaccgggaccttgaaggatttgacgattgagaatgaaaggtctctgatctcgatggtctgttggagagaagaaaggcggggagggggggg

SEQ ID NO: 2915 - DNA, 2545 bp, Xanthophyllomyces dendrorhous
ggggggggcggaggcgaaagcgatcgcgcgcaagacgtcagccggagagttagatatttgagaatgaagaaagaagcaccgggatagatgagaaaggcagaaaaccagcttacctgggtggccttgttgaagacggcgaacctgtttcgggcgacaaagagcatggatgttccttgacctcgcttggcatccgtgttggaatcaccgacgataccctcctgtggcagtctgaaaaagtcaaagatcccaccgtccgaggcctggaatgtacgcggcacgcaacagacgggcaggcagaccgatcagtctgaatactaggcgacacaatggaaagagaacgacagagaaaagaggagaagagcgcacctcggagacaaggatggacttttcggcagggttgtaactcaacgtgagggcgggcgagtgtgccggtcctagtttcttgatgttcatcactccgatatcggaaccgttgctgagatcgtgaactctgacggttttttcacggacgtagaacagtttctcctggtacagactgaaagctggtcgttctctctcgagcttgaagacgatgactccgttgtcatgggctgtcgggcagaggcacgagggagatggagaaagagtgtgatcaggatggagaaggggtaaaagaaaaccaaagaaaaagacaaaagcagagggacgaaaggatccacataccagcagcaaagaggttcaactctgggtgagcgatcaagccccagaaccgatcgtgttctctcctaaacgtctggacgggcgtccgcttgcccatgtcccagatccggatcgtcttgtcctcaccggcagagaggatgagctcgtgcctgggatggaagagtccgacgaggacgttgttgaagtgacctcggcaggtgtcgacctcccaggctttggtgtccgacattcgccagagcttgatctgtcggtcgtccgagctcgagacgatcaaaggcaacgtcgggtggaacgaggcccagctgggtggtaggaaaaagagatgcgagagcgttcagctctgttttggttcgctttttcgctcagacaaagaaaagaaaaaagaaaaaaaaagataggaaagggactgactttactccacggtcatgtccttccaacacgtatttgaccacggcgtcggtacttccgaacaggtcggcctgaccggcattcgcccgggccatctgctcttcgaacgacatcggctgatgggacgtgtttttctttcgaagaccggagatatcccaaaccctgacggtaagatccatcgaggcggagacgacaaggtcctctttcgggtggaactgggcacacatcacgtagtgattgtgtccactgaatggaggggggaagagaaacaaccggggttatagagagtattcggaaaaaggcgcgacaggatgtgtcaacgggttgatttctctcgagaaaagcataggcagagggtagatctgatggaaactcacgtcaggatggcaatacagtttctcgactgccagttccatattctgatcgtttgatcatccgacgcagagatgatccaggggtactcatggtggaagaagacggttcggacgtagtcgagatctggcagatgttgaacgagggaaacaacccagctcggtcagccgagagcaaagaacggggaggcaggcagagaaagagaaagagaaagactgacggccgttcatggtgaacaagcacttttttgtcttgtagttccagaccttgatcttgtaatcatcagcggccgaggcaaagattggctgggtcggatgaaagcagatccctctgactgggccgtcgtgttcttcgaaccgttcgaccagggtacccatctggtagttccatagctggatcgttccgttgtgaagggacgcaagcagaagaggaagctttgggtctgtgtgaataaaaggaaggataggtcaactcaatggttctccatctgagatggacggtcgagagaaggtcgagaagaaacacgaacggaaggcgacgccctttactctgggagatttggactcgaactagcggtcggggggggggacgcgaaggttgacgacgaggcagcagtaggaaggccaagaacacgtccaaacgatgcaggcgatgatgaacagaagagttgagagaacaagaacgaaagaagaagaagaaaaaaaaagcggagagacggtcagtcgttcttccttgggctgggagttgatggatggggggggggacatacctgatcgttcggaacaagcacagatggacacgcatgccatcacacaagcagcggcatcaccagcagcagcagcgacgccgacacaagcaccaacatcaacagaagaacatacacaacacaacacatacacacacgcaagagagagagatgagaggatgaaaacagagcgtcagcgagtgttccagccggtctcttctgttttttctctactcgtcctgaccgcctctgccggggcatgcatcctgaacactgacctttgtgagcatgcgcatcttggagagcgtccgagtgaagcaa

SEQ ID NO: 2916 - DNA, 1392 bp, Xanthophyllomyces dendrorhous
ccccctctgatgggatggatgcggagggagagaaagagggaggacgacagaatgatggagggatagatggacagaaggcaaggacacgctggcgcacacaaaaagaacaagaacagagagacagaggcagatatgacggattctcattgcatctttgatccaacatacacatccacacacacacacacacacacataggcagcctcagtcttcgtcttgttcgatgatggtctcgtagcctacaccgatccagtccccacagccgtcacacccgatcacgtccacaccttgctcgagatcgaccgtgcggatgacgaacaaagcggagcatcggcagggatacgtgtaatacaccggctcgtcttcttcatcgtcgtcttcgtcgtcgtcgtcttgctcagtcgtcccgtccgtcccgtcctccctggcagagtaatgagacgtaaagagggacaaagagatcaccgtccgtggattcatcggttgaggagtgttggtctctctgtcggctgggcgagcaaaagagaacgcgatggacgattgtatgaacacaagaacaaagtcagtacacatcttgacagtgaggacggggaacaccaagaggagaaagaaatcgatagaagaagaaagagagaaagaagagaaagaaaaaaggacagccaagatacgtaccggagtgcgagtgcataggtgcatcaagccgaccgagtctgagctctcgatcgtaggtctccctgccgagcgggtctctgagagagttccaagcctgggtgatccgatggatgtgctcgttgtgttctccatgtccgtccgagtcctggccgtgtttgtccggatggtactgaggacggccggcgagcaaagcaatggccaaagaagaacacgaacagagcgccatcagcccacattcgttctccacagcactaagcaagacagacagacaaatgaacaaaccccataccttcaacaccgcgttcctccaggcggatcggatggactgttgggaggcatccgagggaacgtccaggatctcgtacgccgtttgtggacgtagaggtgaaatcgtcgggaactcttctttttttgttttttctcttttgtccttttttacttgattgacgtaaggcgcacgaagagaacgccgaacgttaaacgctatctccgaccaaagagagagcgagaggaagcgaaagaagagccaaaccggatggacggttggggagaaacgcaacgaacacgatcccagagcgaaaccgccggctgatagagaaagcgggattcagtctggccattgaacggatgatgacatcctacaacacatcctataacacatcaacccacatcagcaccagccgttatccgtaacacaccatcgggccagtccaacacgga

SEQ ID NO: 2917 - DNA, 19412 bp, Xanthophyllomyces dendrorhous
ttccttcttctcaccatcacccccatcatccatcgttcagcccatctcgagctcgctcattcccacaggcgcacacagcacacgctcgtctagatctcctcctcgttccagtccgtactttcgatcatgtccgctcctaatgtttctcccaagaaggttcgtctcctccgctttcttccgttgatcgagcgagatccgttcttttttggaatcgtctcgccttgttggctcacttgattctttcgtctctatgcccatcgtttgtgtgcgtgtgtgtgtgtgcatgtcgctcggatcatcctcccttgcctctgtggcacgctcggttggccggtgtatagagggtgctcgtcaccggcggtgccggatacatcggtccgtccatctgcctggcgctggttctctccttccgacaattcctagaagatactcttcggaactaacatcgaccgtgatctcgtctcttttcttttcctttgttttcttttcttttcttctctgctcttctccctttggcctgcctccactaggctcccacgccgtgctagaactcgtgctcacacagagatatcagcccgtggtgatcgacaacggccacaactccaagtcagaggccatcaagcgaatcgaacagattgccaaacaacaactcgggttcgtgtcctcggtcgaccatccgtacactcgttctgcatacgttgactgacctagatccttgcgtttgctcttgccttgatccgctttgtgtgtgtgtgtgtgtgtgtgtgtgtgtcttggttgatcgatcgcctcagcgatgccaacgtagagccgatcgataccttcaacctcgatctcacctcccaggatgcagtcgattccgtcttcaaggcctatgaggggaagggtggcatctggggtgtcgtccatatcgccgttcgtccgaatgcttccttggttttgttcttgtcaagctcacgttcgttagcttacccggtcttctctccgtctgcctgtttcccgcttcctcggtcgcccgagctaggcctggaaggccgtaggagagtctgcggagaagccactcaagtactaccagaacaacgtgtcggccacgatcaacttgcttgatgtacgttcttcttgtgttccatgtagaatggatagacatacacgagtacatgtcctccttaccctacttctagcccatcactcacgcctttccccttctgctttgccgtccgttgcccgttcagtcgatgcaacgattcaacgtcaagcacatcgtctactcttcctctgccaccgtatacggtactccggagctgatccctatcccagagagctctcccatcaagccagagagtgtctacggacgaacgaaagccgtttgcgaggccgtcctccgagatctcgtcagaggtcggtcgctctgtgtgtttctaatgaccgcaaggtcctcggtgtctgatttgtttcttccctcttttcctttcttttcctttcctctctcctttcctcccttctcctctcctctcctctcctctctacaggtgatccggagctcaaggctatctcccttcgatacttcaagtgagctccttccttaccgaccggcatatcttgatcttgtcactcgccttcttcttcttctttcttgtgctgaccttctttctcttccttctcttctactccctatttccgcccctccgtcagccctgcaggagcgcacccctccggtttgattggagaggatccaaggggaaagccgttgaacttgatcccactcctggccgctatggccgtgggcagatacgtcgagggaggactcaaggtgtttggagatgattaccccaccgtgtaggtcattccttgtgctccgttgtctttgtcttggaatcatctcgctcacacaagatggaactccccccttctggatctggaccgaaacctcaacaagcgacggaacgtgtgtccgagattacctccacgtcgtcgacctcgccaaaggacacgtcctcgcgtgtgacgcgctcgagtctcccacactcttcaaaactccggatctctccgctaccgcctcctcgccagccaacaggccggcgcccaccttggcctcgctcccgacctcggacgactttgcacagggcatcaactttagggcgttcaacttgggcaaaggaaaggccttcagtgtgctccagatcatcaaggcgatggagaaggcgttcggcacgacgttcccctacgaggtcgtcggcagaagggagggcgacgttccggacttgacggcagacccgtcgttggcagagaaggagcttggcttcctcgccaccagaggcctcgaagaggcctgcagggatctcgagaagtggcagaccggaaaccccaatggttcgtcccggtagtccctttggttgccatcagtcttcacatacgctttctcggtctttttgtacttatcagtgctcatgttttgtttccttataggctacgactctctctaaacggaggaaacctggcctcttttcacccttcccccttgctctgatgttgtctacacaaactaatctcatgtgttggcaatcagctccgctcgtctctctttccttctttttttctctgtttgcttctcctctgcttgcagtccatctatggtcgatacccacgtctagagtatgtggtgatttccatcatcttgctttttttcttgtcgttttcttttctgatctctctctctctggttcccatctgtcgctcgccttcactgtgttcgtcgtctcatagacatcttggaattggtttcttttttgttttcaaactttggtcgctttcttggatgtgtttatctctatcgtataatctttctcttgcttccttcttttctccagaccttttcttctgccgctcaaatgcgtccttcttcacagacgggtcctggtcttgtcttttacttatttctttgctctatcttgttcttttggtcgttcttgcttcttgttctatattttatgtcatcttataatgcacagcgggcagatcgtcgtcgtcgtcgtcgtcgctgaaataagaatgttcaagttgacgataatttaccaatcccctccggctaacgagattagccggcggcttcccgggtttctctccatccgttcatctttatctgggccgctgcctagcttgaacccgataacctactttcattccacccacgacatcaagcatccaagcatccaaacggattcacgcccacgcgtacagaccgatcaagtcagaaagcacacacccaacgcagagagaatgccgctgatcacagattccctccagctacaagagatagacgttaacgtgtttacctcgctccccgggatactggagaaaccaaagaacgcaagaggagtctttggcggccaggtcatcgctcaggccgtcttggcagctacaaaacgagccccagaggggtttgtcttgcactcgctgcatgtgtgtcttcttctctcatttgatccttgtcatctttccgtctcttggcttcccttcgtctttcgcttttgaaccggatgaagatcggctttcggtaggcttactgaagaaccgatggtttctctttcggatagagctacttcctagcagcagcctcctcttccctcccactcatcttcttcacggatctcctccgccaggggagatcgtacgccacgttctcggtctatgccactcagaagggtgtcaagatcttctatctgatctgtagtttcaaatcgaccgaagacggcgcactttcgttccaggttcgtcgtcctcgtcttcttgttcttgctctttctgctggtttggccccagtacgctcaagtcaacgccgtcgctgatatcttccggtactagatgaaactgccggaaacagtcccgagaccgtcagactgtgtgctcagagaggaccgtctgcagacctttttggatcagagtcattcctggccttcagccgtcagagtcactctacagaacgtcgtcaacgtccgtgttctttcttcttcttcttcttcttcttcttcttcttcttcttcttcttcttcttcttctctttctcttgattcatgaggaactcggtctctcaatgcccaccctttcttgccatcctttggccttcctctttcggacaccaacaggaaaggagggactcggcgatagccatcatggatgccccgctccctgaatcgatgagaccccaacgggcgttctggctgaaggtgaagggtattgaggtcggtgcgctggatcgtgggatgcagaaggtgtgtccttcctttcttgctgttgcgctttctccctttctcttcccttgttgcgtttcgattttcgcgctaggaaggacgtgtctagactgatcgacaccgatctcggaacatctcggttgggggtttggggtatttaaaatgatatcaataaaaggcggtactagcatatctgtcagatttcttgttcatcggaaccgcccatagaccgctagggatcacaaattccttggagcccgggaagggaaagtatgagcttgggatgaacgtctcgctcgatcataccatttggttctacgagtttcgtccccttccttttcttgttctcaatccgcgctctgtctatgactgctgctgctgctgatgatgatgatgacgacaacgacgacggcgttttcaccgatccgatgggatcaacagtaacgatttcgatacatgcaactggctgcttcacctgatggaacccatcgtggggggtgacggccgagcgacggtgcacggaaagatctttacagaacacggaaagttggtcgccgtgactactcaggaaggtgtcgtcagacctaaacgaccggctggctcatccaagttgtagtctcgtccgggtttagaccttccggccggagggatcggacatacatacggggatgcacacgatcagtgttcttccttcctatctttctatctttctttctccctattcttttcttttcttttctctttcgtttctctactttcttcgtggctgtcgttgcaaggcacgcgcatcgctactttcgttcctaaaacagcatgcaactctctccgtctccccccgtatggtcactctcgacaagcccttcggtttctctcttctctgttttctttttctttttcttttttcttgtggtataagagagcaatactagaaatacaacagtatccaagactgaacgaccccagcccagacttttccctttgcttgttcttcgatctctgtctaatcttcacgtaggcgctggctgtggaactgttcacatatgcgtatgtttccaaacaaacggccgacagatagagatgatgaaagaacgcaaacacacacatatgcaggttgtcagatacgaaagcaagtgctccaagacgaccgaacgacattcagtcggacgctgtcatcggcatacaccctcatcagcagggaacgagagaaggagagacgtacgatatccttcatctgactattcgcatcgtcgaattgtttctggagatactttgcctatcgaaaccggtaccatgtgtggatcaaattggccggataaagcacgccacacattctctgctcggtcagtcggttactcaaacgtaaatagaatcatctgctcttgctctaaagcgagacctgtcggacggaccttcttagttagattggtgatctcgtccgagagcgcggcttcttctgtcgaatgggcttcttccagtgtggatcttggctggaggaggaacctgtttgtatggtttgtttgatttcatttccgtttcgttttttgaatcgagtacagacgaatgatttcgtccgtcagtgtttcacacacaagcatcatgtgtcggccgggaagacactcattcgtgaggtgggtacgcacatctttccgacccctttgtacatccgaacgctttcctcactcggaacatcgcccagctggcggacagtcagctggagcatcttccgttccctctctttcgcgaggatctgggcgttgacgagcgagagttctttacgagatttctggagctgcacttggatttgttgaaggacctaaacgaagaagaaagaaacccaagccgtcagaacggacaaactcgagatactcgaccgattccaacgctcacacgatgaatcgtttcctcgttgagaccggacatgtcgatagagctggtgcgatgcttctagaacgatgcctgtatggtgattcttccgggatgatcgctcacagatgtcgtctctctgggtgtgtatgctgatggaggccaagggagaaaaaggaggtggatgcttaggtaagcatatatcacgtgacatacttcttggttacgcttggttacacacgctcttttcccactcgctctctctctcttttcgtctcgctcgtcgttccgctcactctcacctccaccaacaatcttctgtgtctctcctccctccaatcttcttggatctcacgtctcgcaaatggatcagtacgacgaggtaggtgtattttgtttgtgtgtgtgtgtgtgtgctttgtttgagcgtctgggtgtggtcggctgatcgttcgtcctatgtccgaaaaaaacaaatctacttcctggtggaatcttgatctagtttggaaactacatcgttcgttcttcttctacttctcttcttattctctctttatctcttacttcctatcataacgtcatcaccgagactgacctggtctctgctactggccgctaaacgcgtctcgctcgaacccaacaatcaatcaatcaatcgataaagggaccggactctgatgattctgacttggagagatccgacgacgaaggagtggatcattccgcccccgggccggttcctcaacagcagcaacagcaacagcctttagaggggtttgatgatgataacgaagatcacccgatggatggtgcgctcaccgttggactcagtgcagatggtgagtcggacttgttctctttctcgctctacgtatgatcgagagaatctgaaccgtccgagcttgttcatctacgttttcctccattctttcttgccctttctttcgcgtcgctttcgctacctttgctgctaaactcgatcttcccgacctaatcagccggaccggcaaattcaatcgtcctacacgaaaacaaaaggtattacaagtcggccgaggagacgtacggagaagatgtcgaggcgatggttcaggaggaggacgcccagctgttgtccgagccgattgtccagccagtgaaggttcggaagtacaacttggcagagaaggatatgccggtgactcgatacgaaaagacgtgagctactactttgttagatcttgtttgtcctctttctttctttccttcagactaagaattcggccatcgcgtcgtgaacgtcgtcactcgaaacgcgacggacgatcagcttcatgttagatatgcttcacttcccggatatgatgcgaaacgtcgtcgtcgccggacatctccaccacggaaagacctcgctaatggatatgctcgtgttcgagacccatcagatgacttggaacgccgaccagcctgtcagttcttccttctgatcttctccctccctcttttccctagatcctgtcgcttcctttgtagtactcaacgatatgatcacaaatctgctcacaggaacgatataccgatacccatgttctttctcgatcacgaggaatctctgtcaagtcatcccccatgtcgctcgtccttcagaccaccaagggtaaatcccatttggtcaacttgatcgatacccctggacatgtcaactttgtggatgaggtcgctgctgctagtcgattggccgacggaatgatcctcgtagtcgatgtggttgaaggagtaagcatttttagtttcttgtgctttcttctctgatcgcgttccataggcaaaagagtttgtcttcgtttctcgttcgtcctatctaaacgtgtctttttttctttttcacctcgcgcgacttcttcctttgccaaggtcatgtccaacacagaagacatcattcgtcatgctctctccgaaaacatctcgctcaccctcgtcctcaacaagatcgaccgattgatcctcgagcttcgattgccccctcaggaggcatactacaaaatcaagcatacgatcgaagaagttaacaccgtcatctcgtccgtcaacccggacccgaaacttaggttaagcccagagagaggaaacgtcgctttcgcgagcacacagaccggatggtgcttcaccctcggaagctttgccaaattatactcggatactttcggtacgcgttttcgctcggctctcttctttctctccttttcttgcaaacacagagcgaaccatccgagacgtacgctgaatttcttgctctttcttctttgcttcttcttcttcttcctcttcttcttcttctctcctcaatttctggacgtgttggatgatgatctcgaacgtgtaatgaatacggatgggggtgtggatttgtgtgggaatgcgcatgcatacgggtggtgatggtgaactcgtcttaacaaatcctaggtccccttgatgttgaccaattcgcgcagaggttatggggaaacatctattacgatgtcgaaaaccgcaagtttacaaaatcggccggctcgatcgatactccaaggtcattcgtccatttcgtattggaacccctctacaagctatacactcaggtatgtcctttctcatgctgcatctcactcgagttggttcctatgcctgatgaaagagcgtgttttgggtcggataggtcttgagtgaagattccgaaaatttgaaaaacacgctggcctcctttgggatcgttctcaagccagcgacgtacaagatcgatgtcaagccgttgttgaaggtggtgttggatcagttcttcggcccatcgactggtttggtcgacatgatcgtcaaccatgttcctagtccgaaagagaacgccgccaacaagattcagcacacctacaccggacccctcaacaccgacttggccgcttccatgctcaaggttgatcccgaaggccctgtggtcatccacgtgtccaagctgtacccgacatcagacgcgcaggagtttagggcgtttggaagggtgatgagcggaactcttaagaggggtcagccggtcaaggtattgggagaaggttattcgatcgacgatgaagaagatatggtgatctctgtggtggacaacctttggatctatgagtccaggtcagtttgcttcccctctttcctatctctcttccaggtctcttgggtttcatctttttgctcatcgccgttccccgcctcgtctgtatagatatttcgtcgagactgaggaagctcccccgggttgtctagtgctcatcggtggaatcgacaactcgatcaccaagaccgccaccatcgtgtccacctcgatcgaggacgacctatacatcttccgacccatcaagcacatcacacaatccgtcttgaagatcgctgtcgagccgatcgcgccttcagagcttcccaagatgttggacggtcttcgaaagatcaacaagtcttacccgctcgtgtcgaccaaggttgaagagagtggagagcatatcatccttggaaccggagagctttatttggactcggtcatgcatgacctaagaaggatctttgcagaaatcgagatcaaggtgtccgatccgatcgttcagttcagagagaccgtcatcgagacttctgctctcaaggtgtatgccgagacccccaacaagaagtaagtgctcaccgttacttttccagcgacgcattgtctggcgagtgcaaactgatggttggcttgttcgaaccttcacttggcaattaacaacctgcaaaggaataaactcacgatgattgccgagcccttggagaccgggattgcagaggatatcgagaccggtcgggtatcgatgaggatgactcctaaggagagaggaaagcactttgaggccaagtaccaatgggatctgttggcttcgagatctatctgggccttcggaccggatgagaacggaccgaatatcttgatggatgatacccttccttccgaagtcagtactgttcatttcgctcaaacccctcctcttcttccgtgcctgttttgtttagacatttgtcggccttaagcttaccggatcgaatttgtctcttctctcttctttcttctgacgatggggatgaacgggcaacaggttgataagaagttactgctcagcgtgaaggagtcgatcaagcaaggattccagtggggagctagagaaggaccgttgtgcgacgaacgtgagttccgaacactatcacctttatttatctagattcctccgagtcacgtactcagacagattcgcttttctcctatctctctagcgatacgcaatgtcaagttcagaatcttggatgctactattgcacaggaagctattcttcgaggtagtggtcagatcatccccacagctcgacgagtctgctattcttctttcctcatggtccgttgttgttcttcttatttcttctattttttctctttcctacctcgccttgtgtgctctttcctttattgactgtctatgtatcgcctggaaaacaataaaggcgtctcctcgattgatggagcccatgttctctgtcgaggtccaggcaccggcggattgtgtctccgccgtcttcaccgtcctagctcgtcgacgaggacacgttgttagggatacacccaaggctggttccccactctataccgtcaaggcgttgatccctgtgttggatgccaatggtttcgagacggacctgagaactgccacgcagggtcaggctttctgcacgcaaacattcgatcattgggctatagttccaggttcgcttctctattttctatcttttctctttccttgttctcctcccccttgcggataatgcatttttggttctgatatcgttgtttcattacgtgtcgttttaacaggagacccgaccgatacctctattgttcttcggcctttagagccagctactggacagtctttggctagagatcttgttcttaagacgcgaaggcgaaaaggccttggtgatggaatcgctgtttcgaaatatttggagcaaggttcgttcatccaagcaaatcaagccgactttgtttccccgaggttgctgatgtttatatccccttatcgatctcgttcaatctctttcactcgcttcttacagatacgatcatcgcgctttcagcatcgggcaacgcagatctcctcggttaagtattatgttttcatgcaacaaaaagcgaatgcacagggtgcccttcctcctgtacaatctcgaactataacttggtcactccttttcatccttcctcatctcttggaacatcgttccttcttttcttgaccttcctcctccgtcttgcaatgtattacaatagagaatgaatttactcttctgtactgtacgaacgaacaagctttctgtgtcgatcacaatttctggagcttcatcagtgtcatccttgttctctctgttcgctcatcttttagaagagtcaaggaagatgggttaaaagagcgcctttgagacgagacatgaacatatatatatcaaagttcatcctcactatcgctccccatgatgagttcgctcacaatctttcccctcttacctttcgtcctcctccctttcttatcaaccacaacttcctcgatctctcctctccagaccttccagtttttttctaacctctcgatcgtacgttccactcgttccgcccattcatcttctttctcggacgcctcgacctctgccaggtcagcaggctctatcggatctcccatccttccttctgctagaccgaggacacagtcccagagtgctccttccgatttgttcagattcgactgatcagactcgatcaggatccgatcagggttacagcactcgatcgtttctggaagattggtcaatcgggggatctttgtaggtgtccgtgttggatagagaaggagtggagatagggataggtatatgttgggatgttctttctgcggtttatcataaagatgaagtcggtttaaatgaaagcggaacaaacaaacgagacaggacagagaatcggtgcaagatctttctgtctccttcagagaagagaacaggattcagtagaagaacgtaaagacaaacctcaaggggcttccaagcctgccattttaacccacaactatgtatcagcaccttgactctattcctccaaacgagcctgtctcctccaaacacatccatctcccaatatctcagcgcatcctccacccaagacgtcactccgaccgcgtggaagctgactgaacgaccccactcgacatctataggtgtgctcagaatgatatccttcaagacggccatctgagcatgaaggatcgttcgttgatgctccagcgaggtgaagaaaggtgtcagcttcatccgagtcagccttgccatatctttcttttccttctcttcactctccaagtctaacttggtcaatgaagacgtcctaagggtacaggactggtttgtgatgtcctcatccgatcgatgcgcttccaaccattcaaccggaaacgggaccctcgcctttttgtctagaccgacttctcccagctgagaccctgggaacttcgagagattatccttcaagccagggaggagactcgatagatgcgtcgggttcggaaggtacggtaataagtcgtcaagaagcctctggtgaaggagcggtgatttgttggtgagaaagacagagctatagtgatctcgtttggagaaactcggactgatgggcttgagagagatctgatgggtcgtccatgggtgataacctgtcgagaagaccttttcgagccatcaaacacccttctcctcttactcaatcatccttccatagccaatgaaacagattggctcaccgaaagaaggaatgactctatttccagctcctaccgctagttcgaccacctgctgttgatccttgaaatcagaactcatcgccgtgatcgagccaacattcaatccctttagaatctctagcgatccaggtgaaggcgtcgatgttgttggatggcaatgtgcatcatgcactgggtagtcggggggaaatcgacgcgatggtcggtttgtttggaaggtttcaccacgatcaacccaagcgattaatgaagaagggagaggtgagctcggtatccgtggcaaggaagaataggatgaactggtacaagctcacgtcgactcagaagtttaggatctggaccttggcttaattctcctgaacgagcaggacggtcagcgtagtcgatggacgggcacatactatagaacagccagtttgctttggctccaagaaagtaacctcaaccgatgatggttgatacatgggccttctggactagggtgttctcagaccacaaaccaccaaaatcgtataactcataggtttagtttgcccccgccgatgggggcagtgtcagcgtcggcatcagtcttagcgtcagcggcagctgtgttaaacaccagcacaattgatgatgcgaaagattgttctcctcacccgacttcatgggctttgccagctgttgagattgatgtctccttctttgtaaacaatttcgtttaatcggttcgactggctgtaagtcatgatgaacaacctggtggtggatctacagtccatagaccaaggcatatagagacaaagagaaaggaatgatatgtttgatcgagccacatgcagctgatctcagacatggcatccaaagtgttatgtatacaacagaagagaagagatcaagtctccctgctgaaagatcctccttctcctctaccgacacgtcgcctgagctcactcgttctcctcttctgcatgcaatgagtcatgtcccatctcgaacagatgatcagggatcgggatcccatgaaagttcatcacagcttgaacgtcaacctgagtttgaattccgaggtcagattccaacgaaacatccggatcattctgactatcctgtctatcctgctctattggttgggttagaccggaaggaatgacagacactgaagtagacccagatgggcgtgaagcatcagaaggagtcgacgtgaagtcgaccatctctgtgtcttctttcggcgacaataacgaatcttgtgtcgttcgcttgtctgcagaatcggcaactaaagctgtcgcttgatctgaggagacgatgtcttcttgagcagatctagtcgactggactgaacgaaacccccaaggagagcccgtcagaatttgaacatcatccccgccttcctcatgtttgacgtcaagctctggaagagtaacaggtcgagagactggcgacggagtgtccatcaccaatagatctagtatatcttcatccgagttcgttgtcgctttcttcttcgacttcgtcgtggtcggagtctgcgttagatgcgtggacggccttcctgctcctgttgtcgcgccacatggagaaccactcgcgatcttcttcttccgagactttttgttcggtaattcagcttgagaaaacgactttacttctaaggttgacgcccttgatttccctttcgataacgaagagggaccaccggcagagcctgttaaagatttaacatggggagtcgtgtgccgtactttggcgcccggctgttgagttctactttctgcagacaattcgccagtggatggtcgtctgacagccgcctgcgactgcgatccacgcgaaggaacagaagagaaagacgcgtcttgactcgactttgacaggtcgaggtctcccgatttctgagaaagatatcgacgcgattgggagcgcagtttagaaggagagacattcatgtctgggcttgtggttgaggtccgtggttgggactgtgattggagttgagactgtgactgtctttgggatgaaggtgagccggccggatgaggacgcgaagaagagtgaagaaaagacgaggtggaggtgacgatgatggctgccggtgcggacccagaagtcgacgagtcggcatggtatgagctggtctgctgagtgaagtcagacaacctaggcttcttgtgatgaccgagttgctctatcagagattctgttgctcatgaggaggtaagaaaacatgcagcagatcagatttctatatatctccctcaaatcgatacatccattcatccggtttgcattgagtagatccatcagaggaagaaatgtttctctgcgaattctataagaagctactcacctagtcctacactcttcttcccctcccctctgtaccatccatctcgaaatgttacctctaacgcgtctctatcgactgattctgaacgtttcagatgatcctcgacgtgtttctcaagtgagccaagcgtgagaaacgatagacggcagaatccccagcggcattgatgaaacgatgtgtctccccacccgctcatgttggttattagatgtgttcttgagagaaagattatgccctaaggcttggtgagagttacctcaaccgatgatggttgatacgtgatccttctagggttaggatgtcttcagaccagaaacctccaagatcccatgggtcacgtgttcaatttgtgccagcctcaacctcatcctcaacggttatggcaatctcaaattcagcctcactaaaaacagtgtcgaactctagcatccttgcctcctagttcttctcctggtgaagggctatatgcagcattttgcgcgacgcgtccacatctctgttccaccaagtctgagaacgaacagagaaaaacgatgagtactcgacacaatgtcctgaaacattctattagtgatgactctatcgtccatgaaaaaaacataaattgacaaagaaataaaacaaaacaaaacaaaacaaaacaaaacaaaacaaaacaaaacaaaacaaaacagaaagacaaggagacagagatgatattcttgatcgggccatgtgcagctgatcttagcggtgtcccgttagacgcccggtgtcaggtatacaacatgatcatcacagtggtcgaggcagccaatggtcttaagatcgttctcaatctctggaatgtattggctgagctgaacacatacttggatgcttgacttatcagactcatctcttcttctgtcagactcgctacctcaatgctgccaagtgttgtagatatggtgaatataagtctgagagtagaaattgatacaaaggatcaggttctgtacagttccttgtataaaaaccatatggcttcggttactacaaagcaacctcagccggtggtagtcgatacatgtcaatcaaccaagcgttccttgcagtctgtttgatccatgccaaagaacccttcgtctgccctcaactcgttcgttcccctctgcagatgttcgatccggcagctcgattgcttctactaattccgtttcaatccacttatcctgttgggttcgctcaacatcaatctcagtctcgagggagtggtcaagagaaattcgtgggggatacctcctcttgaggccttcctttggttggtcacgcgaagtcagggaacgaagggttgttttgatagaaagtgcagagagcgtgccgcctggaaaaaaggcatggtaagaagactgtgagatgtgcttcgagaagagaaaatactgactgtacgcaggagatattccagtgtcgatcaaaaggatcgctccatcacaacgagataccataccctgtacaacaaaggtggagagtcaagatacatatcgatatactctcgatagtcttagaaagtagaaacacacctcaaaattcggggtgtgacccatgacgagccttcggactccgatacggctcatgacctcctttgcattccgacaggcttctacatctggatccgtagcgtatcctctgtaccaaactgtttggggtgtgaatgtcaaaccaggaaggaataatagttgcgatcagtcttgagttagggattcttgatagccggtatgggcctacgtacgaacaccctctccaccccaaagatgagcttcgtctggtgtcaatgttgagggtaaaccggaataagggtagggcgggcttgggttcgcttgttcatccaatgctttccagagaaacgatttggctaactcattcagcgcttgagggtagggtgtcaggttcggtgcataggtcgggagaccggcatgaatgaaagatacggcctgtgccatgaagaacattagcatttggtattgccccgtaggcatagtgagagtgacctcaactgatggttgtcgatacatggcacttttggacttgggtgccctcagaccacaaagcaccaaatcagcaattgaggcaactggttaacgtacaggataaggagatgaggattctgaaccgagtttcagcggatgaagaggaactttggctgtcaaagagtagctatagactcaaccaaacatcagtaagaagtctaatgagcaagagaagggattttgctcttacttcgaaagccacatttttccaagctccccgcgtggcgaaagcgcctgtcgcctgttctgaagtccgtcgtatgtcttgatgtcatcatgtgtgacgtatcgccagtcacctgcataccacaatggaaggaaagtcacataaggatccggaccttagaacagtttgaagacaagacgaacccagagcgttcatgatttcatgattgcccaataatgataagaattgcccgccatttttgatagcatctgatcggagcgactccataaatctatagagctcgatggtgtcgtgtcctcgactgaacagctccttgtatcaggacggcatgtgttctgtcacaagtatcagggcgaacgagagagaagaaactcactcaacgatgtctccggtttgtacgagtgtaccattgccgagaatccatctatcctgacgatctatgactcctgccatccgaaatacacgcttggcggtaggtagagaaccatggagatctcctaccgcaatgatctggctaaagaaaattgggtcagagtcatccgctatcggctctttggcaaccggactgttggacggaagcgaggttgaaggggagagaatgaggagaataactatggctgtgagtacaaagagaatgaattgaattcttgtgatcataacggccatgtatgtctctatcgggacagatagagtgctaggttcagtgatagctatgaccgatgatggttgatacgtatcctcttggacttgggtgccctcagactacaaaccatcaagatcctatgggtcacgtgtttaccttacctccattggcaggtgttagagcgaaagctgggctgataacaggagggctacaattgaagtagccacagaaggaatctgaggttcaaagaaagaagctcaggcgcttggaataagggaaacaggattgatagaatcactaggtaacgaggacagaaggacgaggaagggtagaagtagaaagtagaaagtagaaagtagaaagtaataaagaaatcaggcttcagctatctatggacaactggtcgaggacgcccgtcttgtacatggttcttagatatcatgagctctgaaaggaatgtgcgcgcaatacattgcacaccgcatacgacacgtgggagacttgatacataagaaacaggatacgtgggaagccagagaggaaggagagatgagagtgaagggtctacgggtcagcctgtagaatgaatgatgctcaggcaacatccttgacagtaatcctctaaccctaacttctcgtcacacgtgactctttcggcgtgacacagtcacgtgatacgtaaaacttgttttattctcaaaaacacattttgaaggagtctacaatgttcccttcattcctccatcattcactgtttcaatctctttctgaagagtgagtcttcaattctttaaacgaacacacctatctttcttcggaggtgaagccaaggctctttgaatgatgcatacgtctatccatgacgctcaatgaaacaactagtcttgcacgacgatgatgttctcatgttaaccatctttcgggactgaaactcgagctcctggttccctcttcctccacttcccatctatttattgctgcttctatctgttttattgtgcgtttatccaaattccaagatctttttcactgactttttttccctccaaatattttgtcaacgaatgtagatgtcctaggttttatgattttatgattctatgatttaatgagctttcctgtcacgctggttacacagccaactgtcgcaaatgtaacattatgagcgtgtacttgagatcgttgagagcacgcgtcacaagtttccctccctttttttttttttt

SEQ ID NO: 2918 - DNA, 10742 bp, Xanthophyllomyces dendrorhous
ttttttttttttttacttccttaccgtcccgccttcttttcgttgcttgtctttttgtctctttcctgttcccgctttgtgctcttgttttagctttttcgtttcttccgtcttcttggcatcgacccagtgatatggaaggttggacccacaaaagagatcatgaaaacgtgctctgtccgataaattgatgcatgttcagtggaatagaccacgatcgagaacaagattgagaaaatgaaatgataggttaacattcatccattcattctatccgggacatcatgacgaaacggagacggttgtactcgtctttttggtcttttgagttttcttaatggtttctaccccttcggtgatttagcatctcaccaacttactggatcaaactgaggctgaggcgagtggccggccgatggttgtggctgatcggagaggaataggaacgagatggaggtaactcccgttgcgcggactgaagggtcatacagttgtcaaatatatgctaagattcaaagacgtggcgttttctttttttgtatgtgcgtgcctctttgttgtcagttaaggaaccgatgaccaagtcaaaggcacgatgatcaaacaggcgagaaggtatggagggtaactgagcggcggaatcaattcaagaagccgtccaccggtacagatagatgaacaaccggccacccaacatgcttttctcaagatggcgcatcaggtcggttcggacgacagatgcgtttttctattttgccttaatcgaatttgacttgaacattacgtaacgaatgaggcaatcattgtttatttatcggttttcttcctctcaccacttttcttttgatgtttttttggttatagactaaaaaagcttatcgggccggatgatctctcttagtgcgttttcttgcagaacccttttctgcgctaacatcttgtttgcccgtttaatccttcccgtcttccaagagcctttcgtcatcattggccgcggttgtatatttgtatgtgtgcgatgaatacgtgtgcatccttttattgcattgcgctccactcaaggactgttctcggaagagaggacgatcgagaactcatgattacagttgaggctgcctcaatggttttgtgaaactgagagcgaacacgtcaaggggagacaaaacaaagaaggaaagacaacgagtcgagagagcgttgttgaaacgctcttgaactttgaagaaacgaaaaaaggaggctgagtaaaatggaagaggacagcacttggtggtagtccgcgaattcagtcctaaacccacgcagggccaataaagcccgatgcgcccatcagtcctcacgctgcttcggcatatcccctctgccctgggtacctctcgtggtacctcatcccgcattccctgtcaagtggcaaccacgtcctcttgctctcgctgatcactactgagcgccctttgtttttatgttcggtgagcgccgccccgaaacgtttctggagtgctggtggtggtcggagaaacaacaacaataacaacagtcatcgttctcatctagaatgagcataccgagagagacccaaacgtaaaaacgcaatataccaaacaaagggagaggtacccacggcgtgcgcacctatgaacggaagcaagcacgcacatgggattcatctggcaaagacagtcaactcaatcctataaagcatcgtcctcacttgtactcactcttgctctctatcccgcttaacgtccttcaaagtcccttcgacctttcctatcaaaagccatcttaccctttcttttcctttcctctcttctttgacactataaaacatgatcttccctaaggccacccttgttacacttgctcttgcctccttggccgctgccgctcctatcgcctctgttgatcccgaggtacgtcatcgttcatgatcgcgacgaatattcaagcgcaatgttacatgaccaagctgacttgtaatgtccgtgatgtcatatcgatagtggcagaaccacgccgccgacctcaagcgagacgtgactcctgagtggcagaaccacgccgccgacctcaagcgagacgtgactcctgagtggcagaaccacgccgccgacctcaagtaaatatgtagaccaaaatctgttcctaagaatatgtcgttgtaattgtcagtcctagcctgttccctatctccgtcttaaatacaactccaactgaccttgatctctcaaacactcctgcgcgcgtagagcaatctgcttttcatcatgtcgggtctttactcgcctcttgcattccctgtttccttcttctatatagcctccaaactctgcttattgcctatttccggagtcgttcctttgttgccgttctgctattatctattcgttcctggtgcctgagtcttttgagagtgtcagaatgcatctcttctgaaaaacctttgtcctatacactcctttccttccaccattgctccttctttactttcgtttcttctcatttatcacccccaaaaacatattacctgccctattcgttcgtccttttgcccctccatacctttatcacttacctttgtatgaaatacctctttatgacactcttccgttgaattgggcgaatcagagaaaccaaaacataaacaacataaatatatcctttgaatttagagaactaacatctagagatcgtcgttctcttcctcgtcgatacagctttcctcctcttcgtgtactgattcaaatcactcgctttcgctttcgcttccactcacgctctcatcactataactcatatcactcccgctctcgcttccactatcctcatcatccccccctaggccggagagaacccttcgttcgacagcatacccgaacgtctcgaacgagtttgcgatctcttctgctttcccaggagcagacgtacaagcgacaacagagcttgctgggtcaaatatcggcaagatgtatttcctaagcgctcctagaatctcggatttggtcaccgactttgagaatacacacatgaagttagttcaaatgaagagacgcaaaaaaggcttctcatctgataacgctctcgggtttcaaattttgggacgaacctgcatgcgactcaaaagatcccttgaagaagaacgcttcaagacttcgttgttgaacgctagactacacgctgatgagagagacttctctttttgcgcgtatgcgaacacaagggatgattttgcggcttcgacgatgttcgaatccagtttgatctagtcatccccaaaaagatgggaagaaacgggttagtttgaggagaagctgcgcaaaaaaagacaaaagagagagtcgaaccgtctcatcggctagacctcgaataacacgagcaccctcctcgaaagctttgaatgcatcgggagactgaatatataccaatgagtaagcaaaagtaataaaattgtgagcacgataagaaaaaaggatgaaagaccagtgccgttgtatcaagcagagacagacgaagccactcactcggtagacataaaaaccaacggtgccggactcaatcgacagcgttactccacaaccgtaggcgaacccggcacctctgatatacttccaaagataactttccagagcattcaatactgctttcgtcacttccaaactcggtagatcggggtgatcccatccaacgacgcccttagcggtgtgattggagtaactgccctcgatactgggcaatgtgacaaggacggcctacaaagtaagtggaatgattggaaaaaaaacaggttaacgggttgagcaaatgaatacaagcaggatgaataaaagcagctgtaattactgatttcgaaggcgcctttccaagaggagagagagcatccttggaccaagggacagcgcctaattcggatttctgtttgaaaatgaggaagtaagaacgttcgcattcagattacgttggcacaagtagcaagcatatattcgacgaacaggcaaagctttaaagttcttgagccagctagacctgggctcagagaggttcaggatgtctcccgagacagctactctcaagtttcgaggagcagtgactgtgtcaacgtcacatacgtaagaccaaagaggaactatcagttcccatgaactactgacgtcacagttagacgggagaagaaagaagaggaatgttgacttactgatttctctgaacttctcaagatccctaatgacactctcaggatcgtccttcagtctggtagctacttcgggtaagaactccaattgcctcaacaacccattggcgacactcgtgctcttcccctcatccatgatcatcctctccgacacactcctcgcgaccgagcttccgtccctcttctgctgaggcaattcttgaacaagcttcgcgatggtgacctctaatcgatccttgacgaatgtggagccccagataagatctcgaatccaagcgatagtcgaaccatactggtgcttctccactttgatctgaattcgtagcagatcctggaaagcaccagcgcacccataatcggtgtagtactgaacagtttgacttatgaattaaattgaaaaatagcatgtcaaaattcacaagtacagtaagctgacaagattcgagatatagaagaaaagtcgacatactcattaagttgattaatcacatcctcatgactcaactcggaaccgttagctcgtttgataggcaatgagaaaaacgagtcttgccataaagaggcatacctgtcgcaacacgaacaagtgtatcagcatcggaagactcctttgtttaccataaccaaagccagtcaactcacggtcgaagatccgcaggtagatcagccgtagagagatacacattcaaggtaagaaagttagactgaaattaagttgaaaacatgtcagtacaatgtacgccaaataaagttacacatgaacgaacctggagatgactaaagtgaatgaaaaagggaagattttccccgtcgaaagcaatgcactcttgaacttggcctttcttcgaaacctttccatcgttgacagcagtttcaactgggatccacgaaatgctgttgacctaccgacccgtcacgagaggcatgaggagagtcagttggtgactcaaatgcaagttgacaaagacaacgaccagatgcttacatttgggatctggaaactttccaagatttcctttggaatttctctatcgttcgctgctttggccgccttcagctcttctcctttctgcctgagaccgtcctcgcctaggtcttttcgttgctgcttgatacgttccttctcggccgtctcgaccttagttgccagagcagccgacggcttaccaatgactgtgattgaaggagcagatgccaggtatctaaacgaggtcacgatgttcactattgagggtcatcctgatctagagagacagaagccgatgggagagaagaagaggaaagaagctagtcacttacttgtcgaggaatgcagaccagtcggtactggtccaggattccaattcatcatagtgtctcatgaagttatgggattcctgtagatcttctccgttagggtttccataaagaagatctagaacgtcgtcatataacatgtccatgtcagtatcaccttctcatcctgactagaacacaattatatagagaggacctaccacttatgacagcagcatcaataatcccctctctgatttgtcgggaatgacaacacatgtaccaagttgactggatcagaacaaggtcgttaacaccatagaaatgaacagaaagctcacggtttagcttcaagattgtgtagcgtctgtctcttctctctcctaaagaccatacccatcctttccatgtctataccttccttgacaatgttctgaaggaccttcttcaccattccactcatcttgtccaattgctcggcgggtacgtccgagagatagaacgccagttcgttaacggctacccggttgctagtgtaaagatcgattgatgtacataacggttcgggaatctctacaaattctttgttcaacggcgcaatgggcgagtcggtcagataagtagtcaaaactgatttttggtcccaataagaaaaaagagtgttcagtaagctttctgtgtagatcgaacacaaggaatcatatacggaccatcaatggcaaggttatcaatgaggttttccctctttactccttcaaacccgatttggacctctcctacactctcatctgcctctagaaattcaactacttcttctttctcttccgaagaccactcgacgggctcctttgtacttgtctcgaggaaaggccgcttccagtcagctggaggaaaactcggcgtcttggagagaatgtaaggctcgacgatttcattcagcgtatgcaggagtgaagggagtgggcaagaggaaccggtaatgagtaagtgaagattgtgagggagatagagagacgagtgatattctttgacttcatgacagcacacgttgaagattgccagtcagcatacatgtatacacaactgagcggaagacagacagatgagatgattgacttacttttctcgacagtgaggtccctaagtgcgcccattagacctccggtctcgcttcgataggcattagattgaggatacatgatccgttgcatcctagagatatacgagacagagccgagcgataacccgattagatggcataatttacgaagctcggttatgtttgactcacttgagcgccatcagatccccacttccattttctcgagcctgcatctctgcatagacaactccagcgttttcacccttctcattgacatggtgaacttccgtgacgaagctttcttttgtcaaagtcgggtagagaatatgatcaatgtaaacaggaagtagcttgagaaagccttcacctccagcgcaagagattgtataggctgtcatttgagtgtgtatcgtagtacattttcgaatacatgcatgttgtgttgtcagtttctggtagatgaaggtagaggaagatgaaagaatagcgcaaaccagtatgatcattgtcggtccatgcgttggttccatcggcaaacgacttatttgctaggttgtccaggatccccttgtaagggtagctcgaagatcccagaaagatgaggtgctctagggtatggggtcgtccggtactacataggagaagaaaaaacgaggtatacatcgatgcataatcagactcgttgatcatacatgtattcacttctattggcattttgggtcaaatacgaactcatcaaaaatctcggtaggctaacagcaaaagaaggggaaagacacgtcaatctggcaagctccgcttatactgtcaaacaattataggctttcaagacgatagagtgtgtgcgcaccacggtgaatgtcccgtttacgataggtccaggaacaccagcccaggtaacggatagaccggtctttgtcgatctccatttttgaatcggaacagtggaagaggggggagtaaacgatctgactgatctcggtcaagaagcacacatatgattccaattcaagatacgggccacagtaagccagtcgtgcacgtacaacgcatgaaaacaatggttctgatagatttacataccaagttcataatttccatagacagtctgcccttcctccatgggaagaggagtcgtggtgggctgagtgtgaagagacatccttttgagcggtgagtagggcgtagaaaaggaagctgaagaaaacgatcggatgaacaaagtggccaggtaaggtttagtgtgttggagtttgaaatttctgagtgagtactggagcatacaacagatggggctcaaataaacggatctttgattgaaagaatggcctgatcgctcggagagtcggtcgagatggtttgacagaatgttcagatgactggtggaggtagcgagatcaagacgttataatagagactacaaatatttctaatcaagtcagagtgtttgatagttcgtgacttttaggttcccgcgcgacgagaatttgactgtgaagtatcacagtctggactacggcattttgtactgatgagagaagctactgatcaaaaatcgacaggcagacgataggcaacggtccatattcgtattcaaccatcttgtaggtcaattactgatcgataaactcgagagagttcaagttgaaaccaagagttgcatacccataacacttgttcgactcaggttcttctgtgaaacaaagaaaaaagaggttctatataacgagtgatttgagtgggagaaatatcggactaggatcatcttatgattaaagagaaatcaagtctgaagacgaattaagcacggacattcgattgacgagcagcgacggcgaacaagaagttgaggttagaactcgactggactgatagagaattgatgttgcacacagctagccagaccatcttactgttcggaacaaaaatgggagaatcaaactcgatctacgcaagctaagagtgtgatgtgataagataacagcaataagagtgtataaatctctcccaaagaactttccaaactggtcgagcaaagatgaaactgaggagtttcgaccaagattaccattaacacaagaatacaaccgtttactttgttctatgtaagaagagtgggaagaacactgtatagtcggcagaaagaaagataatctctgggcaggctgagccaactcattaagaaaaatgtccatatcgaggtcacatagagaacagcttctaactcaacagatatatcacctttgcttctgtctcacctgaagagatatctttgggtttactctactttcaaaggtataatcaggaaaggacatgtgtgctgccatcttgataattctctttcgatcgcttatcaaagcaaaacaaagatctgcacgtgacggctcaaggcttacataagtacatcacgtgatcagggctggccctggcccaaattttttcttacagtttacagagaaatctttcttttttttccactttccttcttcaaaccagtttaggtctttttgcactcgacctcttattcttactttcttgtctccttcccctcccccctttacttcttttattctttaaaaatggctttcggaggttagttggcttgttctcccattcaatgggttgtttggtttgccgagatcgctaacttatgagcttttgctgctgtgattttccctccacaacttttccttcgcaacttttcgtcttcaaataaaacttcttaacacatacaattctttcccgcttcatcttccccttcctcaaacacccaaaatctaaacagaacgaggtggacgaggtggtggacgaggcggcttcggcggtgatcgaggtggacgaggtggaggacgaggtggatttggtgcctccggaggacgaggtggaggacgaggtggctttggtggtgaccgaggaggtcgaggtacgtttatgactcttcttccaatattcttcccaatgaattatcagcctgatcttgtacttcgttacaactcttttctcctctttatatcttggactcgtaaaatttaatctaccactcacctcacattcaactctcgacctttttactttggcaatcaataatttacaaatgactcaggaggagcccgaggtggggcccgaggagccgatcgaggacggggtggccgaggaggaggacgaggaggagcccgaggtggaaaggctggtgtcggcgctaagggtggagctgctgtgatcctcgagccccacagacacaagggtgtgttcatcgccaagggcaaggttcgttttaattctcttttcctcaacgcgcctagtttgttgctatcaacgcttctagttctaatacctacgctacatttcatttatctaggagcacctccttgtctcccgaaacttggttcccggagagtctgtctacggagaaaagcgaattaccatcgcctcccctggagaggatggtactgagaacaagaccgagtaccgagtttggaaccccttccgatccaagttggctgccggaattcttggaggtctcgacgagatctacattgcccctgggaagaaggtgctctaccttggagctgcctctggaacctccgtctcccacgttgctgacgtcgtcggacctgagggaaccgtttacgctgttgagttctctcaccgatctggtcgagatctgatcaacatggccaagaagaggacgaacgtcatccccatcattgaggacgctcgataccccaacaagtaccgaatgcttctctccatggtcgatgtcatctttgccgatgttgcccagcccgatcaggctcgaattgttgccctcaacgcccatcacttcttgaagaacggaggacacatcgttgtctctatcaaggcttcgtgtatcgactctaccgccccggcagaggctgtgttcgccgccgaggtcaagaggatgcaggctgagaacatcaagccccacgaacagcttactttggagccctacgagcgagaccacgccatggttgttggatcctacctcaggcacaagtaatcgtcggtgacacttactttgaccttgctttgcgttgttcctcacgtcctgtaaactttcctcttcccctccccccatctccccggtgatgccctcgtgagggtgttccttcttcaccctatctccctcggcctgaatcctgcgctctcgccaag

SEQ ID NO: 2919 - DNA, 13110 bp, Xanthophyllomyces dendrorhous
gcatttatgttttcatctttcctactcattctctttcgttctttatctactgcttttgatttctttatttttcttttcttcctaccaattttttttccggaacgcacaccctttttctttttggcagttggcaggcgggtgtagaatactttcacgatcaaaaacaggaaaaagggaaggaattcttcatgtgcttttccccctgacatctaacaagttgtgtccgcaaacgcatcatccttcctcttggcgaatatttctcccctttcttttgcaagaaccagaataagaatgaaagagttgcctccgcagaccagcatcctgacccactgagcatgtagtaagtatactttgaaagacagaaagagagtttgtttccgagctttctattgccacgttctgtgtgtgtgtatgtgtattttgtcaagttttcttaacgtgtttccttcgattagctcccgaagaagggccatcaaggaatgtaaccatgtaaagaatcaagacgaatgcgcagtcaaagcctatgacgcaaatgttcgtaaaatacataattcgtggtgtgcccgtagtccactgtctaatcattttgcttagtgtgacaactcaaaccgtaaccaccgtctcagtttcgctctcgctctcgctctcgctcatcctcgttcctccttcttgttcttctctcgtggtaaacggctttctcaccttctctcttctttcttctccatcctttcttctacgccttctcattctgtcgattgatcagattctagtcgctagggcacatactctattcgatctggccagctctgtttgattggtcgactgtttgtccatcagttcttacctttctcgacaaacaggctctttccccttgtttttacccgatcgccctgtcagtcgtactctcaagctcggttcgttattctatcccttctatatctcctgctttgtctcagagtgtcaggtgtttgtgtccgttcggctagaagctctgcttgatctacttcgttagtagctttgcttctcttcttctcctctgacatccgccaaagggacttgatcgctaaacgtaccgcatccgaatcttctttcttgacagccatcagagaccgatcctgtacccgacccttgatccaattttgttcccttccccctctattccttacttacccgatatcttttggtcatctcatccacatcttgatatatctgaattcggtgtctcgatcatcactttgtcgctcctgcggttaactctcaaagttcctggtcggtatatttctcttccaactcatgaagatcataaagcaaagaaagaaaaaccgcatgttactcactgtgtctgctcttgtattctctcgttcgggattatccttgaaaacacaaatagaaatcttggcgacccgatcatccggtatattggtccatctgtagaatctcgacctaatccgtacgtacctatcacaaccctcctggttgactctcttctagctctgtcgtccctttcctcttcgattcgtagtattaggaaaccatctaatctccttgctgccctttcatctggcgcatgactgcatctcgtctccgcattcgaccctcttgatctctcctccatacgtacttcgtgatggataaggaagatgcctcagtcaagacctcgcaggacatcgttcagccagtcttcgggtggcagtcacggtagtggtggctcctgtgctatgggttcgtcctatctgcccttttcatctctcttatagacctaggagattcgttatgtttctagactctttctttttttctttctggtgatctcaagctaatactatgccttcaaatccctccaacgcgttctcaggttcagaagccacacctcctcatgtttcctacaacgcttacgcccaaccaccactctacccagttttacccatctcgtataaggattctgaaacaaaccagaacgcccatacgccgacgttctcatcgtcatctcctaaatccaactctcccatatcttcgccttccttccgagctttgagccctcgaagattgtcgatatcaaactcgccggatgggttgtatccgttggaaccaccgctgcctccaccagggtttcaaccgccggtggcatttaatccggccgcccaatcctatcttcaatcttcgagagagggtgaaagtagtggtagcccatcaagcgagcagtcaggaacaaatcgagaagtggtcgagccaagatgttagtgtcccatctttctcttctgttattcgttcaactgtgctgacaatttttttcaaattcaatagtgggatcgccgtctctgacgggtccaacaagctctaactcgtcgaccctttctcaatctcagatccgtctagctcaagcagtgtcagctgcccgtcccatatttcgaagggcgagttccggctcatcggtgtcatctaccaagtctaaccgttcttctgcagacaaaaattcctctcactcatcacccaatctaaaacattcgaaacctttgcaatctgacaacgatgggagcagtggcaccggaccctcatcatcgaccggcgtacaggaaacttcatccaccctgtccaactctgtccatccaccgatgtctcttcgattgccctctactctacaaagcttacacaattctcggttcaattcagatccctccaatgtccagtctagtcacgattcgtccctctcggacggcgtggtttcctctaaaagtgctccggtctcgactagtgcaagctctttagaacgactacactctagtatatcctccccggcctcttttatgcctgggaccccaagatctaatcatgacgcttgggactctgtctggcctgctgtctccccatactccatccctcatcttccatcaaaaccgagtagcagtagttctagcgttaaaaatagtccaccgaatactttaaacgggttatcctctcccatgcacatcgctctcagtccgtcgacgtcatttccacctggtttcggtagtctaacgaaccggacgccactttctggtcacgctcatcatcggagaacgacaagcatcggtcgagtgccatctcctggaacttctcctctactcgggatgtcgccgagcggctctcactctaatcctgaacgcccgtcaagtcctgcgaaaaggagaaacagtttgagtccttccgatcattatgggactgagaaccgaacattgggaagtccgcctccgttatcactagccggaggatcatccaccttattgtcaggtccggagattttgccgggcaaggacaaaggtaagggcaagtcgagagagattcatccatacaatggccacctcggattaggattggcggacgtagaggcggattcaagtaaagaaggcgggaaggataagattgattccgacacaagatcttctgacagatcagacaggcctctcttgttgatcgaagggagatcggtgtccaacgagtccaatgcaagtcaagacagtacagaaacagtcagacctgtgtcgtcagaatatcctatcaattcacccagtgaagaagataccacgtcttctagtccagtttctactagatctttaacaagccccgagagctcgtccaatcctttgacaccaccgccgccatcttcgtcgcttgacccatctcaacaaacacactcagctccccctcttacccaccgaagagcatcgtccccatccccgctccgctcttctcctactgtaaaatcgaaaacaggtcctttcgccccgtttccagtgcgggcatcatcacctctgtatcattcttctatgatgtcgagcgctgctcggagtacatcccccatgctcgaaaactcggccttggttcattcatcagaattgaaaagtccaagaccggttcgaattgaactgccactatctgatctcgttcatcggtacgaggaaggttacttcggggaagaggagaaagagaatgacaatgaacgaccgacagaggagaaagaggcacctccagatggaacaccaaatgatctggagtcaccgtctacgcaggaaaggctacacgagaaggaagtcttggaaggacgtaaccacttggcgagtgctagggaaactgtgccgatattgatggaggacaatagtgaagggttccactctccaacatcgctggctcctgccgaggcgttgtcgcctgttttagcttcagagaaaggagtagaagagaaggaggatgatgtagaagagaaggacgagcgaacaaaggagaaagaagaggaagtagaagacgagttggacccgacaacgacatttaccttctctgtgcctccaacgttttcgcctccaccttcatgtaccttatctagtgcgcatgtcatcaaaccgcgtgctttgagctcttccccacctgcgttgtctgtaacttcgttcccgttcagaggtccgctttctccagatttatctcctgccttatcccagcaaactcccggctcgttctttccacctcaacctccgtttgatccgtctattcaaccgacggacgagaccaatgtagatgtgatatttcctcagagtggactagtcggcgcacctgggccggcacaaatgggaagagatgggtatctggctgtttcggaggacatggaccttgaggatgaaggtctgaccactctcgaacggattttcttgctcagtaaaagcgagtttgcccatcatcggttcgtctttctcttatttttctttttttttcctctataagagaccatcatcattgatttcgaactcgagaaactaattatatgcggtatggtcgtccgatgttttgtcacctattactttcttttctcattgccgatccgtatatatagaatatttatctccaaagtgattggagactgggtggaagatgtggacccatgcgaaactgtagaatatgttttaccgttgttaaactcgttaggaactgacgaaggtatgtgtcaccttccttttgaatttagtcagatttgagacctaaagattaagggcttgtgtctgggtatttttatcttgttagacgagtctgtgagagaagcattggcacctagcctgcacaaaatcctctggtttttctattctgtaaggcccttcatttcatgctctcaaggccaatctcggacggtgttgacattcttcttacgtgtaccctctgtagtcttgccatctagtcgcggatgaggaggatccctacttctctgaacatcaaacggccgattgtgcgggtgaatcagctgtggttgtcacatcggacggcatagacgtcgtcccaaagccaacatccgaggaagtctcaacctactctgtgctggtttctccatcctctttggattcgagctcttccgaaggccagctgcaatctaatcactctggaccatcaacacagtcgacgctagtctcgatcgaatcagacgcaacgattcttagcgagggcagcgcgtcccatccgttcggacccgattacgataacaatggaaaacccaattctgacccagtgatgaaagatcgacctacgattaatgtccagacattcactccactcattggttcgctgcttatgagccagagctcgattgtgtgtgactcggctaaagcggctatcatcggtatcctcgctcggcttaggggcaaacagctgcccacgtttgacccctggccagaaagacatatcactataggtgaagagaagacgtgctatgcccagactggacttcatattcataaggcccaggaacttagccaggaggagaagagtattatcgagaacgagttggtccaggcaattgtcatcggaatgtctcggttggacgaaacgcagtcaccgtatgacggggactacgactactatcctgatgaagattctcatcaaagccaacaccacagtcatcactggtcagaaaaggataacactgggtcatccgcagagctaaattcagacgttcaggaagacggagattcacgtcaacctattcctgagacggattactttcccacatacgaccacgtttggaactataactctgacgatttgatagctggttccccagcgtcattagaggcagttccgtccaatgcggacagtactgagtccgacttggaggagaatgcgctaggcgaaagtgcaatgtctccaggaattgagtcgccgatgtctcgtgaaacgtacaactatctccaccccaacaccaggtttgattcacccagtgcgcctccggagaaccacagatcattgtctgaagaggagctctacaccgagcagggtatcgaggctgatgcgtccgacactcggtacttggatgagatggccattgaggcttcccatggtagacttctctcgatgaaccttatcgcgacggtcgtccagtgcggagtacttgaaggagagaatgaaatctataattctttcgttgcagaggttctgagggtacagaatgatgaatctttctcggttcgaagagaagcggcacttgcgatgggagaattactgaaagtggtttcttcagaggttgccactgagtatatggtgattagacacttattcttctcatagcagttttgcggttgactgaatatttctaacatcttcggtctttgggtctattcttgtccagttgcctctattcaactttttcgcagctgatgagagtcctcatgtccgtcaagccgcttgcctcgctcttcctgcattggccaagcatcttgttccacctgcatatcgacgcagccactgtaccgaacttgcgaacgctttcttcaacgacgagatcaaagaaattcagaacactgcactggaaattcttggagagcttatccatgctttctgtgagcaaaaggagaacgttcccgaggagctcatcgctcatttcctaggtcctccaacggacgatgatgacacccaatccagtatgccaaagacgttaagcctattctcgggcggcgagggtatgttaggatatgatgaggatcgcgattatcgacctatagtttgctcgttcaacgtaaatatcttccctatttggcactgtcttctgtgtaacgttcacaaaagctaaccactctatccatctatttatctgtgatctagtttcctgccgttgttctcagtgttggggttataggctggcctatgattcgagacttctatctcaagctaactaagaataagcaagtccaagtcaggcgaagcctggcggcttcccttcacgacatggcccagattttaggtaatgagatcacatctgtggatcttgttcccttcttttatcgttgtctggacgatgtaccagaagttcgggagcgactttgggaaaacttgcacgagtttctcgcagcactggatcgagagacctcatggccgctcattcgcaagatcggcgagctcttagtccaaggtcgattaggaaactggcgtgtacgagaacgattgatgtcgtttttgccaagcatgtcggattctatggttagggcttcgcaagggtcctacttagtcgtttctttacttcgagaaggcttgatcgaccaggtggcggctgtgagagaggcagctatgcaagtggtaagcgcatacatagacttctctttgttttggataggaaaagacgtgattcaaactaatgaccctacattttgattattttaggttccgtcactctataaagtttctcgggagctggacagcgcagacaccttgaaggctctggatgatgtgctgttctcaatgattaaaaaccctgcttatcgacagcggttgacctgtctccggtgtgtttctcgctttctggaccagaagtttgacatcaaccttctccgcgctcgtgtattctccttccttgttctcgccaaaggagatcgggttgtcgacgttcgtctttcattagccaagcttgtggcaagatttaccgaagcaggttcgtttttcaaccacttcacgaagatctatatgctctttcttctcgttcagagtgtagtgacaacgagtctgacggtgatttcctcgctttccgttctcatttttctttcgttgcatcagatggaatgtgccctgtactttcggaggctcctcctgaacttcttgatgttgctgagtcccttcggaacgacgaatcatttgatataagagaaatcatggcgaccgtctttcgaaacagtccccctcttcgacaaccttcaaccgtagcctccgtgataccaaatcgaccggcttcagctcaagcatcttcctcaaagagttccctccgaaccgttgaccctggaacgtctgtgtcgccagaccttgatttaccagctgtccttgagtcatcagaaaccgctctacaactagaaaatgtgcctcccctagattctgttcaggccatcagctttgaacaatcatcgaatcataatccgcttacagccgagccagcttctggcgatccgatctcttcacctccagaggcggacttatcgataccgttggtaggtcaaccggctccgaaaccgtcttcacacatcgtcggatcttatttttctcctgtaccagaaccgctgattgatcagcttccacgcttgcgtttgcgatcggtctctcctacattcattgatggacctggggactatgtgtccatcaatacgtctgggtcaaaaccataatccgcctcgtcgtcggctggtccaccgcagacataagctattctccagcatatttttctacctgttctttcactatattcatcttcttgcctttcaggaattcttacttgtttcaacccatgcacaacatgtctttacggttgtctttgcacgccttttgggatgttcaccaccacttaacttcctcaagacatgggcttcgcatcttcctccctcttctacactatcttttctcaatctccatagacgtagatctgtttgctcacatcgttcatgaattgttttcccttttccctatatataccttctttgtctttctttcttgtttccttttgtcatctgtttctttcaacctgaagtatccaacgtttttttatttggattcggattatatttcctttttttattttgttttccttgctttttcattcatcatccttacctcatcatccccttgatcatagtgtattatagtagtgggtcgtttccatttcctaaccaatctggttgataatgtattcaataaataggtaatttcccctattcaaccatgcaggatgcccttcaaatatttctcacttctgctaaaaggcggaagctggaagtactcgaacacaaggaatagagatcacttgagaaagataagcgcatatgataatcaattttccgtgtcaaggtggacttcagggctctgtgggatagcttctactaaagcggacatcgcgcttcggacctggttcatgaattcgagtaaggaaagcctagatttctctatgtaatgatgagccatcgtaagtcgcacgcagtcaaggcagaaagaaagtagaaggggtttcagtggttgatcaagtgcaatcgtaaaaacgatggaaggaagtcaagacggcaaaccctgcttctgttcttttgctctgatatgtgtagtctttagagcgattttctcctctcgctctcgaatcaatcgtctgttatactcctttgaccagactgccaaccaagaaaatatcagcgatgaaggccgacgatctataacttcgtagagagaaagctttgtctcacgttcgtattcgaggacgagaaggcaaagttcttaaagacacagatcaaaatggaagcttatcagctagagtctgacaacggcttttcagagtaagttgattaagaaaagcttcgtgcgcgggttctacctgacgtcatgtctagaatcaatcatagcagaagcaaaaagaaagaaagaagagaccatgagaaccagtcacgatatcccacgacaaggaagagaaaataaaaagaagaagaggtatgaccttcctgaaagtcctgatagtcattctcaaattggttgacaggcgctcttaccaaaccgtcaatatcgagaggttctgcctatgcatatccgcatcggagagatcacacatttgccgcatatgaagcaaatcgtaagcatgtaagtcgttctgcatatctcaacgacatatcacccgatgtctctgaccaaaggcattgtcagacatacctttacttctagttccccgctccatcctcccagttctctcttcttttctgttacatcttctgcttctgcttcttcgtgtgaacagtcctcaagtgtcagagtcttctcaggtggaagggatgaaccctcgacatggttcgactcgactttgttttctttctgaagcttgtcgtttctccctcctggaacatcatcatcgtctgaaggggaaagaccaaaatgagaaggaggaagagaagaggtgacaggatcaatcgggaaagccgatgtgtgttgcttgtcgtcatcgtttgtgacgacaagatccgaaggtttgacatgatgttgaggggacagggggtgacttttaggggatgggctaaacgacatagaagctgcgagataagatgaggtctagagcacgaagaatgagtagatggcagttgagtggaaggttagcagacacagatataaaagacgagtgaaagtctggccgcatatagtcaactgttcgtcctgtctgattttttgatcacctttggtcgcacgattctaattctttactttggcctacgattccttctgtaaattcattaataacagtgctcagaaagaacgaattgttggtaccgtacgaacaaagaacgcgtttaaagcccctttgtacaaacaagacgccaaaaagaaagatctgtcgtctaaagtctctgcgagggacctttttgggttgctcgctcgctaagcagactgaccccacccaaacctatctgagggactggcatgttgggcaggctgaccttggacgtctcaggtgaaatgggatgttcccgagcaggatgataggccggggatgagacccctgtagctgagggaatgggaccgacctcggcgtgggccatggcggcagcgccctgagaagtgtatcataagcaacgtcaaaaagaaaatcgaaggcatttagaaccaatgaagaccggatacgtacgaggtcactgtctttggtaggcaaggtaggtcgcttagagtcattctggacctggtctgaaatcggctttgggacagaaacttcggcctcttgtttgtcgaaccttccaatcaacgctctatcgacccaagcacccgaatacacaaggagttccgaaagtgagtttgatgctcctcaatgatactccaaaacatacaacgtacagttcttctagcagggtggaatgccggtattctaaccgagtgtttggaacattagtcttgttgatatcgtttccttcgacaccggggtaaaaccatttgtttccgatccagtgtcgcttgacttccatgtcccatccagactggagaacagagttccgagcaagctcgcacatatctacatgattgacagggtagaaatgcgcggaattcgattcataagtcaacgcgcttttcatcaacagtcagagaccaagtgacgtacctgcgggtgaaagcttgtagatttgagcggcgcaagaatactcctcgagcaaaggttccttagtgaagtggaacttcaaacgggaaaccccatcatgataaacggctcatgagtccatttgctaacaactagatatccagtgaacaacagtagatagcaagctcacctgaagaggatcgtccgtagacaatgaaacgttcattcccaatcggaagaagtcggtaatcctgttggatagacgaagtactaaatacgtcagtcgttgaacatgatttaaggggggaaaaccccataaccaatagaacgtacggatttcggtcataagtcaagaacaatgcgttgttgctcagcggagacatagccagcccgatttgtctgaggtagaacaagtattgcatgaccggtactctatgtataggaggaagagacaagactataagtcaattggctcagtttcacttgttcctgggtgaaaagacatactttcgaagcaagataccgtgagaaatagagtgggaagtaaggaaagcggaagagagatggtcggtatcacctgcctctccactgtgaggtcgaagaacgaaggtgtctggtattaaaagactctcagtcagtcgatgaagttaattaaaaaaaagaaaaagaaaaaacataagtttaacttactgaaccctctctctcttctgtaggcattcaagctagccatgttgataaacatgtagtatagcctgtaaccacgaggtacccaacgcaagcatacaagcacatcagtgacccattctgtaagggttaaactcgaacaaaccggacgatcaaagccatattcaccagtagttgtagggcgggctgtccttgatgttccaccccttcgcgttagggaactttttgtaagtccttcgctcagcctttgactcatcatccacactatcgaatccaatgactcgctgaaggaagatatgaagctcagggtgagagctggggtcctgggtgacctcgaacaatggttggaatagatctatcatttcgaagcgacggtcaggaaaaaagtgtcgacgtggacaggaaatactctcgagtgatgaccgacagacgtactcttgacgatatcctggaaattttcgatcagcccgccagccttgtatatgtcatacaaccgtgggacctgaatgagccatcgaacattgtgcgacaggagcttgttcttgacgacccattttgcaagcttgtcccattcattgacattcctaaatgaggtatgtcaaaagtaaaattcatgagtccactaatcaactgatcgagtaatcgtcttctttgatgcgacagacctagcgtaaatagaaatccgccattcgacgttctgagaagacatcaaagacatatttaatgataacgaaaagacgttgaactagacttcgtatgcgaactcaacaaccaaacttaggaaaagcttacctgatacttgctctgttctaaatcgctcatcaactctatataaatatataaatatatat

SEQ ID NO: 2920 - DNA, 17598 bp, Xanthophyllomyces dendrorhous
tatatatatcggacagcgccgttagccaacgaacccagaatcttgccaagaatattatttcgagtgcgtaccttgagtgagctctgctaaataccgcccttcaatgtagttgtcagtcttcaggaagatctcccggaggcgggaggagccggtcgggttgtacttcaagttgaatttatcgaatctgatccccaaacaggtaacatatgagcgcggcctgctagtttctgcatttctagacttgaaaggaaaagaaaaaggacgaaccggtggtagtctccatgggcatgcatgtccatcgtgtcgatactcaaatcgtacgcggtgaaacccaaactttcaaacacctggctaagtgtgagctcgactccatcccgcacgcagacaatctcatccggcgagtgcttcatcttgctcttgatgaatcggagaagatgcttctgattcatactggctgagtgatgaatatgggtatcaacctatcaattgaaagagacgtcacgttttgtaaaagaaagagcacattacatgattagttaattctcaattgaggtacaggatgcaagaaaaccacaggacatacttttcggacgttgtagaaatctcgatgagggactcgcttcatatcagcaagttcttggtattcattaagaagagtgtagaggttccacttggatccaagatacttcagccttcggaaggcgaacgacttagccggaccgtccgagcaaactcgcaagactgtgaaatagcgaaaccacgtatagcatcagaatctgaagtgattgaaatgagcgatatgtcggttttaaaaaataacctactagattccagatcgataaagtattctcgtagagagggaagttctgtgatggatttcttctctgggtctaagacagaattagacgtatacgagtgatttatcatggtgaaagaaggtgcaggtcaatgagatgagagagattacatagtttgatacaaaaagaggtgcaggacacctcaaaatctggcgagaaatgaacgaaccatcgctctcaaagactctgtatactccatcgtctcccaactcccagcccttcgactgatcagatccaggaatcgggacatctttagcatcaaacttctcgtccctatccagaaagtggttgtccggatcattatcagacggcttccacctccaatgaggaggcggcggagagggatatatgttccagggctttctgtctgtcgaggatgagggaacaagtttcgcgagatgtgcgccggctggcttgagagaggatgcatcagaatactgggaagtcgggaaagttcaacgtcagataagcagcttatcacacgaggtgaacgtgggacaacctggacacggaacacatcaaacttacttgcatcgtctcgtcagtaaatcctctaaaatcggagtcgaaatcccgagggttgtcgccaattctctgataggagagcgccatgtacttgtctcgaaggtttagacacttctggaatgatttgctgagaagagtttgaacggattagtttatgtaacacgttccattcttgatctgaattctgaaacgctttgaatctggatacagagggataatatgagaaactcactaaagagcctcgagctcggatgtcaacccatcattgatcaaaacgtcgttggtattcccagtttgcttggaatctgcaaggcttgccttctcgttctttttgtgtctgtcatgcttgctttcaaaatctagttcatccacctcttcctccaagtcaagctcgtcgactccaagagcgggtgagagaggaggggctgcatgtttcaactccgaatgagttgtcgatgggctgacgggaccagttcggatttgatgagcaagatagtgagagtcggcctgaagattcgtcagagaccagtttggttgtgtttcagagaccaacataggaacaaagagaaacaagaaggaagctttccgttagttcacaatgagactagaaaaccatcgagagagggatggatagccgacgtgcatctcttaatctgtgttcttcctcatagtcaaatgtcgtgttgagctgctcaagcattggtgtccctgggacataggcaggtgactcgttaccatcttcatggaactgttctctctcggcaggccgtttaccacacatcagaacgaggtctagacagagatactaagatgtgagggatggatggagatacgatattctgtaaaaattcgatgatagtcagattctttgtatcaactcggctctcataagaacttcggctccggcatatccggatattgtgcgtcaatttcttgttcccctcctttggctggtccaacatcgagagtcttgcgtaatcatctctctttttcatctttcttggacacccaacgacatcatcatcatcgtcactaccatcctttgaacagaatgcactcgactgctcgcttgctctcccgttcggcttccttaggtttcatcggtctcggctcttctggccggcttcttgctcataatctcctggctggatccgctctcgagtcgtccaaacatgctaatggctctttcattgtttgcgaaccaaacgatgcaaattttggactgtttatgcacgagctcaaggagcctctgagagagaaggtcaagcgagtcgggagtggcgcagagtgagctatctatttgtcaatctggagtacgtggaaatagacaggtctgatgaaatgacgctcccggttctatcgttctagaatggctcctcttgcgtcggtcatccatacccgacttccaaactcgtcctctaaaatcgttcaatcggtctaccttcagccgccttcctcacttttggtcggactgaaagacacgacgttccctccgtcagagaatctgccgcaaggcatggacacattgttggtcgaccacacaacatatgacatcgatgttgcccagagcgtggccaaacaggtaggaagctggacgggaggacggaccggtgtggtggatgctgtctttttggaaggtagcttctctatcgttctgtctttcccctgctatttcctgctaaaactacaatcttgtttcctccttgctcgtctttattttattttgtttatacctccgcaacatgaatatcaggtaaaggagctatcccttcaggcaagatcaactttctcgtcggtggtaccaaacgagatttcgacgcggccgttccttttttgaactatataggttctagcgctactcattgtggtccttctggtgtgagtaatacctatgcaactttcttagaattctgaatggttacttactgaaaacggctacgtgtcatcgcatttggatcttacaacaggctggattgagtgttcagatcgtcaacaagtcggtctctcatcatatatcttcacatgtacagaaaacgcaagagaactcagtattagacaagctgatagtatcaaatgcaaacattcgtctacagctcgattctagcgcttaaccagattgctctatctgaaggtccgtttccatgttttcttttcttcgaccctcagtctatcaattgcaacatttgtctcatatgtatgtaatttacaacacaatcgtactctaaaggtatgctcttgggcagcagactatccctttgccccacccttctcgcctcgatcctcaaccgatcatctgcccaatcttggtcgtctgcccacaacaacccggatccgactgtgtcactcagtcatcaacctggttctaacggctacacccccattgggaggcatacaacctctgggttactcgctgacctcaaattggcgctcaacgtaggaacctctagggggtcacctatgccgttgggatattcagcggcgatgttgtatgagaacgtggtggaagagggagatctaccggaagcgaaggtaaaggacaaaggacaaaaagactttagtgtcgtttacgagtcagtcctttagtcttttcatctgtcttttctcttccgccctctttcttgtctgccaaacaaggtgactcacaccatccatcaacttttcctcggttttgcgttatgaataggtggctgcgagagcgagcggagggcgggatcgaaagttggggtcctagtgaagctgaaagctcaaagtagaacaaactcgaattatagataagctatatgtcaacggaagaaggaaaacatttctggtatcacatcaagaggaaacaaaagagaacgaccatgtataaagttctggatagaatacttgcataacaaaaatgagaagaaagaaaaacgacaaccgatcaaagatgaattcatccatctccaaacctgtttctaaacaacgcttctttaacaaacttaacaaccgactcccctccacacctttagtttcgtaactctgcaaagccgacgagatctatcaagataaaacccgcaaaatctcgacctcaagatattccctccccgggaggtgggaaacttcaaggttcaacttatagtgacttcactcgtttttcctcctcggccttggcagctttgacccaatgtccactctgatctttctttctaacggtgaaacaggcgatcccggtgtattccgtgctgtattcgtttaccatcaagcgagatcaacagaaaaagtcaagagacaaagtaagatctccatagaaaaccaggaaacagaatgaaggtggagacggacatttgccagataacagagaacgcaaagtttagatagatggccaaagcgacaaagagagagagcaggatgaagcccgaggattttgtttgggttgactgaataacgggagacctgtaagaatcaaacaggaataagattagatggcataacgggcaagaaagaccagcacaagaggtcagaagcattgacagtttggcagaaaggggaggaagcagggaagaaaacgtacacgccgaataagttgggcagattggcgtctaacgctccgatagccgtccaaaccatccatccattccacatcgggaatggcatcttagttacatgagctaggatcattgttcctaccttcagagttcgttaatcgatcgtcacggagagaagaagaagacaagaacaattccaatatcagcgacaggcagagcagagctcctccacgagaatgtcaaacacaaacagacctggtaagcgaacccgaatccaacgaatcctaaaaagtagaggaagttgtcagagtacagaattcgagtactggtcgggtagtcggccgcaagccaggcgagcaaggccgacagctggaccatgaaagggacaagtccccgaagaggagtatttatgggttgtccttttgatcggcgagcgacgacgacgttggagtagctgtaaatcattgacccagtcaatgagcaaatggagctcagacgtgagccatcgaaaactggaatgcacagcaatgtatgaacgtggagtgagagttacgagacatacctgccccagacgttaaaggccaagctgattgctccaaagatcatgaaactatcattcagtccaagatccatcagtcgcttgttctcaccaagagcgggaacgaccgagtcaagtttgaagaactggatgatgctctgatcccagaaagttgggccgtaaacgcctatccgaaaacaagataagaccagtgaagagaaagcaccgcgacccagaggtcagagtttctattctcgactgagtatattgttgggcagagacaaagacgaaccggtgatgcagtacaatacgcagatcatcagaataccctccacagggccagagaagactgagagataaagtgtgccggtgtggtactcctcccaagtggtcctggatatttgtgatagattgatgtaaagaagtgatcatatgaggacgaaggctggtcagtagacatgcttgatacagagtctacgctgtgatatgttcttaatcaaatgcaaatctcacagatagaagttagagagagaagcagcttggctagctaccgtccaccaacttctccccagattgagcgcatgggccgcaagaatgacttcgagctggatttgccaaaaagcgcgcgagaaaagaggagttttaggagatgctataggataaggaagattggagaaaagttacgaacagaagtgttcatcgcgtcacaaccatggtcaaacatctctcctaggggtcctgccatgccggttcgccgagcttgtttcctacaaaacacgtggagttttgcaaatctatttagtctgcaccttcacgtatcatctgagatgatgccgataagaaagtgagacatacccatcgattgcatccatactttggtatgcgaatagaccgataccccatctgtatggaagatatcagaagaaagaaagtttattattatttctgaaatgagaacgcgtacaaccttttaggctctctttgaaatagaggaagatattgtggacgaacgaccagtagacccaactcggaagcgcctgatcaactttgaactttgggtcgaatgcgagcattgtggcaaagttgacaaagatgatacatagaccggagaaggtgatctgtgggattgaagaagtacgcagattaacaacgaagctcaattgtaaagtctgcaagcacactcacggtgttgggcgcgatccatttcgggaagagaaggacaagtctattccagaatgggttcaagatgaatcgagaggtgatagatcttggttacgcagacaattgaatagggagacaaaagagcagaggtccatgagtatcatttgagcaatcccgggactctcgtacgaaaagacctacttgtcgataccagaatacttgctggatgattcaagtcagccaaccgaggtatcagcccaaggaatgaactctttccttcctttcatccgagccatagaataaagcaaaaaaggtgaacacaaaaagagaaagaagactgactactttgacaagttgtctatatgggtactcggaatgaatctcatgatgggccaagagctctttggcgtcgatgttcaagtatatgcgatatttgcttgctgctctgttgctgtttccttttttttcctctaaacagaatctcctatcgtagactgacgccagcaaagcatgcacgtgactcttgaaccacgtgacgtcacaactcacactacgagggttctagtcatacagggtgaagaaggatctctggtcaccatcatgtcgaacaatacatacacacctctacccgtatcccaagaacatctaggagattcccttgcgacatctcctgtcttctcgcaaaatcatgcagcaagctcaaatccagcatcttatccgcctccaccggtgcacgagacacctttggcagagaatctttgttcttacaagctcagcttgcctggagccttcacctctgatcttgacgtgatttgcacaaggggttcgagtaaagaggtttgtcctggtacacgctatctcgttgtatacctcacttgatcgttatgtcttaatcagatttggtacacacgcgctcgtttataggatatcgttgatcagctgtcttcaatctcttcgaatatactctcgcgaacgccgttagacaggatcatctttcagatacctgtaggaggtcaatggtctaccgttctggactctagttttgatgacgccatagtcaggggaaggccagatagagtcagagtgtcgatagccttgtcgagaaaagagtggtggagaagtaagttgtcgttttgtttcgcctgataaattagttggttctgatccaaactaatatcacgcatctatctccctctcattaaccatcacgatcagcttatggcttactactcgcctctccttttatcttctttttcttaataatcttatggggcttttggatgtcgtcatagatgtgcgatacaatacgataaatcttcaaagacgaactgattatatgctgttgtcacttactatgttctcaatatgcgatgtcgctctgaacatgcagcatgttctctcataactctagaccttgacctgatagaacggaaatgaaacttgtctctcacctgtcaacgacgattaaattttcactaaatctatttaggaagctgattaagctatgcgaccttattctctgtgcatctagattacgtctgacagcaaacctgaggtgaaaagcgcaagaaagaggagagaattacttctcctcgagctctcgaagcaaagcttcgatctcgtcttctcccacatctttcagtcctttcataagcttgtcaatttctttgtctccttggttcgtgttgacacttgatgtacttgttcctagagggctggtctcgtcggattgactgatagtcgtcgagagcgtggtgggtggcggaggaaagttgtcaactcccagaaattctcgaagacgagagtcttcaacggcatattcaaaatcttcgtatgactgtcgtggaaatgatcagtgatgattaagaagatagaactgcataattcgtgatatgcaggttcaagatatcgagttaagacgtaccccaacgtactgtatatgtatcaagtagcgcagaagttagacaagctcaaacatcatccgcacaggtcagatagatggaggcaaagttacgtacctctccgtcaaccagatatcctgggagcactccgttcgactttcccttccttctccaaactcgttttgcatcttcatctaacgcacagcttttcgtccgtgaagcccaatcacaatcagcattactgttggacgtgttgcagtggatatgagcactcactctgcctggttgaaaggaatgccgagaacggcgagcgttcggagaaggtactcttgttgcgttcttgctttagcttgcataggcaaagaagtcatctgtcattcggaaagggaagatagattcattcaggaccttgatttgtgcagaaaaacgagagcgatctgcatacgtatacggttactgggtgagacatcttgaatcgtccgagtactgctcacaagtcgtataaatcgttgttgtgttgaatgatgttatactgtagatgaagttgatatctatctctcgagattaatctgctcaagcatactgattgtcaccggctcagggtttatattgcaatgcgtattaataatttaaccctaaataatgacgtttgactgttgcaagctatctatatgactttacgttaacatcaccatcaccatcaccatcaccatcaccatcatcatcatcatcatcaacaatatgtcaatctttatcccgggctcgtggggtgctcaaattttcactcttgatcctgttggttgtcctttttgacaatgcccaagaaatatacagacactgatcatatctgtgggtctttcctaaaggaaacgatctatcctctctcagaaaaccctcggtcaaccgtatatacaggtcgggtcttacatgaatctcatgatggctgggtttgctgcaagactgtctcgttgggagaagaagaaagccctcactcaatcagaaaggaagctaggctgttagcaaatgtctctcatcctaacgttagttttggggcactttccctatcgtgttttccttccgtataactcaatcttgatgactctgctcgccaaccttaaatagatcatctccctcttgacgtccacctacacagtatcaccacccagtatcacattgttccttcctctcttagagacccctctctctttgatacttgactctccaagtttcaagcctgatgaggcagatttcatcggacaagcattatctattggatggcaatgcgtgagcgcggtagaggggctgcacgagcgacggatagcccatagggacatcaaggttgagaactttggccgtcaaccggatggcacggtggtaggtcctctttatttccctatatatctcaagtcaaacacaaaccatcttgcacacgttcatgtcgaactttggtctcttcttctttgatgtcagaaattattcgatctagggatcgcatgggaagagtctggaccttcaattcctggcgaaagagttgaagagagcaaagaggcactgatttctcaagtggggtctgggtaggttatgcaaactcaagcttctccctgctccgtcgttcttactaattagctctctggtaaaacaaaaccctcagcgagtatcgagctccagaactgctattctcgccacagaaatacgacccattcgcgctcgatgcttggtccttaggagtcgttcttgcacactttttcactcccttgattcgacctcgtccgttgctctctacgacttcttccaaatcatcctcagacgcatcaggcgacgacgacgacgacgatgacgatgatatggactatctgtcaacgtcatcctcgcagatcgaatcagatgatgaagacgatgcagaagacgacgacgaggaaaatggaaaaaattggaggagaaaatctctttttgtttctgatagaggagaaattgggctagcagccagcatttttcggatacttgggactcccactgatgagttatggcccgtacgtttatatcatttgcagtcaactctcctcatattcgagtccgttcctaatggctttccttgtggctgctctgtgtacgatcaggattttcatctcttccctgatagctccaaattgtctttccttccttcaccaggtccattaccctctttacaagagcttctccccaatctacccccgattgagccacttcgagctgaatggatagaacttctcggtggattcctacgactcgatccgatcaggcgaacgatgcctagggaggcattaagcttcaaagtgtttgatagtatagcaagtttcctccctgtgagctatcccggagccacattgagtagaagctgagggcgattttgttatctatttcgacttaaaaaaatgattcaagtgaaaagtgtctattgttcatctagttgtagacctatcatcctttgtaaatatatgaatgatatcttgagtatttacgttccattaaaacacatcgatatccataccccctccgtcgcattgactcaaaattgaacctagtccacacggaacaactgaagtcatgagatagaccatgtcttgcttgctcttgttgcacctcctggatcactcctaatctctttcgtccaaaagtttacggtcactttccacgtgcctactgcttcatccttaggaatgactacaactgttcgatcatcccattccggttgacgaacctcgtccaatgtccaggtgataaagaagcgttctttagtaaatgaaacgttccgataatgcgcgagagggaggagtgtcaggttgaacgtttgggcagggtgtatactttcagcctcggtcgtctcaatgaccgaaagactgtcgatcaacgagatcttttccaactgtttaatccaaaggtcctccagacaaaccgggcagaacgtaggtgtagcgaccatgcgcatcaagcagttctcatttgttggtcgataagtgacgttcccatacaaagaccgcgtaggaaaagctccgataaaatcaggatcagaattgaacttcttatctacaccgtactgagtgagttcaaccgaacagatttgtcgaataacttcttccctcactccttggtatttatcttttctgaatgaccgagagacaggcctttcggtatcgactagttcgaaagaaattacatgagctccggcagcgagtccatcaggaacaggatttcggatagatatccaagcccggtcgaccgagcctttccatccttctggtatagtccacttaattggtcttccatccagcttgaccaacatcctatcattattgtaagacgacctgttaatattctactttcaaagcgactcgagaaggaagaagagtaacccactcggcttcgtctctcaagccagctacagaaaatcggagcgcaaaatctgggtatctctcgattccatccggtacaaaaaacgtaattttccaggacgaagctgagagatcatgccatgggtacgcctgaagaggagtattcatatcctcttgacggggtttggatagagggtcggatagccaatgcgcccatttctgtttcacacaataaaaaaaaagatgccagacagagtctactgtctattttcctctccccatggacaacgtgatttggaacgaaagctcttaccgatgatttgagggacggggatgagttaactaagatagatgagagatagataaatgagcgcagagaccgagttttttgtgagttattctgatttcaatgcattcgtttccatcttcatcttcaaaacaaagtggtctataagcaaaaaaccaaaacacacctccagtgtagacaaatcctccttcgtattcctctcccacttcgatcagcgaatgctgtaggtgaaatcgatgttaacgaacaaatataccgacgacgacgttggcataaatcaagaaaagatcttactccaatctcatgccttagcaccaacgctccattgagcttggaggccgtggtaattctaaataagtagagagggtgtttagcttgtgaactgatatggtgagtccaagactcttagcgtgatataaactgatacagtttcagaaacatacgtaaattcccctcctaatccacctgcataaccgttcaccatcaaagtctaaatcagtaccaactggtcgcatcgaccaacgatggatatagaagaaaaactacaactcaaccataatatgcaaagttaccaacgatcgccatctgatcgcatcctccttcacccaaatacccttcccgaacaagtttacatgcctttctggcccgtcggcgatatcccgggtaaagcgcacgaagctcatgaccatctcggtatagtccaaatggagtcctaaaatttgcaattttttcaaggagagaccgtaggttggaacgtgcttatctaaagatacaatgtgaacatctaatctcacttctttggctgaccattagagcctaccccgctctgatgtgatcaagaaattagatgagaacaaaacacatcagtgaatgaacacagagcgaaggaggagaaagacttatagactactcaggatgtcggaaggagagttacctcttcagatggcacaaagaccccccaaaaattgaacagatcagccgtactcttaaacgtcccatcttccacgatcgagctcatcaggtgtttaacgtctttcatgaacttgcccctctcttccaggaggtctttacagacagcgcgacacacatttatatagagtcaggttaaggctactccgactaaacaagagatcaaaatttacttacaaccatccccgaagaaagcaatctacctcgagatcggacaattacagaatttccatagataaggtccgtcaaacattgtttggagtgaaggatggggatgggactgacgttaactcgattctcaacctttcctgataccctgaggggtataagctccataccgtctaactctccatccttttctccaagcacagcttgttcaggaggatctatatccgataccaccgacctgtcatcccagctcttgcaaatctcgtcaaatttcaacactcttcgatcggagggagggaaagtgaatcgtccatcggaaagaggaaggagagatgatctgtcgaacgcgagaatggtaatcaaacttgactcgagttctctccgtagaagagcggattgaggcaaccatgatccgctcttcaaatgattacaagtcaaatttaatgattggaaccgactacttgatcagtatatgtgaacgattcttcaaaccagaaaaatgattaggacaccaaacgaaccggtccattcaccagcttcctgacatcgacccaaactccgccatttgagcgaatgacctcgctcctcacacctcgcccacttcttatctgacccgtaaatggatgtgagacgagtgtacagatccgagtcgggtgatgaatctcgtatactaattcaaagatcggttcgttcttttcatcgatggacgacacaataactgatccggataactgtgaaagcaaaaagacagaaaggaggaaccaaaggaagattggcggaggacacatcgtgattgaatggactccagatttgatcaaattggatgaaatgtacagaggcagagaagagatgatttcgtaacggacatctccgaaaggtcatcatggatagaaaccagcaacaactccaagtctagcacactacatttcaagggatacactaaacgaccaagactggagaaaggggttggaaaagataagagaaggaacgataacatgcctgaggagagaacaaaataatgaacagaaggtcgaaataagaaacaggtaaagagaaaggagcttttttaggccggatattataggagtcggataccgagatcggaaagataaaaaaggtgatcctgatgaatcttttgtattcgtaagtctcaacaagatgcgacggtatggacgatacatcgagacgtaggtgtaaggcatcaatgacaggacagctaccacaaatagctgcagaaagaagttggatagaaggaaaaatgacaaaacgagaagaataaagaaaataataagggaacgcctacagacgattggaaggccagtaagaatctcgggtaaagaacaaacaaagagaagaaatagaaacgtggaagagaggaagattcctaacctcattgaatcctctcgtagaataataagtacgcgcatcgctctctgccaccgatctcccctgctctaccctctctagcagccgaatcagaaatacacacctcagcctcggtgacgggcacgactgactcgtcatcgatgtgcagccactggtttgtcggcggactattcgggccggataatgactgagagagcacagcagtggtataatggccggaggagacagtcggtccgtgatgatagacgacaccaaacaacttgtactttatcggcgtgctcgtacgtttactcggggacatgcaatcctcaggtatgatgagctctcctccgtagctgacaaccttacccatctttctcgcccctgctccaaatccacctgccgctccatcgtctccgacccaaccaaatcttttgaaggcgacgaccaaaacttttggtccaacctcgagccaacaccgcttcactgcctctctgccttttccaccggctggtcccatcacaaccccatgcacagtctcgggctcgaccaagtgctcaagtgctgtagttatgttgaaaactgacggcgaagcgatgtcaagaggtaaaggcgagaacggctcgagcgtgatagaaggcttgtgcgaaggggatggggtagagagtgagagggatgaccggagaagaccggtgaagagcgtggtgatcgacgtgggtgcagactccgtctgagagcatatgtgttgtagtcaatgtggtgagcagggcaaggaagagaagagaaaggacgatgagcatatatactaacagttttcaataagcttccctttcctttcttgcctacttcaacccatccgctatcttcgcctccaccacctccaccacctccgcccgatccagcaactcggagttcctcatctccttctgtaccgttgagagccttctgtgcaacctcctcctgaacgtctttcggttgccgagagagtaacccgagaacttcttcgtgaagcgtgttaaggaagaacccaaggaactcttctgcatcctcttggtgtccttgctatagagcgaggtgtgaatttaagcacattcacatcagtatcaaatgcacaacgaacaatctgaaataacaggagaagtacgaaccctcatgaacccgaaccgctccactcggcccatcgcctcataaacaccctcaggaacgaacgccccgaaaccacgatctgacttgtcgtccggtccaagcccggggaattggccttcggcaacgtaagcctcggtagccggagggaattctcgaaggaagttaatcctatatgtatttgacaatggtttttctccaaatcgcgataagtgtctgatccaggagctgtagaactcgggtgaagtgaaagacgtacatagattcgactagtgggtagtcgccggcaaggtctgccggcaaaatctgacctaggagcgaaaatagattatagaactcatgggtaaagatgagaacttgcaaaatctaccgtccgttgatccgtcgatgaaaacccatagtcagttgtgaaagcctattgacaatcctttctaaaaaaaaacgagcacaggacgaaatagatagacgacgtaccgagttaacgaaacacaagtttccgcgattgatcaaacctctggctcggactctcctcgccttatggtgaacctctcctttctttgcccctctcgctagcaattgagctaagcttgattttcctccagcagctcggcctcctggcttgatactctcagtagagctgccggccaattgagcggatcgaccgatggcatgtccgttcgaaccgcctgagacagaaacgacggaagatgccgaggacgagtttggactggctgacgaagttggtcgaagaagagctgcccaagaaacgggtggtggtttgggagctgctggggctgaagccggaaccggagtcgaggcaggggccaatttagtttccgagggcagctcagccgaggatgtactgggctcatttgtcgtcattgtcgtcgtcgttgaaaagaagattgaaggagaagccggggtagagctcgccggtgtagacgtcgaagtcttgccattgccattttcataagcaggagaggaagctcttgtcgaagatgtaggggtctggaatttactcaaagccggaagatgagcagtggatgtcgtgggagacggcttggtggaagtcgaagtcgatagaggggcagactgggtggccggggttactgattctgccaaaatacttgttctaggtttcaccttcatccttgcaggagacgaagccttggtcggttttgtgggcgatgatggttttgacgagccggcgtctatctctgaagcaggcttcgatacccgaatttcagaagcgtccgcattcgcagcttccccagacgttgtcacgcccgtcacagccgcctctgctaatgtacctgagaattctaggattgaagacgttgtcggttctgaatcagaggctgatggcacgataaccaccgattgatcgatcttagcactacttccaatgatggacccgttcgtctctctcaccctccgtcttctcggcattacatcttctttgacgtctaccatacgtccttgccactttccgacgccctttccaaacttgtctggcatttgcttcttgacctggatactgatggtcaagaacggtgcgtcagcggcttcactcggccttctgtcggcaaacagccaaggatgcggcggtggaggaagtcgggtcgttgtcgctcgggcaacaggttgagcagtttgaatgatcgacggctgttgattcggtactgacggagattttgagacggtcggtactggacttgaggaggtaggttgagaaagagtagaaactacagggggcgcccgtattgttataggcgatgatttgc

SEQ ID NO: 2921 - DNA, 14341 bp, Xanthophyllomyces dendrorhous
gagtgtttgttgttgctgctgctgctgattgagagaaggatgagaaaggtaataagattgttgaggttggaaggaggagtattgatggttcatcgaaaactgatgcggaggaggttggttatgagagtgatgaggttgaggtgatgagtgttgatgaagattgagattcggatgggcatggttcagctggggagaggcatgatggccgatatggtgggatggatagaacggagtggatggtccaggttgaggttgctgttgttgctgttgaggttgctgttggggatgcagattatggctatggttgtgattatggtgctgatgctggtgttgatgttgatgctgaggcaaaccgtatgaaggagcgatagatgggaacgtaggctgaaagccaatgtctaacggaaacgagagaaaaaatatacagagacatagaaagaagaccagcagattggagagatgaaccggaaatggtgatcagtatagaatccaagctctccgtacttgactagcgagagaacacgacagaggccactaggaaagcgacgaaggagcggaagaatagaagaaaaaaaagaagattattctccacactcagcccatcaaactgatgaccgtccttctcaactcttctcacgggacaatttactttcgcctcttttaacagtctgatgttcatctacctcggttccagccgctttcaagaagaagaaagacatcacttactgcccgattggtatatgggattgtagctgtaaggcgattgcccttgctgtggtggagggtaagcatgatggttctctccggcggacgatggaccggctataggatagaaggatgacattgattaatttttttccttctctttgctgtttgtttcgttctctatccggtttctgtaggattgtctcctaaggataaggaaacgaaatgggtgaaaaggagagaaggcgtccgaggaatagaaggtgacggtagagataaacctgaggagagaaaaaaaaagagattacgtgatggtcacacgaactgagttcgtcgtcatgttcatactcgtctaccttgcgcatcgcaagaggtcgttcaccatcaccatcgtctccttgttggtacgatatgtatagtctatagtgctgattaatgtctcatagtgactcgttagctagcctacgccacggtacaaggctttactctactttttgaactcactatttcgaccagagtgactgctctggttacaccacagaacactgtgatttcattctctagtctacctctagtctacatcgcgcatcgctgaacatttctgcacaaaccatgaggtccgagtgtgtgtgtcgaagcaggacctcaaaggaacagcgtatagaggcagacatggtattttgtttgatgactcgtggggaaccagagcaaggatcggaagggtttctcgacgactgattggccgctgtcggtgtgtcttgagctatcacaacatcaagatacaatttgtccaacattactctttctgcttgcaatctatgcttttcacataaatcgagtggcctgatcatattatcgacaacaccgctagctttcattacacaactattgtccatcagatagcctaatttcctattccttttagctgcctccacttttcgtatgctacatcgtcattgtcctgttggtgcgcaatgtcttcgataatcaacttctttcctcctgtcttttgacccaagatcaaaagaggaaatagaaagaaggcattggacttacggtcacaaaagcctggaccaatttaccaaaactactctgactcgctcgaacggattccggggtgagcgcacccaagtagttcatcgcgagcgattcccaagcgtgatatgtaaattgtccactttgttcgaaggaatggagagattcttcatgaacctgcatcattcaggagaaacttcagttgttgatattgcaagacagagcattgacagcataacacaatcaacgatgggcttacgtatcgaatccgggattcggtgcctgacccctcccatagaggccaaaagaatgcgcgctcgttcagaacggtcagttcgtttggatacctcctcgctaaagcctgttgattggaagtccatgtcgtcagcttccttgccaaggttgctagtgcgcaattaaaaagagacaacgaccaacccaaggcttccgtacactcaagccggcccaatcaccaccatcgaaatccttgtaactctccaaccacctctctaagaatcgttcacctttccgactcaagatcacagcattgcataaaccttccggatcgagtggtggtcggtccgagttgggcgaggcttccattgccatgaccatatggaacggtagaagaggcgcaaaggatcgtgtcactgaatcgatccggtaaagtatatgcacaagattagtgagagagaaaagctgttaggattcaagaactcgaggacataccaaatacatcaatatcgaggtagattcctcccgtatgttgcaaggcttgcagtcggatcacctgacagaccacaggggtttattcgagcggggggagataagttacatgtaagctgttgattttcttgctgaaggagacagcaagtcagaggtattctgaaacgttacgcacatcactcttgtgcgcaaaatgctcgagcttcctgccatatatctcgtcgggtgccggtgtctccaagagtgtcaaatgaggttccaaaaggtcccaaaatggtcctctcggcttgtacttgtaatgactgaaggaccgcaagcctgattcagttccaggtagacacacggatagacagagaccgcttccaaacacgcaatatcaatgagtatacacacaaatgaatctcatcaggctgtagattgacgatcgcgcttctgatggccaggtagctgtaatacggcagcagctcgccctcttcttcttctacgccctgcgatttatagccgtacacgtaatggacaacattcgggatcgcgtccgatctatcattcttggccggtgggtaatatgatggagatggtggaagaggcggtggaggaagaaatttggatggtttcacaagaaatggaggaggagacggagctacaagttagaagatcgcggacatcaatggtttggttgttagtctcgaacgagaggcaagagagagaagggacagatatgagcatacattgagaccagctgaacaagaagtatataagctttggaacgaatgctcccagtagcaacagccataggatcctcaagtttaacatccttattgaagagagcaatggcgaaggagggttggatctctgattttccaaagacgtcaaaaattgagaaaacgtcgactcgatcttccgtgcgttctcctgctgaccgagcggctactcacattcttgacgtgatttgacaccttgcttgtccagataggtaacatgcctggttttgtggtatagaaataaagaaaaaggacagcaggaggcagagaaacagtaaactatggacggcgagcagagagtctggaagagatgaaggcttcaggtaacctttgtgctgtgtttcgatcattcgctcttgccgtggtctgtatggaaataagtgtactacactcgatccgtctgcgcttccttccattttgtgcgaacaagcatgtcatcgcatgctgatcaagatctcgacatgatgtttttgatccatctccatcttttctcaaagttctcgttcttcttcttatagtacactgagatagacggcagaaagacttgagaaagtgaccaggcccagctgtaaccaattagatggtcatcgtaaccgccatcgtaaccaacgctaatagcacctccatcgttcgtccatctcgtcgtaccgtcttggatcctacctgaacttatcatccagtccttactcaactatctgaacaatacggcatccatatgttctctcttcgctctctagttcgaccagctcaagtgattcgctccgagcctgcgtctctgcttaggctgatctcctcttcacccagggtgttcgacaagattaccggttcagacaagatcgaccaacagagtgcggaggagcttcttaagaaggaggctgatttcagtgcgttcattcttatcctgttttcatcttcattttcaaagcctcgtatgagaatgatgatggagaaagaggaagtcgatagttctccatcatttgaatcttcgtgctatcttcctttggaaaacaacatcttcggtaatcatgttgaccgcggacgcactgaacgaatcgattgacaactttctttctgatcttcttgcaacgtatctctttcagaggaagggttggttcacactgaacctgaggaaaaggccatgatcaccgcgtaaatcgttctctccgcttctggccttgaatgttttactggtcttccaattgaattctgaatgctgactcctgaatctggaatcgacagagatcggatttccggggctcccggtatgtcctacgatttccaatcaatcagcccatctctacttttccccatgatctaaactgacctcatgtatcccatggacccacagcggagatgacacaccgatccgttcgaatctataagccgacaaagacgacaatgcagtcaggtcgagctgggttcaaccattggcgaatcgatttcgatacgttacagggctctggtcgatggatcaaccctctcatgggttgggctagttcgtaagttcaatcaatacactcgttgtctattctgaagggagatagaccaaagctgaatatctttatcggatgaacgatacagagctgattacatgcagggaatgactctcaaattcaaaacagaagaagaggctgttctttttgccgaaaaacagggtgtgtctttctgttgtgtttctagcctaaatcgtatgctaacgcaaggaagatctgattcacttggtcgcaggatgggactatgtcgtttcgaaacccaacgtgcagccattcaagcccaaggcgtacgctgagaactacgtccactctccgtacgttgtcgtctctatcttttgtatgcctatcgattcacagacaagtcaaagtatttatcttcgaatgttttctcatgatgtaggggaaagcttcgactcgccaggacaaagtaaagccatcagaatctatactgtagattcgttcaagatattctctggttctgctgaggtttgcttgaacgtgtggtattgaagcgatcaatcctcccatcttcactgttgtgtttcgtgttccattttgttgttgtgttacttcccttttgttttgtatgtttcttcttcatccatctgtcttttgttgcaatgtaatactttgtttggtgtcgttgagcgagagggaacgtctcgagtgatgtggttaagcgaagcaagtcaaacaaatgagaacaaaaacagacaagaacttctgaatttccttcatctcatacgtttctttgttcatctaccttcttcggcaattctctttctttttattttgaacacatcaagctttctttattggactcctacacaatctctttcagttcgatagtccatctgtctctttggcattctctgttcgctagtttgcctcactcacggatatcacctctcgctcaagcctcgctggtaagtccatcctactcgtctactataacgagtgtttatggttggaccgagtaatggatctctagataaaagaaaagaacatacacctagagttcttcagcagtagcttagaaggactgtgtgatgtctgtgatggcaagaaacttggtttcttggtctctttttgttagttgctgatcctacttgtttctacttttaccatcctctttctctccttctctttatccaggttcctcttttccatccatctttcatatcttctcgagcaacgaccgctcgtccgtcccaagttcgaatggattccgttaacttgtcattctctccacaggctcgttcagaactgaaccttctgccgatcaataccagttctcggagcaaatcttcatcgcgttccggttcacgttcaggttcaaactcgccaagatctttccagggtagacagagttatctgtcgagcgttaatgggcatagagtttcttcccccatcttgatcagtccaggatctacagaaagtccgtgaatgaaattttgattcaagagatcttctatctctcttgtcgcatgaattggttctggatgcatataaacatcaattgtcaccttgactgacctaacatacatcccgcctatcttgttcttttatctcgcgtgatcaagactttcaaccaccttcctactctcctcgaccgcccccactggaacgacaggatacatctctcagcctgtcgtactactattcctcaactggggcaggtggactcaattctcctgtctacacaactcggtcaatctcgagttcgtccttgtactctccagagttatcttcccctgccaaatccggtttcggaggaaactccggaggtgaagacggatcgaggtttctatcatcgaggccaatgtcttcatcagccatgatgccgactagatcttcctccagaggtgaaccacgcatgggacgtgaagaaccttctgccggcagtttgagcgcgagcgagtccctcgctagcatctccgccaatataccagcgacttcctcatctctcaatacatcagagttcggatttattcctccgaacgacccaaagaaatatgactcaccgaccacatccttgcgctcgtcatcaacatcctctagaaaaggaacaatcacgaaattctttaggcagtcaagacaagcaagtccggtagcagacgatcaactcaatgcaagtccagcaaatgaaccacctcaaaggacgagtttatcgatccgagacaggtcaagtactcgtcaaggcccgtctcgctcgccctccagctcgagtcaaacggctcgtcaaacaggggacgctagtccgctgggattcaaaagtcggcaggcctcatcatcgcaagaacagcagttatctcaagcccagagccattcgttatcccaacaagtctcaaatttgaatcctagtgcgctcgctagccgacctcttcctatccccgatgtcttacgtacaagtcctcaagaggaaccgttgaaaactgaagatcaaggaaatgaagaatgggcaaccgatatcatcaacgagcttgccatggacagtgattcggataatgccgtcgatgctggcgatcgtgacgaccaaacgaatgagattttgacaaagaagcttgagttgcaaagccttgggtctgagcccgacgtggaagtccgagagtcagaaaataagcgagcaactcgggactcctcgcggaaccgacgaaaaggagcatacagggatcacccaccagccccgttgatcaactcttggtcaactaagatgccgaccgctccttctggattcctggcggaagatgagtcgagtcctgtctcacccgaatcagattattatcggtctgcttcgtcatctccgcaaataccactagtccgattgaagggatcgacaacagagcacgagaccggaggagcgtcggcgctacttccggaagataagccttcaagtgatgatacagacaccacacctcgaattcaacaagtctctcagatggatgaatcactcagaacatctattccaagcagagagcgagacatggggttagccagggtcgaagatgacttgcgatcgcctcagacagagaactatggaactgatactgtcaagaccgaggcagaaaccggggtagagacggaggcagagggctaccagagtgagagttcatttgatgatggaacccaacctgtaagacggcagcgccagtcgacagagtactgggatcctattctgtctccagaagccagctcttggttcaaagagaacgcagaaagcttcaaaccgaaagctaaaactatcacagataacgcggaactatctagctcgtccgatcaggcaaacaaagcgagtgagggtatggtaggcaattcaggccgagccactgggttatcagcagctagagaacgtgcggcaaaagccaaaacggcctacttggcttccttaccgaatgctgtcgatgccagcggtagcactgttagatcggctactcaactcatacctactttacgattaccttcaatctctgatgaccaatcacaattaatggtttcaccgacatccaatatgaccgaaccgatatctcatgagccgcgcgactcagtcacttcaacagttttggacaacaaccatctcgacttgagcttgtcgtcctcaacatcgccttcatcgggagaacccccgatgagtggaatgaagcgcacattcagccgggcgagtggtttgggcggtagtatcgagggtccggtcagtctggatttacaagcagatgtcgagatagaagaggaacatgaggatgggggaagactagatagatcccgagacctcttcgtgaggttcgttctgtcatcatctttaatcctttaaatggtacccaaatcggctgatttgtataattttttgtcggtctcggtcttgaatttttgaaacttagatcgtcgagaacgccttcaactaatgatagttctcttagttcttctggacatcaatatagtcactccaagcagctttcgacagcgactattcggccgttgtcacctccgccttcactccctcagatccctggtttcttgtctggagctaccgactcgaccgcaacatcttcacacaattcggccctctccgaaccgccccctgttcaatctgataacaaacgacatagtttgagccatgctcgtacactggaagagctgacggcagctgtcgacagggccattaacgataccgatgatccaccgaattttgatcttcggacggactttggtgtcgtctccagctcgcaggaatttgacccgcaaaccgatggaaatgaaacaacacgtcacttgaccaggagtgaatcaatcaccagcgaggctagcacatggggcgatcacgctcccccgttgactatctcgatcaacccgcatgattcagtagaacttttggatcaagagtctgactatgtcttggtcgagagtccaagtttccctccgccaggagagatttatattcctggagacttggtaaatcttcagcggagaccgtctcatagaggatcccgaacatcagcgcctagagatgttcccattggtccttcgttgtccgtctcatcttcgacgacgttgtcagagctgccttctaatatcatcagagattcagaaccgactatgaaggttcacactcagcaaaatgtatctttgcctccatctatgaattcctcggctttaacgaacgctagacaggctgcgaccaatatgcgtcagcctctcgagtctgggcataacaataactacagcattctgcgagcctctcaatctggtactagccaaccggccaggtctctcaataaagtacatgcgtttgccccaatgggacagtggccaaaagcaatggtattttctgatgtgaagagcgtcaaatcctcgggagacagagcgtcgatgtatgcgcgaaagatcaacgagttgagtagggcagacactggacttggggagtggatcaagattgtgggtggtcacagaggtacgtcacatttgtttttatctaaagggaaatgtacagtttgttcatacatcctttcacttgcttctttgaaagtaggtcagattaagagcacaggaattcttcgacatcagaagccggatgaacatctgacggatcgcaaagtatcggctgcctcagccgtgtcagatgaagcgtttccgctccggtcatctggtccatcattccaggtccaacagatccgaaatgtctcgcccccgtcaggtgccccaccacctaatcttccatacccacagcttgcccaaggcgtaggcatgcgatcgtctccttctgttgtgtcattgaaatctgtgtcgagtcgaccgagcatgtcaaattccatcgccaatgtcgcccaggggtccggagggttttttcaaacactcggtaggagaggaagcatcagcgcgggaagtagcggagggggatctagcggaggaatgaaaggtataattgggggaagaactaaaagtccaccgggggtggtaatcgaagataccgggggacggcatgagggaaggagtagtgtgagtccgatgaagggtctcatcggaggttcgtccaaaaccggaaatcaaaaattaacaggtcctcgtgagtctatctgtcttgtcttttttttttgcttgggtcgaaaggatgtctctttactgaagcggtcttcgtcgataccttacgaacaggctcccgaaatctgtccagaacaccgtcgatctcaaacccgatcaacctcaacaacacgcctcctctaccaccccgtcgatcggtcgacctagatcatcaaatccaaaaccgacatgtcctctttcctatccctcaacgagcatctctatccgacattccatccccgcgaccagcctcgctcgattatccgatcgacgtgaattttgacaaaaatctgagagagatggtagggattcttaaagaggaggaccagaatgtcttagcgggatatctgaggagagctaacggttcaatacccaatgctatcggtgagtcacattcttgttcttgagaacaggaccgcgtatatgtttggtcaacactgacgaaaacgttaccgattgagataggttctttcctcgaagaccagagtcgggaatctatcatctgatcatacagtccttctgttgtttacttttattttctttgcgtgtcaatttgtccattcactatataaccattttcctaatttccctaactttcctcctcttttaaccttttacttgtggtttttctttctaaatcatcaacacttctgtttctgcttttgcttgcaacacaaatcacacagtatacaacatttgtatgcatacgcgccaaaaacctatcgaatgagggaaggagagatcgtacagaaagtatacaagactgaacatgactagaagacgtgacaggttgcatataagagaaacctgttaattaggatattccaaaaaattgaaaaaaagaggaatccgtgaataggtacaagaagaagaaggataatacaagcgctcacgcgcgcgccgccggaccgagttgacacgaaacaagatgaaatttaggggggggaagaaactctatgggtaacctgacgaccccaagaaatgattgcagcttgaagtgcagctcccatgcactagctgactttcaaaaccacatatgcgtataaattgcttgggctaaaacggaggaagagtacctgtactttgaaatccttagttttcccttgttgtcaccaccaatcaatctcgtcctgccttacatgttgattcatcggggttgcatataatcctccatgaagctgtggcgcaggatgatgatgttgttgatagtgaggaggatgcataggtccagttgagggcgtatcgaacgcaggagagcttgtatacggtgagcgttggaacgagttgttcagagatgaggatggcgatggcgacggaagatgaaaaggatgttggcttggaccaggaaaaggcatcgatctgaaagagagtgaatgtagttttctctcttcgttctgttcgtttgtgaacctccgatcctgggcatcgaaaccacaccgtcgattatgatcattactattggggcctagatatgttgagggatcatcatctcgtcggtgttcaaagccatcttggctgtaggaaggtgaaggcaaagggggggtatgtaaagcaagacttaagcttgaggtagagctaactcgaatcgatcgaggttccgttggtgtaatttgtttgtccaacgatgggtagttggtgcgcgatgtcaaatcacgaccggatgaatgaccgactggatcaaaagttgatacgaccaagggtgtattctgtttaagctcgggggcaggagccgaactatacgttggataattatgatcgtgtatattgagagaacgaccagctgatggccagtttagagaggtgaggcatgttgtgttcaaaggataagatgcggacgacaattgagggggtaacgatggtcgggagtaccggtttcctaaagatgtagatgttgtcatcaagtatcggtcgggatgtgcgttccgtacggagggcactttagatgcagtgaacatgtgaactgggtttgacatttctggtgaacatatacctgtggtgagctgagtgtgcttctgatgagaccctattggatttgatgcttcgagcgtgaacgaggaggacgtagagtccgaggttgagcttggcgtttgtggagagaatccatgaccggaagacgaagacgacggtgagagtagtgagacggacgataccgtctcgagttccaactctgtctgtttagaatgagcggggatgacggcgcaagaagcagagtagctttcatcgggatgactcagactggttgtcgcgtggcggagcttgagacttgacgaaagggaagtttggccgactttgacatttgacaacggtctatcagcaagcgcagtggtggtcaacggacgatcaatcggtgaggccctgttacgctttcgacaggctgtatcagaggcctggaaggaataagaaacgggagaaagagagaaagagttgattgatgatgttgacacggttcgaatcgggaaaacgatgactgaagaaacatacctccggatcgattgtccaaagacctgatcagaagagaaggatcattaagctttgatcgtcggcgtttatcgctgttaactacatacaaaagaaaagtgaaatcgagagcacgaacctccttttccagaaagaggggccaatcgagcgttattcacgaaacatggtgtcaacgacagcagatgtctgaccgtattctttacatgccgaggcaacacaaagaccaagatgagcgcctgacgaaacgtaggaagagatagagaaagcgtttatgttaccttccaacccttggtgctcgttcgaaaaaatggatgtgaactctcgatactcgcatatatctgtccagatcgtatccagaacagaattacttcttcttgactctcttccgagcactacaaagatgagagattgaccaacctctgaaacggagagggctttagccggggactgtcaggaaatgtcaataaccacaacatcatcaaaaccacaagagcggcgtcgtaagaaagtatccaaacaactaactctctcgatggcgcgtttgatcaactcgacatatgtcatattaggtttcccagatgctcttgatgacctttcgaacattctttcttccctttgtgttcttcttcttcgtggtctgtagagttgatgggataatgggataatgggatggtgtgagaaaacaaaggtggatacgaataaagaagagtgggatcgaagaagatacagatgaacgaagtcacacttgctccatctctatattttgtcagtcatttcgtcagttgccatcgtactcgccccacttgatctctttacccgggacctgatgctcgaacactctgcagcccaggatggagtgtgcttgtcgagaaacagggacgatataatttaaaagtaaggttcagcctagagagaaaagcggaaaaggaacgcgtccagacgaggtgccgatcgggaagcccaggcaccattacgatgatcatcagaccgcccgaagatcacaaaagtcaaacgccggacaagtacgaagacagcgctccatgattaaccgaggatggtacgaatgttaggtttcggagcagagttctttatttaacgttcagtctctatcattaatagtgtcctttccctgtctctaataacggagttctaaattttcgtccccgttggcagacgccacaggtcgttcaagcttgatcgtcgaaactgattgtgcagcaccgggagagagaaagaagtggaaactttgatgaacgtctcatctattgtaccgactttctggtagaaacaacagatattgatcacgcagcagcgacaaagatttagaatgaacggcgaaattaataacgataaatgaaaagatggtctagaacatcgccgcgaaagtctactcttcgatatctttcccggaccgtttcctcaacttttaaatacatcagacccagtcagtttgatgatgttcgggagaaaaggggagaaaaaaaaacattttgtcacttacagcggcggccagatccatctgagctatccctcctccagctttcggcgctcctcctccgagctggctcagct

SEQ ID NO: 2922 - DNA, 2617 bp, Xanthophyllomyces dendrorhous
ctccaattgcaataggtgcttttggcacagctggccggcctccagtccccaagggttttcctaacggaatacccaccccactagccgctccaggcttcggggccatcaccggtggttttcctcctagaccgacaggctttgcagccaacaccggaggtttcggcttcagcccaggtgccgatccgtcggcaggtttgaacccagcagccgatccaggccgcgacgaggctggactggatcgaatagaagacgacccggtcaaagatacctttggccctccgtttgatccatcaaattcgggcttgggtgctgctggcggtgctcgcctcgccggaggaggcggaggcggaggggctggcttgggaggagccatcaactccagatagttactaaaatcagatatatacagacaatcatcattgagcgtgttaatccaatcaactcgatgcaacaaaagcaatcaaaccccaagaagcaaaaggacaaacctaggagcccatccttcggtaccattcttgacaatcaaccaccatccgttcggatctttctccttgacctcgaccacgtcgccttttaccaaatcgacctcaccttcctgaccggcgaacgcgtagagcgccttgtactttgggttctctggctttgccgcaaccggtcggctggggggagcaggagcgggcgttcctcgattgacacctccgcttgtcgccactgcgggtttggaggcgaccgagtgagatgtagggtaactcattcccgaggaaggcgtagcagcagacttgcctggaagcacctgagctttcggaacgatccgcccagcctagtatttgatttatttcgacaacttttttgtgtcaatcgccacactagagccctcgaatggggaaagaacaacgatattttgacttacacttggatgtggattcgaaggtcctcctcgcttcaacagcttaccagacgtgatgggcctgacaatgcccggctttctcttagcggcaggtttggatactgagtttggaggttctccagaagaaacggataccacgctactcttataaacatcaaatctggtgatggactcgtccttcctgaactgaatttcggcctttttgtccttctttttgttatagccaattcttcgtttgaagagaaaccccatcatgccatgcatgtcacagtcaggcttcaagaatattggctttcaaagggtagttcaaagataacttacgtcgacccgatgttgatctgaatacttccattggtagccttatgaagatgagtgatcaactccgttttgaaaacagatgtgaataccgggtcgccctcctcgctcgatgaagcgttgaaagtctgatgtcgaaacagtaaacaaatatgaaagaaatctctgaattagtacagacactctatgacattgattttgaggaagatgttatttacaatccagtcatcccggagattggaaagaccgacggaccggatggtcaccaacggaatctttcggtcgattgtcgtagcgatccgaccgtctttcgcggcagagatcagaaagtatgcagctgagttcgtctgtgatacaagttgaataaaagtcaacctccgtcggggatgtacgcgtcagatgagggaaatacatacgacaacaaggaatctcggactgggtttactcgatcgaccgaatgaagatttcagtagttcaattcggccgctgaagatgacactttccgaacctatatattctcgtacaagaaagaaaaaacccttatcagatattgggcaagaagtaaaagaaggccgacgaacaagaaaacaaggacgaaccactcaagccagcagcctgtctcagcatagctccactcgagctctttcctcccacatccaaataatctcccgcaaaccttctttgactgaccaagctgtatcttctcctctccttcctctctgcgagaagctcatgtccacgttgtcgaaccctggcatattcgaaagcgtcctttcgacctcgccagaatcgttgaatccgactggcacactcatttcggtatcgtaagaagtttcgccaagctcgttgaattcgggcggccatattatgccaatatcgatctcgcattgtctccaatgcaaagagctgagtgaagacgaccaacccgtttccaaagatttcttaataatccgctcaatcaaacaaacaaaaaaggagagaaactcacagtctctggattcttgatgaaagccttggtaacacccatttgccactcatctttagcgattccagtatccttcaagatttgagcacaacccgtctggggatcaccctgccatgtgtattctcctgcatacgacgtgttcggggataagaggtaaaacctttccaccatcttttcaaacgtatttctgtaggcgaagccagctcgtctgactcggatgttctcctgcaaaccaagatacttgacctgatgcaagatcgctttagagtcatactcagtaggactcctgttttggttaggtttaatcgttcggatatatgatggttgggctttcatcaaattatcgaccaacgcattcgcggatgcctgttcatacgttcaaaagggatatcaatattcagaatacttcc

SEQ ID NO: 2923 - DNA, 7534 bp, Xanthophyllomyces dendrorhous
accttgattcgatctcccgcagtaggaggtctcttcttgctaccagcgtcaattctgtctgggaaaaggtttttcaagaatccatttccggttgtcgacaccaaatccgtcagatctttcacgagagaatccttgtttttctccgtcattcccgatacgttatacagaacctctcccgcgtaatgtttgatcaggaactttgatcctcgagtctcgaagtgttgattggatgtaagaccaccaagtcgttgaacaaacgagttatcagcagcagctgggtcggcatgggcggtagcaacggcatcgttgagggcggcaaagataccgggtggtcgtttttcctcgataagctcgcaaacaacctgtgaagcgggggattatacgattaaatatgcgattgtcaaagagggtaggtgttcgagactgggaaaatgttggacaaaccttgttgttgaagtaatcaataggtgtccatttgatctgttctcggacgtactcttcctgctcggccttcaacgtaagctcgatgaagatctgctgaactgtatagcgaggaagatgatagaaaacaaaaagtttgttcaccctgtacaaggtcgtatttgtgatataacaagagtccacttacgtttctcgttcacgtagttgatacaaagctgctcaaaactatagaggcgcatgaccgacatcgaaactatcagcccatggttttgcggtttgcacgcccggagaaacgagaacagagatgctgagaggaaaaaggtggacgaaacttgttgtcctggaagatctcgaaaccgtaaatatccaagacgccaagcacgtgctcgctcttcgtttttggcttcatcgatacgttcactctctccacaatccattcaaacaagtttgcatctagaagcatcagagagatagatagacaaacaaaacaaaaagaggaacacgtcaaatttatttttgactatgtcaaggagttgatagtgagatatttgtaacagagaagaggcacgtacagatagcttgagacaaggcatctctaccagacgaagcttgaggaacgttgaggggaacatcatagatcgaacctgtttctcaaaggtattgggtcaaatctcttttccctcttctctttacagacggcccaccaaatcgagcaaacaaggtataaaatcttacctcttcgtccacctcgctgagtttctactactctcgaacacaatactttgcttagcgtatctttgtcaacctccatgaggtacgcaataaattcaatgacgctctcgtctggaatcattgagtttccttccgcgttctctacgaacttgacgtttcctaacctaaaacacattgaccgggccagatcaatttatcaaacaagttttgattcgcgagtgagtgtgtgatcttcttctttcattggtttgagtgaagcttatgaaaatccagatacacaccatagaatgatactgatacatctaaagatgttttcctgctcatctcctgagaggccgacgatgcccatagctttgagagtctcgttaaaatcagctacatcgtcgattgaaggcacgtctaggcagccagactgagatgtcaatacgtaggcctccggtccttggatcccaaacatctctgcgagaaaaagttaggcgctcgtagaatataaatcatctgatcacttctatgactgcagcagaagagatggcggacaaacctcgcatttccgcgctggcggacttggtgaactgatagaagatatggaaatctcgctcatttttgatctgtttggtcactcgactctgaggtacgaaaaaatcacagtttgaaagaaaattgaatcatcgtgagaaattaaatttttgtcaagtagatatatcgccacggaccttctcgagaagatagttggtaatttgagccccgacgggctctcctcgtccgttgaacatgatttctaagtattttccctaatatattgaattggaatcaattagcgtcatataagaataacagagacaaactatttggacaagaaaaacgactttgaacatacatgtcgggaagagttgtcgtttcgaagcgtctttgcacaaccaaaagattctagtagaggattggtggccaggaccatatccttgatctttccgataccaccggccgccccacctgtgggaacttcagattctccagagacctcggcgatatattgcatgattcgcttagctgcctcggtctttccggctcctgactctcccttttgtgattgatttccatacatgcgcgatatagatacaatcagcatgaggtactgatggaaggaagtgggacgtacaaaggttgactcacagagataatgacacattggttttctccataagcgttcatagcgtagtacgcgctctcagcgatcgcaaacacatggggtggcatctccagccggttctttcccttgtaggactgtagtgtgggaagggtataaatcccaagatctatcgcaccaatcaaacatcgtcagctcaaggagaatttcacgggtaggtaccgttatgagatcgacacagtgcgacagacctctgaacggatttacagagatcaatacatgggcaatgtaggtctgcatttggagggatggcaggacaaatcaggtgggtaagccttgttctgagtcaactgagattaaaacctatctgccgcagagtttctgatccaacatatcacgaattccctcttgttcggtttgatttgaacgagaagaaaggtcggaggaatgacatacgtaaatctccttgttctcgaatcgcttcttgaggttctcgttaatgctctcattcgagatggtcgagagcaaagtcatgtcggagactcctgcctgtttcttcttaaatccctccttccaatctgccttgaagttttaatacgatcattggttcatcacagatacatgaaagaagtttcaagttaagatcaaatgatgattttgcacgaaagaagaaattgtgaatgagatgaaaaaaagataagcatagacgaaacggttgcacttactttggcgactttacctccattagaggcagccccggcttttgatggagcggcggctgattttttgcccgcttttttagagggagcctaaataattggtagtaaaacgttaaaaacaaagagggagaaggacaatccggtgaagaccatagatacacggttgaggcgtgggattttccatcagcgggatgatgacgagctgtttgaggcaagattctacagcgaatcaaacgccctatggatcatcaacatgaaaacaaactgaccatcttgtataattcttaacagttagtattcagacagaccaggcgaagtcgatacgttgttgtatgatgccgagagtggtaatgatgatgatggtaggtaggtggaaggtgatggctgctcgtattgccgagatggaaggtctccgggcagagtccgcagtcggttcactcttacagccttccccacatcgactgcttaacagaacagtagggaacacaaaacaacttggcagttggcagttggaagcgaggaatacaggattgacagtgcgctcgatatgaagaataaaaagactgatgaatgacaacgactttagagtcgactggtcgttgtatgtctatatagtcctatttttttttcgaacagggctgacgaaacctgggtagagtaaatctcatgcgccttctctagctgtgcgcagatagtagcagagaagaggaaagagaatataaaagacttgattctggatgtgtctctctatgcgaactgcttgcattggttgacaacccagtcgacctggctgttagcttggggtctatgatacattctgggttccatgaccggcaagagtagtcgacttcaaatagttttcaacggtgtacgaaggacgtcttgggtgaacatctcttggtgtccttctaaaacagatcagtacacagatgcatgcccattctctacgcagaagatgtcccccaaacatcatagataagtactagactgtaagttatcggtgtatggtgtgtatagtgtgtttgagtggtgagagttctcttacgtaactcaactcgtctcatttgcacatctgcacacctctccatccccaaacggccatcaccatctctgccctttagtccaacatcatcaccatcgacagatgtcctcctctacatcgtatgacagcaagtccttcggttgaagttatctctctatttcggttgttctggtttgattaaactcttattcttttacccttgatgggatcacatagatctccgcaggcacgctcgtgcgttggagaccgcgctcgattcaaaactcacggcgtactcgaaagtagcatccacaatctcctcaactggtcttgtcagccggaataaggatgagttgagtctgcaggaggaaggtgaaggtattggcggctggagattagctgaagaggaagtcgaagaactcgtcggcaaggtgtgttccgaaactcagcttatacttctttttgattcatccatggttgtcgtctgcttctctatggtgtttagcgaacgagaaaaattgatggatgcacggatacctttatataacaaactgatcatatatcactgccttgttcgttctcatcctgaacctgaagctctccgaaacgctcgaccaactctcggaatggttgaatgaccccgctgtgacgccgagtacgagccagcttcatgcggtccagcgacatcgagaggtccttgccgattatcgaagggactttactcagacaaaggtgttttccatatgcaccaagcttaattgagatctttatctttctgtggctttgctaaccacccgcactgatgtcttggtcccgatgttcagaacaatatccagcatacattgaactctcaaaatcttttaggctcagttaggaaagatatcaagtgaggaccaagagggatcatattctgagccaatcgcttcgatctaaccatttggcttcctctgtccgtacccctcacagcgcatacaaaaccgcaagatcatcaacagcagatgctttgcttaatgagcgaaacacgatcgattctagccatcgaatgacagatgacatcctcgagtacgtcattcttgttgattatttcccggaaggatagcaattcatcggtctgcgtccatttctgaaacatgactgttttgtacgtgttgtggaatcagacaagcatacgcgactcgatcagactttgcgagccagaggacttcgttgaatggcattaactccaggatgggatctactctcagtgcgttcaattccacgctggaaaacggcatttatctgtttattctctctctgacttctcgtcctcctcttgtatctccattttttatctttggcaatatagatacgctaccgggaatgaacacactgcttggtcttattcaatcaaaacgtagaagggatagcatcattttgggttgtgtgatcggtacgctaacggtaggtttcctaatgtatgtcttttaaatcatgtcgaggtgggtgtgaagtgtggtgatgtatggtgatgtatggtggtaatgtaatgaactgtatgactatccttctacgttcttttcgtgttacccttcttctttctctctatttcctgtttgtgctctcatgacatgccattctagatgatttagaaagaacataagaacataagaccataagaccataagaccataagaccataagaccataagaacatcagatgaggaccataagatgtggtgtagagacaacaagaaagcttcaatggtgttttccctgtgcttttcaacttgacttttctcctttcttttcaccatcatcaaccaactctctacctttccttttgtcccttcctctttctcttctctctcttctctctctttctgtctctctccaaaaaccaaccacgcacacgaagaatctttaaaagacattcctttgcgtcacgttttttatccttgtttggccttgtaacgaattctcaacgatcgccctcttctttgacgacctttcttcactcactctcccaacgacgtccgtgttgctcttttgatcttatcattctctgtatcttcttttgcctgttcttcctccttcctatcctcctctctgtcacgtcaaaagttcaagtaacatggatctaaacgatcaaagtcaatatcaaaacctgtcctacacgttccaaaacctcgcactctctccaccccctcctccgcctgccgaaccaccctattctgggctgtctgacccatacgactcatcttccaacccagtgtttggctcatctccctctggcgattactccagtttcatgaccaattcttcttcatcttcctctcagaagattggacaaccagagggcccggaaggagcgggatacgctccatcggacgatggtatcgctcacgggaaatcgatgaatacttctggtatctccggtgctggagccgggagccgaacaggatggtctgggagtcgagccgggagtggagaaggtgggatgggaagtattggaagaggaggttggggatcgtcgaatggatcagtagggtctgtcaacgggaacggtaacccggggtccattcaatcggtcaacagaggaaagatgggtagagctgaattgccctctgtgagtctattgttctccccctcttttttccattcttcgttcccccttgagcttctctgtccgagttcgtgtcgtgtcgacgatcggcgaacgagaagtcactcccggcatctgtttctctcgttttttctccttctattcttccttctggtctagggattctgcttgtttatagatgttgaacctctttcaacgacaacattttttgctatgtatcccatgtatcgtcttgactcacctcattgttgtatcctttcttgtcctcacaattcgattcatgctaccgtcgaactagcaatggctcgatcagccgtttcacaacccgtctcccaatggtcgctctccagtagggtttgtttcttttcaacaacaacagcagcaacagcagtaccaacttggtgacagcacatctacaggatccatgtgtatggttctctttttccatctctttccccactagtcacgtgttcaataattcactaaatcttggtcgatatctttcttggttcatcccaatcgtttagctcccccaattttgcatccgtcccagaactcgacttaccctgtctctccattactctcttcagaatatgtgaacagtcactctcaatcagtaggtgattcttcgtacaactcgtacggttcctcagctttgtcctcgtctcctggagcttctagagtgagcaataatactggcaacacaagcagcaatggaaactactattcatcttcgcctacatctatcacgggatttagcgatgttcatcaatttcaaacccctctccagcatcatcagcatcatcagcatcatcagcatcatcagctaccaaatcatgtgcataatcaccatcatcatccgcctccaccaccac

SEQ ID NO: 2924 - DNA, 2257 bp, Xanthophyllomyces dendrorhous
catatgagcatcggcgctcatctaactcctaacaattctcttcacccttccttgtcaaactcgaccggactagcagtcgggccaggagcaagaagataccaagtttttggcaacggaattcctactggattgataggtggtcctggaccagggccgggaccagctggaggacagagttggggcggtccagcgatggtgcctggcttaggagtcggccccggtggaccgtttgcgatgataccagcgatcggaggtgggatggacgatgatgtaattccgtaagttgtcttcaagattttcctcatatatgatcattcaacccttctcataaatctatcatgtttcccgtccaacttccaggactgcgatcgtcatcaagaacatcaactttaacttgcagaaggaggatttactacgaacaatcgttagttgtcatgtcctttccgtcgagaaggaggcatagactgactatcttttgaattgcccatcgcttttcacgtttcatactgttgctgctaggaatcattgggcgccccccttccctatgcattcaattaccacatggatcaaggtgtcttccgaggtcttgcgtttgccaacttccgaagtgctcacgaggccgacgctgttgtggctgctctgaatgggtgcgtgttctctatatctgaccttgcttggcgtcaaacgtttcaatctaaagatttgacagctgacgtctgattgggtgccttatttctgaacagatacgacgtcggaggccgaaaactccgggttgagtacaagaaagtccttcaggccggagagaaggagaggattgaaagggagaaagcgcttcgtcgaatgcggtcaatccaacaacctcaaggtacttcgtctgataaccatcaccagcaacagcaacagcaacagtcacgaccgtcgacaggttcgatgccttcggtttctacaccggtggatgagtaccctggcattcaacctgtttctcttggtttgggtctaggtgcctcagtgagccccaatggagggcatgctcaatactcccaacatcagcaacaacaggctggaagtcagctgctccatcgagagagaagcggaagtggcgaggctcaaggaatgaatggattaggtattccgacagtacaggttactgctcaaagggattctgaaagtggtttctacagtcagcaggaaatggacgatgtcggagctggaagtgattctggtgagtctagtgattccaagagcagtaagtcctgtcaaagatgattctttgtgtatcttcttttctaacccgttctggcttttctcatttctctatgaccaatctcctgctcagccgagttggatttgaatgatccaatcacactcgatatctattctaggatcttggtcttcaaggaagatcgcatgcgggacgagctcgccttctcgcgaacgctctctgccctacaacgcagggtcgttcatttggtcgctcagaaactaggagtatatcactattctgttggagagggcgataagcgttatgcggttgtcactcggagtgagggtcgagtaggtggcagcggagatcgcacgcttcgccatcacacttctcgaccgaaccttccgactcatcagacgaatcataattctcataatcatcaaggccaccaccaacaacaacaccttcaagcaaatcaaaatttatatgcgtcgtctccttcgctcaggagtaagtcgtccatgccggatctatctcatcttcatggaccagctgtgtcgcgtgatccgacgagggccattgctcctcaaaggtcaagctcgaacctccgagacggttactcattgatggggtccatcagcaatgggatcggtggaaggactggagtgagcagtgtgcatcctagacgatcaacgacaaacccgatcgatcatggatttttgaatccacagatgaacatcccttcctatcatggtacacttctcaagcaggcctcagagtcgacggagagtttactctcgtcggacggtatgagtgctagcgttggacaacttggttcgtcttcatcttcgtcgaacggaggcggcgggggaggggggatgtcccagtcgatggctgcgttgctaagacaaccaagagctccgggcgggggacagaatagtggtggatttggtgtgttcaggcggtttggcatgcctggctctgttgaaaaacaccagttgtcgggtgaaacggcctttaacactacccaagaacctcttgaattatgaaaac

SEQ ID NO: 2925 - DNA, 27200 bp, Xanthophyllomyces dendrorhous
acccttgaaactttcatatttcttttcttttttattgtcgcgctagctataatcacttctcaattcttgtctttccttttcgtcctcttctttgatgcctgacacgcctctcatggttccccatcgacgccattaacgtaccagaagaatgactgataccttccctgtttatttctctctctctatcactctctctcttgttctctcccctacctcctgtttcccaagactgttcttggttcacaatctgattcatcatcacaccacatgtcattatgaattcctcacatcactccacgcctctgttcgcgcatctgatgctctccttcttatttggtcgattccttctatctgattccttgttttgtctgacaacaacttgttcttcatctcctggtcttactcatttcatcttttaaaaaaagtatctcatccccttgatcctcttttctttccttatgcttgttttgggatgtttaagaacttcatggcaggagattctttttttctctttcttcctttagaaaaatcgtccgctcttttaagagcggtgatatattttgtcagatgtatgagaaacgagacgaaaggaccagttaggtcaaccgaaattctatacaaccagatgataagcacaaaaaagaaagaagaaagattgaagagagggattaatcggcgagcgccaagtctacgatgtcttctgctgttccccatgaactttgccagcctgctcctccgtgtccatagttgtagaagaccttcattttccacttcgattcttccccttcatcctctgcattcatatttgcgtttgattttgatgctgagcgaggtcgtggcaggatgatatccggaccacgttcaagtcgaattccttccacccgggacggtctaaaaccaacgatgacattttgctttaaaggattcaggatcgaaccttctgaaaccaatggtgttgcagtcgtttctagagatgattctgtcggatttgatgtttgctgaagatgaggtgggaccagggatggacagatctcgatagcgcgggaaatgatcgatgatgtcgtttcttctctaggagttggtagcctttagtataattatcgtaccaaagaagaaaaggctcgatcagtcatcgtatcatcaaaaagtgaaagggaggaagatatgaaaccagggacgaaccaatcgtctacctctctggttccaccaacaatgacatccccgttctccctggggattacatacgttctctctccgccttccccgccagccaactttccaatctgtctcgtccacccagtcctgacccaaggcgcatgaactcgtatcacttgccctctaacaggaaacaccgtctgatcttcaacgccgcccaaagtcaatgcgcctatgcctgcgcagactatgactttaaatggaaccctcccatcgaggagggcgaggacctgaggagaggacagagaatgaagtgaaggaacatggagccgatggatttttccaccgagagtgaggaagtcggcaactaaccgggacaagtacggagcgggattcatggtgagtgatgtaaaggagactgagtgagtggcgaatgacgggagctccgaggttgggtggatgacaaacttgaagaacaaacagatgaaggatcagcgaatcctctacctgatacacaatgagaaagtttaggcgctcacgtcaggatgttcttccagaatcgcgagatgtttctcatctccatcataatctaagggtaaacgaggaagggaagaaagttctccaagcgagaaacataagcaacgttttgattttgtctgagacaaagataaagaaacctacattccgtttgtgtgatcttcattaaccccgactgttcacccaacatcctccactcggtcaacatgacctcgaatgttcttctatcccacttcctttgtctctcatcaccatcatctgcaaaggaaagatgatgagcaccagcagccgtagatgcatagtatgctgatagcacatccgacggaagatggtccgctaagatgtgaacgttcttgttagggttgagctgagattcgatgagtcggatcgctgtggtcagtccgataatcccacaaccgagtacgacgatgggagcatccaaagagactctctccgttattcctattgccatcttggtcgcaggtggtattgttgttgactgtcgtcgtcgccgtacatgcgaaaaacgactatttcttataacgatagcaacataagatacagcacgtgactcggtgcgtagatgacttgattcttaaatgatttgatatctaattcttcattatatttttattctgagtcttatatcatattctcgcctgttgttattgttgttctaattctttgtgccgccaagaactatgcgcaaggcaaaagtcatacaagaaaccataacctcaatctggaaagaagataaggaaagaagaaacccgtgtgctgttgaactgtaagatagagaaagagtgatttggacagcgaagaatgacctagacattgctggtcacttgagcttgcttgacaatccagtctcgcctgaacgttcaaaatgaatgcatagagataatatgagttcaatccgttcgatgagcctgaaagaaaacggaaggcagaaaacgcacatatcatggagaagtctctgcctctaaagttgataatttcgcaagaaaagatccagaaacaatcgatacataacataaagaaaatttaccaggtcatcagacaagctcaaggagggataggacagaaagtagacgaaccatagcttcctgcttctcatctagacctccaaagccataaggatgcataacgtgctgaaatccctcccagacatcaacttccttatcctcactccagccggcctcccccttcttcttccccgcctctttcatctttttcatgaattcgaccgatccttcgtaagcacaaactctatcatcctttccgtggactatccggacaggaggcatgatcttggcggcattgtcgtcgggcagtacaaaagacgccatagagagaagagagactccggaggcaattcgaatggcagagtggtatgccaacggatcagctattccgattgcgtgatggataagcacacgtgtaagtaagagggtttctcgataacagatatggatagagcaatacacacccttgaactcctgagtgacctccggttgatccgtctccaaccccttatagaaggagaatacacaagcttatcagttatcagtccattctctcaacaaatgaagctagactctttaactgattgactcacgatcaccagtttgatcatctggaaactcggaaggactttacataaccccctgccgaccaattggacgacgatgtttgggaccgcctctgggtttgcacccaggtaaggggccagtgtatatattccgatcaaatgaggggcggaaggatcggtgggcactgctgctgatcggggaaacaggctgttacagcatagaggaaggagaaggcacgcacgggggaaagaggggacatgaaatgagaatgtattcttcgttccttctacaaactgatcaaggatatacatacattgcgttggttatcctaatttatgtaggcaagagggtgtggccatttgactctccaataagattttattcatgaacaaagagaacacacgcagaagagaaaaggtaagacacgtacactgtccaaccgcccaaagaactgtatccaaagttcaaatgaaagaagacgactcgaacgtgactcagtacttctctcacatcaaccaaaattatcgagtaagcgacttgacaacaaccacttactgtccacagattactatccgtctccttggttctcccttttccttactaacaaccacaaggtctttcatcacggcttctatggctttaggcaagtgggactcatcttttatcaagacgtgaagtccagaagatctaccgtgctgattaggatcccgtgatagagccgagatgtaagttttctgtgatttgaataagcttggctaaaagagagaacataccgtgggaagatctatgtgtagaaaaacatttcccttgatccgattagcaagtgcggcacatcgatatcaaaggagagtacacgaaccaggaacgataattctgaacccatcgttcaacaacaagtctacatgaggcgcccatctccctccgtgttcatacaagcctgtagaaatgcaggcaaggtgacaaccacaaccgtacatgcacgcgacgttcaagaatggggaagtatcgtgagtccaactggattcactctccatccctcctacaattatatttttccatcctatgaatcatatagaagataacgtaccgtggcacaacatgacatcgattccctcgccggtgcgggaatttgcagaagaatcggaaggctttcggtaccaagtcctgtagaagatccaattggaacccaatttgttcgaaagctcttccttagctatttcagacaattcgccatccatcaacgttaggactaggtggctacactcgctttcaaaaatcgtatgaaaacactacaagagcgtctagacaaaggagaagagagcagggcacgaacctaattgaacatcttctgcctgtccggttccattcccgcgttcatccacgtaaaatcttctaccagtgatggcgattgttgaatccttggcgagcttttcctcagcgggatgaagtggagctaggtatctgccgtacgtatcgtctttggacttgcttgaaggatagaaaaggcccatgtttaatattggtcggtgttgatgggaagaatgacgaatatgacgcgttggatggaattcgaaggaaactaattattccggtctccgccgacttttcctatatataatttatatccattctttgttgtttcatctctttcccttgctatcccttttgaattgtatcgtgactagagcagagaatgagagagagaaaaaggggagaaaaccatcacaatcataaaaaaaagaaatagctataacaaaagagaacaaggtgaagagagagccacatgccctgatcaaggcgaggcaaccttcatagctgtaaagtggagtcgaatttgacgatgagttcaacgcaaggcagagaaaggaagtcagtcgatatgaagcagatgcaaaccgaaagtgatgaagaaaacatacaggccgttattttttctccgagactaagagcaataccctgcgtcttggatcggattctaacatgtcccgagacaataccatcgtctgatttctccaatgacaagtttgccagtgcgtcctcgcctgattgttttgtatgacagaaaaattgatgagtcagaccgattgtcataagtcaattttgaggaacagagagaagagaagaacggaccaaagattgatcgggcgtatagattggcggcaatgaagttgcagtctccagaaaggtaagcatcggatgtcaaagtcgacatatttgtacagctcgcgattcggttcatcgccactcgcaaatcactatttcacctcgtgtcgaagatcgagaaatttaaatcagaaacaatccttttgaaaaacaacaggcggaaagagaagatcgaacgtacgtgatggaagtagtgatcctcaggaagttctcccactcgaactcggtccacatgctcctaaactgagtctcagtacacgttccgggtttgatgtactccatgatatcgatgtgaatatcgctgagcaccacgtttgagctcggctcactcgcactctggccatcgtatacaatgtttccaaagatcacacccgtctcggtcgaagataccttgatggtcgacttgagagagaggaaaccgtggggggcgagagtatgggttgaggcacgctcaacgactttaaggtcgcccaacgtcgcaaactcgaccgatagattctgaagagtctcctgcgtctggttcacgattaagacgtctaggtatttgagagaaatcggtcagtcattgatgtgcacacaacatgctgagagaacaagagatgcttaccaagattgatatcgaaaccatggacagtaacgacagcctcagaataaacaggatcggagaaacctagtatttcccaatatagaagctcagtgctcttttcttaaggataatctcaaggattcgctcaataaagcttaccagtaagttggataaccttgctcaacttggagataaagtcatccttgatgtcggccgcgccggtagcccggatcaaatcagtctcgagctagagtcatacaaaaatggccaggacacaaagggaaaagatcttgttgagcatcataacattcaagctcaaataaaagaagcacagaaaagcgaaactcacctcatcagcatccccgccagtagccttctttgagaattgtctgaatgaaatcgaatcatccacctgaatctgtaccaacttgttctctttcctcttcctctcctcgaccttactcgccgccgccttgaccatttttgcataagccgccttagtatctgctaagaagagttcgtttgcgggtcggctctcagccaactcagcgatcgttcggatgcagttcaggattcgctcttgagaatcctcgtcgatcggcacggcaacaaactttgattgaccgactcgaatgatggaagccatgatcaacatggcctagaaagagtcggaaacgataaccgagacgcacagagaaacaattcaacatagttcgtaacacttgtcgcacagaacaagataaggaacgttcttacctcggctcgaagcgcattgacggccttgatatccgaggatttctcgtgaaatcttagcacgagcttgacgatgcttgatgacaataccgatccagtgtagaaatctccagccaggattaaagctatcaacgttgatagagagttgaacgggttagcctagccaggtatcttaccgaacaaagggatcggaaagacgaacatctgagaggagcagcagccttagcccttatcttggcgatcttctccttctccaataaagaactagaatagacagtctcagtcgcgtacgtcccatcggcaagaaccctggtcgtcgttgagggcttgtgctctaccggaccagttggctcgtcaggtccgtcaatctcgtccaaagctcgctacgataggttgcgtataggggtaagatgtgaaaccacatagagtaaacgtggtagagattcaggatgtgaagagtcaggaatgagccaattgaaagcggaaaaatacggcacgaacctgctccgaggcaagaataggaacctctccgatgatctttcggatagcttggaaagcggagtcaatatctgttttgaatttgtttattaattttgaagcaaacacggtcaatcctcttgtcattacagtctcaggattttttaagaacagagaagagatgacaaaccctcggtctctgcacagtattctccgataatccacaaagcgcctcggaagaccttgccagacttgacgtcactgatagtctccaagagcttggctacgattgactgtcgaagcttggggaatttctccacaacctctctgtatcatacggtcgccgcagaatcaacgttagctttggcacacgcttcaaaggaaggatgtgatttgcaactttctacgaaccgaacgaaagaaataacgtccactgccgaagagtttccggcgtctccgatgaactccatcaacacatgcactaccgacgcagcgacctcagagaaccggatcgcgcacgagtgaatggattggatcaaaagctgtctgtactcgaggttctacgagccacgacggagagaaaaccacgattaaatatcatgacctctgaagacaaattgagaagggtcgaaacgtaccttctcatcgcccttttcctcctgagtgttgatcaactgcttcttcagcaccgcgacgacctctccgacgtttcttccggagacaagttctaatgccaaagcgagcgcctttcgcttgacttccatatcacctcctccagcagccgagttgaggactcgcatgacatccattaccaaactatcgagtacaaactcgtgtttgattctgagcgcgttgaccctttcgagaacgattaacttgacattgttgtcagcctcctttacgcaaagctcgaggaaggtaccggcagcggccttgacggctgccggattggacgtcaaagtagtcaacgaggttgcggcctcatattttacagtggaggatgaggcggtaaggagctcgaatatcgttcggatccactttgctcggtgaggagagtcggaccgggcgtcccgtcggacgaggtcgataacggcgagttgcatcaactcatccagactagaaatttcgtcaaagatagacaacaaatactcgacagctcgaggttgagcgatattgcagagcgacacaaacgcgtttcgacgacaggtcgggtcggattcctgtataacggggtaagaaatgaacaataagtgatgtgcacaaggctatgacagcctgaagagtaaacaaggcccatgtttgactgacagccgcgaggaaggtgaggagaatttcgggagcatcagggatcaggtgctcatgggttttgaagatggagtacacggtgaagaccgcgttttttcggacgtagggatgtcggtgctcctataacgagcagaacaatggccatatacttctatacgttagtccctgtaatttgttctctaggttaacagaagaggagaacgaaccatgcagcttcggacagtagggaccaaaggctcgaggagctctgcttcttgaagcttttgaacagcccgaagagttcctcctcggatgtactcgttgggatgttgctatgagaataacgtacggtcaagagtatcagctttcgctaactagaaccttgaaacatactgaacaaagatgttgtactcaccaaatcgtttcggatggcgttgctgtttgttatgatcaagaaggttatctcgtgagtctcgagactgagatctagtgaagagcaaggcaatcgacgaaagcaacatgggaccttaccagacaaggatcatttcttgtttgagtttaccattctcgtctaacttggggcagattctattgggtagggcgttgaggagatggtgtcaagtgagtggtcagagtttaggtttggtttgcagagaacacgtaagacaaagcaaaagcgatatagaaattaactcactcccaatagaaggcaagcatcttctttatctgcttgttccggttcggcagaacgaactggatgatgggcatcaacaagtttggctgagggtttccattcaaagtggacacaatgatctgggtaagggtatctaacttgagctgatcggaacccttttcgagtgcctgcctgagctcttggaacgaaggcgattcatttcttccttcgttcgtgacgactgtgtatgctgttgggtcgactgtactcatcgttctacacaagaagagagagaatgaaggttgtagaggttcaaaggatgcttggtcgctatgggagatggatgaaaaggccaaaaacacaagagatggcagggatgagaaaaggtcgggggcgttgaataagtattcagatattttacccgaatacttagctaacagttcacccactacagccctatggcctcaatcttggtagcgacattcgcccatccatcagccatggcagcatacagaccaccgcatagaaggaaggaggatagggtggagagtgttgcgagtatgaaacgtactgctgctatcaatgttgctgcagctccatcgatggaacatatcgcttcgatctcacgctctggtggacatgctccaaatgaagacgccctcacccattattccacccaagagtcttttagagcgttcattcagtcaaaggtttgtatgctgatgatattctatcttgtgttgtcttcgtggcatatctgtctgactcatcttgttcggaaacactgggtctggttagggcagttgacaaagctatatgagaaataccctgcgtttcagcaatcctttcggacaatttccagggatgagagagatctcttctattcaatcaccgacattcttcttctttttcggaaactccgagaaggactgattgcttcaagaaggaccgacaaattctctgtagaggtctatgaaacgtctgcgagattagcattgttgatcaccgatcacgcacagctcgtctcttcattgtcaaagctcattccagacttgtacttggcctccaagccggcccattcaaccgagaatttagacacggatggacggagtctttacgttcagatatacctgatatatcaactgtcctatcttcgatcgcctcctgcgtttttatccattcttcgatcctttccctcaaaattcaagcaaagcctcgaaccaaatactcttcaattacctctccgcatctggtctctttcgaactcgagctcgtaccggagactattttctctctttaattctcgttctttatcaccagaacaaacatccttgtccgacgagaagcagatccggtccagtaatcttgatatattgatccagcgaacattggaccttggtttgcttcaatggcgcgaaggagcatgggcaattctgagaacagcctataaggaatgtccagagactttcataaaggatgcgttgggatttaggactgacgtagagatcgagacggtcagagagtggttgaaagctaggggcgttaaggagatagttgaggggtctggtcgatggtcattcgctgggatcacagcatgagatcctcttcggctctcttgtctataagcattcctcctgaggttcttgtttcctccttggaggatgtatagaaaggatagaaattgtataacatattgtattctatcacatgtagattctcaagatcagaacattaatgaaacttgaatgcaggtatagcacaaattccgattgtcgtgcaggttgcataggagatgaccgacgtcatggccgtccacagatgtatccttgggttgtataccatcaacattttcatctcttctgctcaacaacgaagccatgtcgagttttgcaaagactttagagcttgatcctagactaaagttgtcccctcttcagacttctgccgagtatcacacccacacacatgctcgtgcttcttctcatcgacctctcgattctcttccatcgccaatccatacacaccatcacatatccgcgcctgtccctaaagacttacaagccaatgatgagacatccagcaagtcaggtgttggttccatctattttgtaggaaccgctaccgttatccttgagtgggccgggttgaggatcatgacaggtatgtctcttgttctttccgcgattccagtaatgatcttaccccaccaactggcacacgactaacctggctcgtgttgaatcgctctaaatctgactcaatctaatcggtgctgtcagatccaaactttctacatgcaggtgatcatgtccatctgggacctggtgttacagccaagaggctcacaaaccctgcagtcaatctagaggatctacctcctatcgatgctgttgtcctcagtcatttccatgaagatcatttcgatacagtcagtgaaattcgttctcaactgtttgatcaggtcagttttgcagatatactgatttttgaggtgatgtgatgtaacggttgtgttgcagcttgttcagtcggcgctgagaaaggatttaccgatcattagtacacctcatgccgtcgagtcgttgaaagcactggggttcacaaatctaacagctctcgacacatgggacgaattaatgatcgtccccactcatgtctcttcctcgtcctcatcttctcagtcagttctcttgatctgggttcttttctgttcccttatgttgcatgctgaatactctaatcgtttcgaacatttgaacgacacagaccatcgattagattggtatctacacctggtgaacacgtctccggtcctgtagtctccaccttgaacgatatcataggcgctgtacctcctacatcgggatggatccttgagttgcacagaggaaacaatcagaacggacgaggatacaagatttacatcagcggggatactttgatggttgacaaactcaaggttagcctctataaatcttgtcctatttggtcctcttgagcgttcaagacccacaatcaaatccagtgtttattcaagaggtcacgttgttgttgtttttttccctcttgaactcgaaatatcgatctgtatgctcatacgaacggtacgacaggaaattccaaaacgctttcccaaagtcgatttgcttctcgttcacctcggtggaacgactgtacccagcgcgcaggtccgtttcgcgctgatagttatctcatcaggcctttttcttctttcctccatcacttctctcttcgtcttccttatccgagccactaactttttgggggaaaccccctctgtcctcttagcttcctttattgatggtgacgatgaacgctgagcaaggtgtacaattaatcaaagtacgtaccttgccctggtgttcctccccgtctcctttcggatcagaagtcactcactctgatttcttctatttatgactttatctctctctatcacccatacagctgataaagcctttgttgactcttccgatccactacgacgactatgacgtattcctctctccactacaagatttcaaaagtgagatccagaaagcggcggaagaggagagcgagatcgaagctgagaaagcaggaagcgggggtgaaggtgtcagttggctcaagcgagaagtgatattttgggagagaggggacaaatttgagtttggtgtacagtagctgaaatttgttcgtgcttccttctctcgtatgtatttctccttctttcttctcgcctcatcttcctcttcaatgaacgaattagtttagttgtatgatgactactatgtgtacctattgttcccctatgtatcctctgtctcctgtacgattttctcttctatatcaattctatgctcttcacaaagaaaaaagactgtcatgtacatgatatatcctcaatcgtaacctggttcactagaacccgctggtaagaaatggatacaaaagaggaactttatctgctcagttatccaacatgttgttccaacaaggtcatttagatcgatccatttgcgcgggcgcttgcgcgtactcgctataagtggaagctgggaggatggaacaaacctattcatcttcaataaaaacacggactgaaccttgaccccatcgttccatcagcgcgcgcccacttctcgtcggttgactttttgtgaaatcgatcatcaacaaatgagaacataccattagtcaaaacacgttctccttgtaaaagagaaaataaaacaacataggtaaaaaaagacagacagacctgaaagcgataccctctgcagaagtgacttgcattccgaaaatcgtatgtttacaagcgatatctagtaaggtcgaagcaatacccaaccttctggcggaatgagctgtgtgtattctgtgaatacctagttgtgtcggaagtggtgtcgggctttggacaatgatgataggcaagattcaagtgtaaagaaaaggaaagtgagctagaggcaatgatagaaaggaaaagggatgcaaaggggcgtactcgcagaatacgccaccatcgctctcatctttaccatcctcgtcattgccaggctcaactaccatcatctctccttttctttgtccttttatgccatcctggttctgatcttgacgccggctaaggatttctttccgttcgagtactctataggcagatttgatctgttgtacgacaagtgcgcccaacacgacttgcttttttatatctaaacctaggcttaaatcggaacgggtacttgaccctgccccccacttggctttggaagacagtgaagaagaagaaataggagagccgagaaggaggaacgttttggtttggtcgagaatatagtctggaagaggaggggaggagagcgtgctgtcgatcaaggcgtgcaacgcttgtgtcttaacaaatcgaatgtcaggatgggggttccacagccaagaggaaagaaaaatatcagcatgaacaaaatacgttggataccaatataccaagtgaagcaaaagaaaagcaaaccaaccttcttgccaactttcccttgaccacggccaagcacgaccaatacccttcctctccctctcttttttccgtttccaaattctacatcctcttgaacaactctccagcactcttcatcttccaagccgctcttcttcgttcctctcacttgcgcgctgctcttggaacgatcagcatcatcccattctagcccttcgagcacccgtcgatggtgaacccgatgggtaagttcatcagtgggtgataagggttgatacgtcatctggcatatagcgcatgtcttcactcgaggagcgggacaaagcatagtctgctggagaggagtagaacgcttgtttgcttttgatatagaggtaggggtggacgttgtaaacggccgttgattaagcttcgatttagactcagatccgggccgagattcaaacccaggagaatcgccgagggtcgagacaggtctaaagaacgattgaagagacatttgaccgtgggtcttgtctctgtttcttaaaggttctgatctagacgccatgatgtttgtttcaactttcggcgtcgatccgggttgtagtctcgatatcgattcagagtcgatccccaggtcggtagaagaatgaggggatgaagttattgaatcggctagacacgacccatccttatcttcggaagaacacgaaggtagatccacgctcgacgtcaaaggcgagcttggaaggtcatctgagaagattctatctgatagatgtccggctggacggataggtctaatgaatttctcaatataaggaaatttgatcagatgtttgattatcttcttgctctacgcacagctatcctaaagagagacgacgagatgaggccagaagtaaaaggaagactaacgagctagatttgacacgtttaacgggttgagaaccaagttggattcgagagtacgtccggacacgtttaacagatgaggaaggagcgcaggctgaagatgaagcgggaagagaaggaggggataatgcaatgtcacgcatcggttttaataaaaactgactgtgagtacaggacaggatgataagaaggaagtggttccaagagcaagagaagagtcgtgcaaggaagagagatgatcggatggatgaatacggtattgatgatacatgcaattgttggacgacaaatccaagtcgcgtggtcgcttctatcgatgaagtgcagataagataagatcaacattgaccttgaattatatgctgcttgtcaagaaaaacttctgatcgtctagtttatcgaacaactagcgggaagatatagacttcttcatcctcaatgttttctcaccatcagctgctgatggatgacttgacaaagcatcgttataaaagggggaaaatgaatcaggcgaatgtcgattctcgtacgttaaactcgaaaacagcgttatgtgacgtgaacaaagacacagcaaaggaacagggagcaagatatggaaacgtatagaggaaagagaatgcaaaaagtaaggtcccataaaaggggcaaaaagaagggtcaaggcatataaagaggatagtcgcaaagacatgttgagaatgcgtctttcactgtggaattaagagtaatctactcggttcggtgaactgtgataaagaccagatatcctttggtcagctctgctgcatacaccacgaagacataacaaggatacgatgcactgactgttagcagtcgaagtgggctggtaaccggaggcaaagtttcgggatcgaccgtttcggatgacgaaagggaagatcacctggtgataaaggatctcggcaccctagaaggtagataacatgttgatcagtcaaggttactcatttaccgattcaagatcactccgaattgggtatagacatactcgggtggcggggagctggagccagatgaggaaggtagtcttgaagacaaagtagaaggctattgtttgcaaggaatttttaaaacaagtaagcgtctacactatggggtattttgacaaagtgattcggtagacatacggatgtagtctgtttttagaaaacagtggatggcattgaataagtaccggctcggtttacaaaatgaagcatgcgttagacttacacatgaccaatcgaaggaagagagattcgacgagagtgagagtactgaaagaaacccagtaagctgtacgacgaatgaaacaaaatggaaattagcttccggacactgtcatcggttagattaaccccgaaggatacttactcaaccattgcttgtcgtcgttctcgctgggagactccaaagccttcacggaaaggtaggctgggaggacgtaaccaaccaaagtctgagaacagtgatcgagccatcgttcattggatcagtatggcctctgttcattcacatgaacacgacagaaacgtaccgagataggctgggcgagtccgaagaggttaaagaagatcaaggtgacaaactgatgaaaagtcaagaaaggtgtcagtcttggtatctgtacaaaaccaaagagagtcctcaaacttgtactgaccacaccgaagagaccaatgaaggagatcgccttagggacgttagttcgagcctcgaggtcgttggcaaccttgtatttggagagctacaagagaggtgacgtaagcggccgataagctttttttttccctcacccaggccactacccgttttggtaaaggtaaatatatgacaaacctccttgtcgagtccagcaagctgaacattgacggtctgctgaactgtttgatcgaaggtatagtttgtatgatgaacaggggtcgagatgattagagattgcgagagtacatgatgaagatggcgatgggcagtgcgtaccttgtcgcacgaccggatggttcagtacggcttgaagaccggcctggggcttttgctgagcagacatctgattcgttcatgagaacatatgcatcgatagcgacacgatggatgaagtcagtttctggcaacacgtacaaccccatctcttctatacgtcgtcaatgagatataggataacggccgattggatcatgcaggagagaacacagtgcaagagttggctcgatctgtacgtgtgattgctggtcgttcgaaattccatttcttctctctttcttctttacaaatatttcagagcgagaactcttgagaaacgggtactcacgtttaagaaggatatctagatgcgttggtgaagagagaagcaaacgaagatgtatgggggttgtgatgcacgaaaggctagaacgaggaaaaaaaaacacggataccacacgagcacgcagcaggggcggtgttagggttatctggccacgtcagagtcaggatggatatataaatgccgacccttgtcaatgaagtctattaggggaggttgacattttgtataggactctcttcaaaatcaatacaaaaatgcacatgccttgaagatggatcagaagcccgtttcttcttgtctttgcgctcagataaacgttcaagagaaacaagtcatgaatcaagcctttctagaggagtacatacacgtagaaggaaacagtgcgaatatgcttgtgtgtatgtacgtggggtgcgcgcaagagaagtaagaaaaagagaaagaagctcgtagtctttttcggaaagtcattacaaaagcttcctaatcaattcgccaacttcaatcgtccatctcttgcgtttgtttctcatctctctccatctctcctataaagcgaccatgccatcccaagcttatcttgctcttcaggtagggtgtttctctatctattcaacccatacacggcttaaaatctcttcgttacttttgtagtccgtccactcgaactctgttccattcgtcccgcctgtaccgacttgggcgttgggcccgcttgctactgtgacgctttcaatagccttcattggctcgttctatttttcaacgttcgttactctctccttcgttcgttctctttgcatcaatctcctctagagctctgaatctcttgagtctctttcttctcatgtttccaacagtataaagaagaatccggttcaggaagtaggcacggcattggtagccagctcacttacaggtttaggcatcgtagctctcttctgcgccgtaggcgtcaacgtatgaagccctctgtataaatgagagagagaggcaaaacaaaacaaatcgccgcaaaagagaagaatgagtagatagcttaataagggaagtgtgggctcaaaccgccgcttagttggatctgtgattcgaatgttggacttaagaagatagtagggccgatctggtgagccattgtcatccgccttccattctttcttaaccgatggaatgtctcgggagatcaacactgttcttgagctgactgtttcttgtgaatatcgtttggtaaatagaactagaaagaattgagaacggtcgcttagtacaacgttataatatgttatatacacttctcgtctttcgacccgatgtagtcatgtagtcctgatggcttgcagtacgttcctttcggaactgttctttgatttgaacaaatgataccataaagacggcgcggggccaaaggaaaggatctcttctctccaacttgaacaacacagcgagaatatcacatatatgcatttaaaggtatctcatcgggagacccaaatgtctcccaatccagcccaccgcgctatctctttctctccgactacgctttcagtcccagccatgaccgaatgacctcctttcttcttcgagagggaaggagcacgtacaagtctgtagcctccaaggaaaaccaagcctggtcgagtgggaacgtattgaagcgtaatcgtcttcgtttgtgagtttgaacttgtaggttctacagatggtgcctcctctgttgtctttgtcgacgctggtgatggattgagcccaaaggtttgaacagatggacccaacggtctcaacgtctctttcgaatcaatactcgcttgcaacgaaggatcaacaggaatagaaacaaatcggaatgtgtgttctttctttcctcctcctcctcctcctgctagtcgatcatcttgacttggtgtgaatgacagctcaagtctgatctctagctggaggatccgttcaacttttatctggccgggtttaggtgctcggatgatggtagactcgaccttccactccccttctacttcctcttcctcatctccgttgtcatcatcatcctctccttccgcctgatttgtatcaccggcgtcttcatctccatgatcctcgttcgcttcattggttctgtcaaacggatctcctctatcccaatccctctttctaggcgaaaccaagggagacccagtccctcctggactgagtacacttcgaccagcaactctatcctgccacgattctaacttaccaccaccaccactacctgctgtcatgcccagtgatgatagtctgatcccagcgtttatacctgcccctgtcaacgtgacgaatgacgaaccagaatctgatcgcgcaaaacttggagggttcctatgaagttgttgtattggtaacgatgacttcccgcctggattcgcaaagctgttcaatgaaggtacagggatcatgctgggtaaagggattgtcggctgagaaggcgtctgcgcaggagtaagacggggtagaggcgcaattggaacccggcggtttaaagtagctgtttgtaaatggcctgtttccccataaggtgttgtccagaaaatgtctaatcggctttaggtgattgagaaagataacaaagacgctgttagcacctatatgcatttttctctgtacacattcgaaaagaagagaaggtagactcacccaagaggaagcacgcctccgggttcgccttggctggaacgtccgctctcatccacaatccagcaaatctgcctgatatttcctgggatcaagagcgatccttgtcctccttcgtcccatatcgtactactgtcttcatcttccgattgaatttcgatggcctgaccgtatttgccgagattattcattgaccggaaggttaatccgtcaactggttcaaacttcatccgaggaaaatacataggaaggggggatgtattttggatgtgaagttcgagaaatattgtcttttggagggaaggcgaaagttgggcggtcgtagagctattgggaaagtgtacttttgtcttgaccgataatgggttgatagcttggaacctgcgattcagagtagatataagagagagatgagtatggttctgttccaccttctgcatgaagaactaaatcgtgaccttacttgtagacttttcgaaaagatcgttcctccccttggtcatcctcccagaacacctcgcacactagcccatgttgaccaagttctttgatctcccattcaaccttcttactaagcgcgcaacctggatcgaccccaccaccttcctcatcctttcccgttatatccgctaggacgactttggccgagaccgaatggatctctactcggagcctcactctggctactggcccggtcgttgggttggaaatcgcgatgagtgagcagaaagtctcacctaacgagatcgacccgaatgaggaaggcagcgtcaacaaggtcgatagtccggattcaatcttgacaaattcacccagaacaggtccgttcccagcgttcaagagattttgtctcgaccgtccgaggagagcgtcagaaagaatcgtcggtggaagctgatggctgagcggtggttgggcagagggtgagagagatggttgggatagtcgcatcaccttgagtgacaacggagggatcgatgagttcgatgaagtgacaccggtggcagaaacatgactagggggcgcaggagaagaagtcctggacctagagagattatcggtagaaggaacatggtcaagttctatgtattccgtcgtcacagcagaacaagtcgtatgagggagatacatacaacgatgatattgtgtttgacagaaactggttattcatgtagaaacctttagaatgagagatagagctgaacggtacgtatatcaagtcaagtcgactagcctaggtccaaaagatcaatatgtttgcctcgatgacgaaatgacagtgatgacgatggtgatagtttgaggtagaaagagaagaaggtagattgaatctcctcttgatctgaccatctgctgctgttgacattctatcctgctctctcctacgtaatctcaagcgcttttcgacacacattgatcttgttttcttcatattcctcatcatgcctctcaagggtgagtagtgttgctttacatccttgcgttctcgcgttctgtcttcccttgatctctttcggcagcgtcgactggggaatcaccttagatacggtttagttgaatatcaattaagtctaactggacccaaagcctgccttaccatcatcaaccatcatcactacgaccacaaccacgacgaccacgaccgcctcgactgtcaatcacgagtagctagagggccatcatgtcggacaacgaggtatgctttcaaaatcagaggaaatctagaaatcagatctcgggtattgattgattgaacgtgcctctttctctgactcgctataactcgtctcttccttcgcttcaatcgtctgtactttcctcgggtccacctttcctaattcacctaacaggacgaccgcgctaccgctcaggaggaccttcaccggaaagtattcggaggagacagtgattcagatttctcaagtgatgatgaggatggcaaccgacgttcgtattctgacctgcccatcaagacgcgtttccttgcgtaaaaagtaatggatataccaactcaatcagccttctctcattttgcccaaccgacctttgtctgacgctgccacaggtaaagcaagtagatcagccgattgctcttcaaaatcaccttccttcagtcgtgctcgaggatcagcctctcccgttagatcagcctactcgtcacccgcccggtcacccgtgtcagctcggtctgtatcgaggtcggtctctcccagcgaaggccgagacggcagagacggtgaagacgatggtgattatgagcgagaagaatctgccaagaagatgagctttaagaggaagagtagcagaggcgataaagaatcagcagacggagcagtagaaggaggcaaaaagtcagtccactagcccagtttcttatataccttggtatcagactggcccattgcaaggaggcggatagcccggactcaccgtgtctttctatcaattgattacttcttggtcgtcgataggaaaaaacgaagaaaggattcaggcagagatcgatcggctgagcctgatcttgaccaattggaaccagagatggatgcgggaacccgtatgtgctgtcttttaccctttgatttctctggtcctttttcctttgactgacctggagtttattctcttgattttcatctgacagttcgaagacttgagctcaacagaaagattgatgctattgttaaggcgcctcggaaagccagtaggaagaagaacggagatgatgtatgtctaagtctttccgtttgtattctgcacttcctgttcttctcaaattgatcaacttgcgtttggtttctgttcgattgccgctatttcgatcctcccaatcttctactcaacataggatctggacatgatggcagatgacatgatccagaacatcaaagaaaagatgtttaacgctgctgatcaggacgaactcgctgtggttgagaaacgacctgccattgccaagctagccatgctcaaggaggtcgttgcgattctccaacggtactagttatcttccttcgtctttttttcctcgaaactgacaaacaaaaactgacgagaggccgcttctgattcatctctcttacattcgcagaacgacattaactcagtcaatcattgataacgatcttctaagtgcggtcaaaaagtggctcgagcctttacctgataaatctttaccagcgctcgatattcaaactgctttctttgatatactcgtcaaggtctgtctttcgctttgttgagtgttcctggaagcgattgtactcatcctgttccgctctgtatcccattctttgctcactcgtctaccaattcacccattgaaccacaaagatggatatcgaacgagataccctaaaatcttctggactcggtcagcccgttctattctataccaaatctcgacgagtcacgacgtacatcaaacgacaagcagaaaaacttttggctgcctggtcaagaccgcttgtcaaccgaagcgcatcttggaagagtaaacctgtacctacattggatgatcttcggatgcctggatcttccgctcctggaggtggaggaggtggtgccgggggaggagaaagaagaggtggtgcattgaaggctgttttgggaagtcagaaagcagataatgaggtagaaagagagaagggaaagagaagaggagtacgaatccctcaaagcactgtacgttttttttctcgccacgcgtgttcatgtctctcaaccgatcatctcctgatcacaaacacttgtctgtcttccactcattcgtgtcaaacccctctttcccagcgagtcacattcacccacgcgccgagatacgaaggtccttctcaaaacaacagctctcaatctgcggaattaagtcaagaacaactcaaacgacagagagatatggaaaggatgaagaaaatcaaaaacaaactgaatgcagctaggaacgcggagagactctaaattcctttacctctttgcttcttctctccttcttcctatttggactgtttgatacgtaactccatatcttatcgtcgtgtgtttttgatgtatgaactttctacttggtttcttcttttcagttagatctccgatgagaggttaagtttgcgttctaatcccgacattatcatgccatagtctttgatcatgtaacttcgacaggtcgaggatgatgccatctctttttaggcacacccacaaggacagaacgagatcacggaaaaaaaatcggatgacaggcaagagaaagcttcataatctagatatcgtcgagaggaaaccaagaagaacaaagtgggcgaggacaaagagagagaccgactagtcaagagaacaaggagaacaggaaaggtaaagaaaggaggaaacatgacagaacgatcggaaaaaaggccaattttctattgattcgcgttggacctctcattgataaaagacaaaaaggggtacgggacagatgaacgttgtaaactgattttgtggaagggaaaaatcgataagggcgtcgagagtgaaacgtatgtatgcgtggttaatagtggtcgagtgttttgatgacaggggcgtctgttttgaaaagtaacaaggcaatggtgatggtggtgggggatgatttatagagcagataagcgaaagaagagagaagaagtattgaagaaacggagggtatcggattgtacaataggccacaagacgactaagaaagatgaacaagacgagcttgtctcaggaagagtttactgctgagcgcactgaacctggggtccagctccttcctcctcatcatcatccatatcatcatgcgaatgcgaatgtcctcccggtcctccgtgagctcgcttctccctatcggtcggctcggagagcttgacctcgtccacgtgaatattctccgggtaggtctgagcaggcgttctcgggggaagagcagactcaagtccagcgatgagagccggatcaattgtgtcggggaagtcaacggtaagcttgacgtagaggtctccgagctcgtgatgcctataggaaggcataccctgaccctccaaccgcttcaaagttccgggcttaatgacctctccgggcttaatagtgacgtgaacggcccgatcatcgagatgaaggatcgaaaactctcctcctcccaacgcggtgagaaggtcaatcttgacctcacagtaaagatcatcacccttcctggtgaacagctcatgaggcttctcctcaatgacgatgacaacgtctccaggaattgttccaggggcctgatcggactctccgttgaaggtgatctgctgcccacccttcattcctcggtcgatgtggacctcaagcaccttgcgctcagagttgactttctttccagagcaaaccttgcatcggtgcttaggatcgataatctctcccttggcatcacaatctccacagggctgctggacctgtttaatttgagatgcgattgcgatcagcttcttgtgctacgtatcgataggagtgacaatacgattgataacatgtgatccttatgactgacctgctgcatcataggtccaagctgtcgaagcatcactcggtatccctgtccgttacaggtcgtgcacttcttgacggcaccctcctttccacctcggccttcacatcctccacagatgacatgcttctgaagagcaagcttcttgaccttgccgagataaagctcggcaagcgtgacgctcactcggtgaacaaggtcttttccctttcggggaccctgaggtcgtcggggtcctcctccaccgaatccaccgaaagcctatcattcggacaaagggagaggattagcatcgagtatatcagtatgggttttatctgtatgcacgtcgattggctatgcagaaagaggagataagaaaaaaaaaggcgaaaacgtactcctcctcctccaccgaacaactgcgagaacaagtcctgggcgtccattcctccacccattccaccggcgccgctttgaagaccggcctcacccatctgatcgtacctgagtatcacaagttcaaaaacagatttggagtcaatgacctattcttgacaaacaagggaatatatgaatagcaaagaaacaagactcacagatctcgctgttgagggtcagagagaacctcatagctggtaaagtcagacagtcaatggatgccaatgtaaacggttagtgatgggtttgcatcagggcgagaaacgaggagctggtttgtaaacgctaagcggtgcgctcaacccgccggctcggagaatcttggagtgtataccaatgggagaagaaaggcttacgcatgggtgacctccttgaaagcctcagggtctccacccttgtcagggtgaagtcgaagggccctaaataatgccaaagagaaaggatcggaagagagagaaaaagaatatcagcatcctgttgcgctgaccaatcgagaggttggagaaaaaagtatcaagtggtggaatcagaaaaattaaaaggaagaacaggtctcgcactttttcctgtatgccttcttaagctgatcctccgaatcggtggggttggctccgaggagatcgctttattatgcaaagtgaaagggtaaagagggaggaaacaggatggtaagtaagaattgcatcttgtcagatatgctccgatcttcagccgttctaatgaatcctaactaaagagaagcaactcactagaatgcactgtttcagaaaagcacagaacatgcagccagccagccagccagaaccatagaccgaacgacatgaacaagaaaacatcgtaaagtgtcagtttcgtctatctttcgtcagaaataagcttcgtgtttggacgatgacagttctttttttccctccacctgtcttccgtgctgctcacaaaaagagagagaatcgcaagactggccaacgtacgtttccttaaccatggttttctctagagtggatatgtaagtatagacgaaagaaacagaaaggtgaacgggtgaacaggtggagagtaaagtcaacgaagaggaaacgtccagcttggatttttcgatgaatttctttccttgtcaaagagaaaattctagaaacttttccttctctccacctttgtcttc

SEQ ID NO: 2926 - DNA, 11093 bp, Xanthophyllomyces dendrorhous
aatcaatactctgctttcgtacattcaatatacaaaagagaagcaattcatctatagaaaagatgataataatggttccatgtctcgagagagaaattgaagagaaaaaaaggcgtggtggtagaatttttccattgtctgtacagtggctcccttaaatacatatatatctaggaactaggatgggcaaatcgaagcctatacaagaggttcttttgtttttgatacacgagagcaactaaaaagagcggaaagtacaattcaaaagatgcgaaaaacgataatgggaccaaaagaaaggaagaggatactgtttaaccgtctaagaaacccgcccatcgaggatccagtccctctcggactaaccacctgtttccacccagccatttcttaaccctctccctgtcgtctttctcctcctcctttccatcgtccagcacagtcatatcgccttctccttccaacgcgagacatgaccatccgatgatcatcattgctggtggccgttgatcgccgacagtctcgactgcttggagaatatgctcaagcgtggaggctaccattcgttgatcggcagaggacgcacgctcgatgatcgctatagacgtgtacggagggaaggcgggtcccgctcggcttcccgcgccatcttcctcagacactcccagaggagactgaaggacagaaagaacggatcggagtctggccacacccatgagaacaagtagcgtccttcccctttcgtaaccggggagggagaccgctttgccctttctgcccacaccggtacaaagcaccatgctctcggccacaccacgttgggtcactggaagattgaacatcaacggcccagccagagccgagctgactcctggtacgacaacagattcgaaaccgtgttttcggaagaataagacttcttctccaccacggccgtagacgaacggatcgccttgtttgagtcggacgactcgttcaccccgtctggcgccttcgagcgcaagggccatcatctcattctgcgctccttccgcgttccccgggaattttttggcaatatgcagcgtcgttgttggaggaatcagagcgaggatctcggaaggcacaagtttgtcggacaaaatcagtgtcgccgtctgcagtgatttatgagcggcgatagtcaagagagatggatggccaggtccagaaccaagtaggtgaatcgagccttttcgagcgggtacaggagggggagagccaggtcggatagataaagagtggttcgttgtcggcccaccaacagaggaagatgagccggcgacgctcgaggaagaggcagtcccgttgatagttgaatcatttgcgaatatagacaaagctccttcctgaccggcagaagaaatgccagaggggctggtactatccacgaagccctcgtcctcaatacctttggaagcataccgccccaatacgctcttcatctggctctcatccatcttgccgaggtactcaaaaggccagtattcagacacttgagcaacccacctcatccttctttttgtttcttcgatgctgcgcacatcgggttcggtcggaggaaagtacgcaggtgatccctcatgaagttgtggaacaggagaattaagaggaaacgcagagagtgaatcttctcctgggatgttgtcaaagattagaggtctacctgactcttttttaattaagctcggtcgggtggcagtggcggtctccttcgcgagttcacgtaacctacccacgttttcgaccgcgcctccaatggatttcggtagagcactcaggacctctcgtttaatcctcgttgccagcctacaacctctgccgttggtcgaaatccctacttgaagagcggaaagacctttggaaggatcggtatgatcgagtgggaaccgatgggtcgaaggaaatgtaaagtcggacaattcgggatgatctgcgatgttgagtggaatccggaggctcgtgcaggcctctcgcagggcgtgtagcgaacgagacgatcggtgggttgagggggatgtggaaggtgcggaatcgtcgatcactaaaagaaggaggatgtcattcgttctcattagtccttgtctgattcgtccattgggttgtttgtcacacacactcgcactgccaactactacaacaccgttggaagcaaacggaacgtagaacactcaccggaatcagtcacacaaaccagactgacatttgacaacgcattcagtgcgttctcccagcctccacatccgtcttcgaggttggtgaactcgacctgctgacgatcgaccctccacctgatctcttctgaggcttgagagagcgaaagtggggaggatacaaggacttttgcgtctgcatcaagcgcggcaaatgatctagaggctgctaatctattggaaccgatgacgaccacgagcttgtcctttggattgaagcatactagaagcgaggctgagccggtaggctgagcaaatcttggcctagacgatgaagaggacgaggaggcgcaggaagccagacgagatgtgagcggcgtggaaggaagagcaagcacagacatgatggatgacagtcaagacagggaataataatctgtagaaagaagaaagaaaaagagaatcgaaaaggaagaggacgagaaaataggaggatgaggttttgaatgatggaatttgatgaattccgaatatctttgcgccatcgtcgtgccatacacgtctttggcttacgtcagcggtcttatcggtaatttactttcagtatcggtgtccttgagttctcagctcaacagttatcttttttttgctagaccgaatgcacaagagtcatatttgtctcaagatgatatacaaagcaatcatgatcgaagagaactaccatacaagagaggaaaagggcacgacgaaagataagggaaggctagccagccagatcctacgattgacccaaaggagtgggaacaggaacaaagtcgatcgttcccgtgccagccaggatggctccaggctttccggttgcaggaacatcacccccgatcatgtcgtgagggaatccgatatcaaactttttgacacctgtaggattgaaaagcatcgtcggtgttttcagatggagacgagaggtcagttaagagactctccagcaacgacaatggtttcactttatcaagagaaagagatattgaaaagaaggaaggatcagaccttcaatggcctgaatctgctccgggcttaacttgatggaaagagctttgatgttatcgtgaaggtgctgatatatcgcgcgaaaaaaaattagatcagctttgtttcgattgttacagcatcgtctctaggcaagcttgagaaacagtcttttacccacctcgacttttcgaccaccaatcagggggaacacgtaagtcgatttggaaaggatgtctaacggacaaaatcataaaacccacggttcagcgaaaacatcgttaagattttgtctcgaccccgaaacgcaagacaggcagaaccatgacaacgtacaagcaagtgcaacagcagtgacgctctcgacacccacttcctgagcgatcttgtcaaggacctctgaatatttgacttcgtcctcactctgatccccttgtcccatcatgctgcgaattttttcaccagcagcttctttggcttgaagctgaattttggtcccagagccacaggtgagaccgcgttcgagtcatgaagtaaggaagaagatcaaagtgtatgacatgtcaaggtacctgcttctttgacaagagccgtccaccaccgatggcatcccaaggtgctaacgccatgccaaacgtccgggccattggaaggatctcccgctcaaagtctcggctataattagttgtgatttttattattaatgatggagaagaaaagaaaaggaaaacgaatgagattgtttccttcaacaacctcgaaaagttggtacataaatagataactaaaatgcacgaacagcatgacattccatcgtccctggtaaatgacgaaaggtgtcttcccgtgcgctctttgaataagacaagaggtagtgaggttgtcagcgcgagaaaatcgagacaaggacagagacgggctttggttggaaaaacatacttggcataagtgttggcagcagagacgatccaggctggggtatcactgattccaaggtacaaaaccttaccggattggacgacgatatgtaaggcgtccatgacctcttcaatggatgtcgtgtaatcccaccaatgaaggtaaaggatgtcgatgctgatttgaagcgaagagacaacgcgaggatgggttggtcaaattatcgcccccggatcaaatccatctgcgctcacgatggaaaaggacatactaatcggtttgaagcttcttgagagagtctcgcagggatatatgaagagacttcttatgattcccggcagagttgacggtctcgtttttgccctcagcgtacgatcggtagctgccagaaacagagtcaacatctgcgcgacagttgcttgtcgaggcgggacgaaggaaggtgacgattgactcacgaggacgtaaacttggtggcgatcaccattctatctcggtttcctctctccttcatccattctccgatccaggtttccgagtcctcgttttggtagttgttggcagtgtcaatgaaatttccaccggcctcaacaaaggcatcaagcaacttgaagcttgactcctataagtttctccgaatcgaagcgaagaatgtataaattgaatatatgcagtacctgaaagagtgttgtaagcgactgaccttatccatagaacccaagacctccttccaaccgcttcccaagctcatcgctcccagctgaagcggagaaactcgaataccggcggaaggagcgaggatccgcagtcgacccaaaggtgtcttcggttcaggagcaggtttgaaaaagtcagtcatagtttgtgcggaatgaggttatgtagttctgagaaacagtcgggatgatgatgatgatgatgatgatgatgaagaagtgcaaacagatatgagggactcagaatccatcaggttcttatactgttctccctatcaccagacattcgtaatcacatcacctccacttcttgactgtggtgttataaattacggcgccggtctcgcggccgggccgtccggcctccactgtgcaactgggttccaaacgaatcgtaagcgtttgaccagcttgttgaatctccatctggttgaactcagttattgatccgttccatcttccttcgtggatacatcatcagagatttgttgttaatgggtgtgtgtatcgcatagcaagcagaaaagatgttcaatgcgcaaacaaataagagacgccgtatactgagacatatctaatctaatctgttcgatgggtattcatgcttcatcgtcatcatcatcaccaccaccatcatcatcatcaccaccatcttcttattcttttcatgcgacccaccactatcaaacaagttggaaaaatgacatctcaagcagcactaccgtcttctactactaccttgacaagatctgctttgccggttatcttcccaaaatacgccggcagaacagcaaagtctgaagctacgatgaaggatttgatcgagaaagatggacaaaaccatcatatctttacgagtaacaacgttggtcttttctcttgattttctcctcttcttctctttctcctctctttactcggagataagctctcaatagccgtttctggttctcgctttgctcgatacaagatctttcacaaccatctgactcatcacgttctgtcggcatggagcctcggtgcttcctcatcacttctcaaacatatctacgatatcaacgctacagagctagtccctcttcaaccgctcgatagacagaaagccctgatatctagaggaatcaaagtgagagtggatgttccagaaatcactgagagcaactggactgaatacctcgggattgcagagtaagccgttcataagttcgggccggctgtcttttccttctcggtgatctcgtcaccccgatggacgtgaatcatctaaatcaggctgtgtaagaggatctaagaggctaaccaataccttggatcttgaatctgcagtgcttacgcagcctacctcgctttcttcctagctcaaacaaaatctttggggatgaaagacacgctcagcagttatgttttcggccacgaagccgtctgtccattttcttaagacatggttcacgatatctcttcttagctcacgagggtcttgtcccttttatagaacttcgggaaggaaggaacagatgcatccaagagaccggtgatgcttgtccgtctgatggcaggggccgttcgtgagctcagccttctactcaatgtgccgttctagtgtcaccctcgcttactttggcttcacaaaagacccgtttattcaaaccggctttggcgctgagttcgcattcattggtcctctgttgtttgctgaaggactggctgaggcagctgtacattccgtcaagtccgtgcaacctatctttccctctgactggcccgaagtgccgttgagtgaacacggtggggatggagcggcagagaacgtatcggtgttggaagcttacaaaagattggtcgatgacgaaaacgttgtgcagggggattatgatcctgataagatgatcagtactcgaatggtaaatctggtttctcatacctgtttccttcaagtaacagatttcaaatcaagtttattatcttctccttttcctctgatgctctattatcgacggccactgaagacggatgtgattaaaaatggaaatgcccccctcatcaggaaattggtctcccagtggactgcttcccagccagatctctcatccaaaaagaaagggaatgcaagtgaagcctgggtggagagaaagatggatgaggtcatggtttttgcggctttcatagcttgcgccacaggtaaactgggcgaggagccgaagatcgacttttttctggttcgtccttgtctattctcctctctgaggcttcttagctaatttcatgaagttactgttaaatcgataccgatcatgaacagatgcatatcttgacttcatcattgttcctaccatcattcatcccccttctgtccgcacctaaccagataaaacttctcgagacataccttgctgcggccttccagctttgtatgtctagaggccttccaaagattgacggtagaataccttggaatagaacacagtggcctgtaaggcccggaaacaagattggacggggaagagagggaaatggatggaatgaaattctcgaggaagcactatacgttcctggttcgttccgctgtgttctctgattgtttcaggtcctatcttccgctcacatctaccttcatctcttcttcttccacatcatggaaaccatttacatgcataagattctcacaccgtcaaaagcatcaggtcactcttttacctttctaccaagttaggtacatctcccgccggtagccttcccggttcttcactctcttcctcgctgaaatcacagcgtcaagacggagaagaagaaacgttcccagggatggggtcggttgatggttcgatcttcatccgaatggcaggcctcatcatggactacatgaaatggaacggaccggaggccgagagtgcgagttgggatcggtctgccttaggttgggatgaagcctggaaatagcgtcaaattcatctctagcgggtttttatacgactatgtctgattgaacttcagttatgtgtatggtatctctatgaatatgtatttttgttaccttatctatcattccttctggactgtcttatgcgcaaagtcattgtcaaagtcgatatattgatcaagatcagggttgagctgattctcctgattgtgtcgaagcatgtctgtctcagatgattctatgatcccacaatgcatgaaacgtgttggaccagggcggctggtaaaaccgaagacataacgcaagacaagaaaggtatcatacatagttccatgctgaaaaacacatatacaacagataagtcttggaaccaacgcagcagacgcataaactcagataccccatcgaagagcgagggaactcgaaacgacgctgacgctactaagtgccatagcaagcgcactgttcaaccccaaacataaaagtttgtcatgtcaatcctagcatgtggttcttctttaaactgaaaaaagacgcacctccagacaggagcgagttttgttcgaccagcagcataaaagactccagcggccagagctacatcaagtagaaaaaaagataaacgccttattcaaaagcgtgagataatgagagcaagaaggcactcacgaagcgcaatcaggttgaatactaaggcccagcaaaagtttagcttcgttcctataaattcataagacctccaaattatatcagtttttgttttcaacgcaagatcgcgtgacaagatgttgcgaagagtagacactaacgactgaaaactcgctggctgatatgcaagagtgagttcagcgagtcgagggacgaatttaaaagaacgaaatctgcagacacgacagagacttgagagccagatcccatggcgacactgatcaagttcgatcaaactgaagctgttagcacaccaaactttcgttcttccaagtagagtgaaatgtcaaagcgtttgtctcacccaacatcagcagcagccaaggctacactatcattcaggccatctccagcgaaaagaacgaaacgatgaccgtcgacgcctgaacctttggtgaacgatatcgttccctggagttttcgaatatgttcagctttttgttcaggaagaacgccagcgacaacacaagtctcatcaatccccactgatgaagttcaagaccatacacaagaaaagcaacctcaaagggtgagaatcacgaaaagcgcagataatgcagagtttaggagtgagcctaccttgcttggcaaccgctttggctgtcgtctcattatcgccactcaacatccaaacatccttcccactacctcttaaggcgtcgatcgtatctctcgcttccggtcggggcggatctgcgatcgcaaaccttgcacagactgtgtaaccatcatgagcatcagatcttgtgttctctgaggataaatgcttgattcccacaagaactactgatttggcttcttgttgccagtttcgaatcgtttcgtcttggacatatgtctttcccatcacttgggtcatgagagcttcgttcccgatagcaatttcaaatcgcaagggggatctactagtaccagtggtggggaggtcacaggtaacgacagctttgagacctctaccgatgatttcttcgcttgaaccagcagacactgtataagcggtatcatactggacaagctgatccgagcaaaatgtgcgaagcgcggttgccaatggatgagaggactgttcctctagctgttgaatcgctgagaggaggacagagataccatgagatttctggtcaatcccatcgctagtggatactgtcgtcagtaaggaaggcatcgaaggagaggggtaatcatggccggtaactgatggtttcccggtggtcaaagtcccggttttatcgaaaatgacggtatcgactttggtagccgcctggaaagcggatccaccaccttgcacaagcacgcctttttgggctgcgagtcctaggccaacagctgcagctgtgggagctgccagcccaatgccacatggacaagcaacaacgaggacggcgatgaaaaactcgaaggcgaaaaagacacggtcaccaacggacacagtgacgtcgagaccttgcttgatccaattgtcaggaagggcgttcgaaagtacaagagcaagccagacgacaaggacacagattgcgaaataaacctttagaaatgtatcgtgtgaaatgattgaattccaaatcaacaacaggtgcgctcggagaaaaagaaaattcgaggcggagaacttacaacaacaggaacaaacaccccagtaatcctctctgccaacagctctaccgggctcttcattccttgcgcctctcctacagctcttacaatcttttcgatcatcgtttcatctcccagcacctccactttcatcagcacggctgaaccaacattcacagttccagtgaagatctgatcgcttggacctttcttgacaggtttggattcgccagtgagagatgattcatcgaaggaagtcattccagagacgattactccatctgtaggaggaagagaaccaggttgtagaagaatgatatcgtcgatctcaagatgagaagcagggatgagtaaagttgagatgtttcccatggaggctggttcaggaaaagatagacttgagtgggttgaaggcttttcatcagtcgcgaccgcggtatcttgagtggaggccgagactacctgggacaacgtatgaggtttgccatcatcggtactcaaatcaatccctttgagagaacgataagaagactctttaggtatggcaagtaatgccgagtctggtcgaagggtccccaagagcgcaactgcatctccggtctgaacggaacgaacatacgtgacatttgagcatgttccgatgactatagaagcaagcacagacgattgtaaagaaaaacttaccctggatttagcgtatgcttcaaggactcgaccgattagaatgaaaaatatcaagaatacactggcatcgaatagggtcatcatcctgtttcaccccagttcgtggcgaatcttgcaaagtcagatcgatatttgctcgaaaaccgcatggcatagaagtacaacaggagtcttacctctcttcactctccaccatatgtccatcaatcattttcatctgtctgggggttgtgatgtcgacaatcatcattgccagacttgaaaagtaagctgtcgtcgtactcattgcaaccaaaaggtccatcgatccaaatgagaaaaatgtctgccaggagattgttttgacttgaactggttgtg

SEQ ID NO: 2927 - DNA, 52735 bp, Xanthophyllomyces dendrorhous
caagataggtactcacttcccgattccaaactgaacgattgtagctaagacccagagaatgaccgtacctctgctggctccaccccaagcttttttcatccaaaacattctgaatgcactttcctttggcatcaataccattccgacgatagagacaatgaatgttggtatggccaggatgagggcaagtgcaaagtacgtaaagagttgtttcgcttcttttcgctggatcgcccgtgctcgagaggagactaaaactgaacggacaagagtcgaactgaactccgagtcgagatcggccagagtagacaagatctgacggatggtgaaactcggcttggggctgtagataatagtgctcgatggcgatttgagagtcgtcggcgtgaacgagacaatacattttgaggaggctagctcggccagagtagcgttgactttttttacacattgagagcagaacattccttcaatcaagactgttactgttcgtagtttgggaccttctaccgggtttgacatacgcgcggcggatccattgtcggacgatacagtcgccatagtgaggggaattgacgagacaagggagcaatcatagccggcgtcatcgacaatttcgatgaggttttcggttgagagaagagaagaatgagtgatggtagccgaggcacttaggacagagatatcgtgagacttgatcaaaggatttggggagagcagttgggagagggtggatgagcaagctctgaaggtgcgagacaacacaaacggtatgagttcatctgaccatgaaaacaccttgagaagagatataccgagaagagaataggtactcacgagcaagtcatgcctccgaccattaacgtactaactagcgtatgctcttcaaattcttggattctgtctagagcagccatgcctttctcggtttcgaccccagctttgacctttgcgtctatacccaaaggcctgaccgcgttttccgtttcgagttgtagactctcaacgatttcgacgccatagccggtgtcctcaatgatctctgcaacggcctctgtggagagaatattggaatcgtaaactacggtcgctgagttagacagtagcgagacagaagcacggatgatgtttggtttagtggaaagtgactcggtcagggtattcacacaagatctgtcggttcaaaaaagacagaggatggtcgatcagcatccctgggtggttacacagagtcagggaaaggagagaactgagcaagaggaaaaggggaaggatgacaacaagacgaacccgcaaaacatgccttcaacactaaaaattgtttccagaatccgaggcttcaatggtttctccaccgagacagcgatctcttggccttcatcttgcctagactctcccaccggaccgaccatttgggcccggtcttcagcttgacattcatcacaattggctacatgtctttttcgtctctccacgcgctctttctctctagatgagataaatccgagctttgagagccagctagtcttctgccccatccaggcacgttgatcgtcgcttcgagttgcccgttcatcagcattggtatgccagggagaacgatcggagctagcggctcgagaagctgactgaatggagctgaggatctgaccgctcacctggactcgctcgacatcgaaaccagcttgctgtagaactgattcaacgcgattaacgagtcgtacggcctgcttcttaggatgatcttcatggtttccagaagcagtgattagggagggaagacagaaggagaggatatgggtgagataagagaccgataaggaagatatgctggatcgggtgaggaagggatcgagcaggctagtgatatgagagacacaggatggacaatctttcggagaagcatgtttatttcaataaggtgtgtccatgaggaaatagacctagaaagcgcactcacgggcgttaggtactgatattgatcagcgtgttttttttttcgacatcagacatttttgatcacaacgtatacatttgttcggtcaacttagtaagccagtgcatagagtcgaaaagtctagagagaaacgttgaacctaccaaataataccacctgctggggatctacgagagaggttgcacttgaactggcgtgtgtttccatcatagtattagctcgagccattgagtgagaggttgagaaggtgagcaaggtagtaagtggtgagtggtaagcgacaggtggaaatagtaaatgagaatcgcggcgaccgcttgaccttcttatgagcagatgggtgagtgttttagtggacagttgagacaattcaaaaacaaagataccaagagaaagagcaaaagaagaagaaaaattagtttgctggttgatgttggcaaaaagtgttcagaaaagagcgcatctttcggatggctggagggctttctttgattacgtcatcccggaggttatctttgaatacctccccagtcagagctatcgaagacgcacacagaacaagttgagagacaagaattggatatgcttcacaagacacgattgataccaataatttggacgagggtggcaaggagaggaccaagaggagacgttatggaaaccagacatgtaagaagacgtaacgagcaagaataccgaggaggcgacggaagagatgatgatgtactgccttgataagaatggcagtcaggtgttgtcacctttatctaatcacttcgccacagctgctgtacagagctgatgacgcgtttctatccggactctcttcatccgatctcgtgctgggcgctgaatccgatgattgagctccatcctctatcagaataagcgtcaggtcttgatatccttcgctacatccatcaccattaacatcaccatgggtttcaaagacacttttctgcccaccacactctcggcaacgcaggcttccatcagtgtactccttatcctcgcctacgggttctacgcaaggaaacgaaactggatcaccgaggaggccgaaaaggtagtgtcgctaaccttttctttattgataccttcttgatctagagaattcttcgtagtattctcttcaaaagctcctatgttgactccttctttctttgtccttactccagaacatttctttccttggcacgcacatctttcttccagctctcctgttctcagaaattgggcctctagcgtccattcagaatctcaagcactgttcggccttgcttttatctgtcttctgctctactttagtcccttatcccgaactgacctgttcacgtaaatttggtagactggtcaattcctgtcgtcgcgatcacatttcagctactttcacttgccatcagtctcacgctctcaaaactcaaggtggttccgccccatgtcgttccggccttcatcttcaacaacgtgacgtccctcccgctgctcctaattgagtctctcggctcagctggcgcattgaagagcttggcttctggtggggattcttctgatgagatcgttgctaaggccagagtctacttcttgtgaatacactctcccttctctttttttttcttctcttccattgtacttgatgcccgttgctcatatatgcatttgtatcctctcgcttgcatcaccttatagaatcaacgccttagtcggaaacttgactcggtctgtcgactcgttcttaagcgtgaagtgttgacatatgacttcctactcctcgctcaactaatcaatgaccgtctatctttcatctgctctctctttaggtttgctctcggtcccgctctcatgtcctcctccgatccgcttcctacagattggtcgttcagcgagtctcctttcagtaccgtggttcagaaggttcaggatgctctccctacctcatctccatccagacgtggttcatcagacgagcaaacctccctattgccttctagagaaactgttaaagaaaacgcgttcacgatgaaagataacatccaatcagtgatgaatcccccgttgttgggcggattggcagcagtcacactaggcaccgttgaaccaattagaaatgttgtgttcaaaggtggcgccggtggttgggtcaagccattgacggacagtattagcaaacttggagggctgtttacggctttgcagatgtgagctttggttcttattccttgcttgcatgttagaaaccacatggctgacttgacgctatttttgttccaaattacaggttcatcctgtaagaatttcgtttttttccctttctctatcatctgatccatcattcagtctctgaccgagcatcaactcatgtaaaacttcgtgcagaggcgcccatttgtgctctaagccttctactaaggtctctcccgtcttgctcattgttcttttctcctatcgattcttcattgttcccgtcctatcgatttcttggatcttccttctgttaaagtatgctccttgggtgctcaatggagaccccgttctggcattcgtgctctgtctgtgtccagtaggaccaccagcgttgacgttggccagtatcgcacagatgtgggttgttgtatttttagtgcccctcgacttctctttctttgactgaatatttctctcttcatacaccttttgtctacaggtcggacattgatgaggatgcagaggtctgtcctctcaaatgacaacttatacccatctattctgacgtccttttcatcgtttcgcttgtgggcttttctcgtagggccaaatcgctaggattatccttgtgtcatacgctgtcacgccgttgatttcaattgccgtcagcgccgccgtttggatctgctcaatgaagtactaaacctttcgatctcttaatctctctttactgtcattttcttgtgcctctgtgctttctccttcgcaatcttttctcaaatacacgacacgacatgcgcgcttctcgacctaggaagaagaaactcaaaaagaagtttcgttttggtgtcagaagagacggtcaatcttgcatagaattcaaagttccttgtatcctatgtgttgtacaatatctatattcgttgcttttatcaagtcatcagaaagaaggggagaagaacagacaagatatgcactccgatgaagacgcgatgaatagagcttaatggattcagaaaggaaatcaaacagcgggaccatcaagcttgatacccatccccaagtggtctgatcggacaggctctcccggaggcccagagacctctattgaggtcatttgttgatgtacacgtcaatcaagtctaagtcagtgaataaacgactcgcagaccacatatgatgagatttgagagaagggaggggagagggaaagcaacggacctcgtccctctcgaaatgttcgttctagaagatcattaaatctttttgggtgctgattgtaccgttcaagtatttcgtatttgaatttgaaacgatcgtatagagcatcaatgcgtgatacagaaaagggggaaatcaggatggagacataaatcaagacgagatgtaagtttcctgtcaatcaaggattgagatttttatccaacgaagaagtgtagagactttacctgagcatgaactactcagtcagaatataggtgtaatcagtcttatcagtacagattttatccttaggagaaactagtataagctatgatcacactgactggcatgacctgtatcttcccatgtaattacttttcggtcatttgaagagagttagaagtaagaaacacgttgagacgtcacgtcattgaaactttgagctgggtgagtttcgatgtcaagaaaatgtggaacgaaaggcttacactctgctctactcatgtgatctttcatctctctactccgccctggccatatcaacttatctttatcgcctgttagaatgacagtttttcttaaggatctatcaatcatttcaagcctttcaggagagacatagtgagtcaaacaagcagccgtttggaacatgtttcctatgggcatttggggttttgtaccattgtacctccgagtataatcctatttgcgttgtgcgcccgggtgatgtgatcgatgtttgtgtagcttagtcgatcgttgtagctttcgcaaggaaaggagtaggaagagggtaagaaagcctcacctcagtccgagtgatacgccgggttcgacattctgaatcatccggatcttcctcatccaaccagttagcagggtacaacagcctgatttccctttaatcaagtcagcgcctactctcatcattgataataggcatgggaatagaggaccgtactcaacagctgcgtcgattcggtcttcttgtttcttcgtaacaaacatcaacttcatcatcgtttggagaccctctctcttgaatcgaccagcacgcattgataatttttcgatcaggtttcatgtgcgatgaaaacaactcggcatgggattgagaaaaacgcacaggaggaaggtttcgtctgtatttgtctccggcacttgtgacacataatgtcaaggaggccaatcgttcaggaatcaacgtggctaactccagagagatcattcctcctagcgaaatgaatacggttgtgatgcgcgagcgcacgaggtcagagacagaagaaagtcagccatgatgtaccatatagaaagttgccggatgtgacaacgaacccatagaaattccaacctgtaggagttatgggggacaaggacatattttgagttctaactattcactaattctgccggtcaggacgtaccagatggatgctcttgctacctgtccattctacaaagtctaacaagcttacaacgtcttgagccatagcggatgttctgtgtagccctggtttcagccagggaagtgatactctttaaatcgcgcggaaggatggacgtacgtgtatggcccagaaggataaccagagtgaccggatccccgattatcaaataccaaaacagagtaatcggagagggagccgaaatggtcaacctgggtagaccaactggatgatccgttggaaagacccattatgaagagcacgtgctcctttcccgttccgtgcctgcaatcatggagaccagaagaataatgaggaacttcttctcgaagagggatctgaaagaaaacacaatcaacacaaacaattcatagtagatttcatgtccttttcgttcgtccgtattggtgtcctcgggttcatctgcccaaacccaatgtttccctttctggctacatgttgccggattcaataacgtcttgagatcctcatcttcatcatccgcatcggataacctccggcgtggaggattcggtaatcctgatgatgcgaacggagatggaatgagcgttaggatcgacttaaggagtgttgtcatgtttgtgttcgattgttcttgctgttactgatagtgttgttgatgaccttttcttcgagcatcattgattgtctatcgaggttgtgtcgtaaccctagcctcgatttactgaagtttcaatcttcgtcatccaacctttcacccaccatcattatcatcaccaccacgaatacgacaacaatgtctaaccctcgtttgggttggatcaaatcaaactccatctcgtcctcatctagctcgcctctttcgaatacaagacgctctcccgctccttttgcgtcaacgtcctcaataacatatggctcaagcaacgcgaatcatatcgcctctctgaaggatgacaagaaccggatatcagaatatcaagtatgtttgttccagcatatgatcgcctttttgaatggtcgatgatgaatggttcaactttcttttccgttgacgcatctccttatgtttcatagacaccagaggatcagtgtccaatctgcaaatccgaccgctatcttaatcccaaactccggttactcatctcctcagtctgctaccacaagatgtgtgaatcatgtatcgaacggctgttcactctcggaccagcaccttgtccgacatgcggtagtgttttgagaaagtctgggttcaaaactcagacttttgaagatttgagagttgaagaggaggttgccgtaagggcgaggataggaacgcagttcgtttccttctctctctttcctttcctggtggtcgtacttgataccatgaacgattggctgatcgagagtttgatgttgggtgacttttctaagtttcaacaaaaggaaagatgactttgaagatgacgcggcgtacaacgattatctcgaagaggtcgaagatatcagtgcgtttcattaatcttcgtccagtattgttacacaaacgatccataatactcttgtacttatcgttttgtctcgattggacattatcagctttcaacttgctcaacaaagtagatattcccgaaacagaagccaggatcgccgcttactctcgagcaaacgcgctgacgatctcgtccaacgcagctctattgaaccaagaggccgaactcgaacgtgaacgtgaagaagccgagcgtgaagagagagaatggaggagaagccaaggaaaggaacgagagaaggaagagagagagaaggaagaaaagcgacgagaagatgtgctgaaaaaattggttcgtctcgaggttatggacaccggatactctgtcttcttctcattctcaatctcttctattctctggcctccctttgctttctataggaattctcttctttaccaccatcagctatcgtatctactcgatccaaaaccctggcctcatccgacttgcccatcctagacgcgcctcctagatctgcgctctcaaggttgaaaaaacgagttcaaatagaaaagccgcaaggtccaccgaagccatatgttgacccatatgatgggtacgaagatttgatagggttcaagcagagcggttactttgatcctgttcgtctctttttcctcctacctattcgatgacgatttgggccttatcaatcttacgtccgctctttgtccaattatcccttcacataacaaatgaacagtcactagctccgttcctcaatactcaagacaaaaagtcaatccccctgaaagcaggtggcttcaaaccaacagaagtctgggaacgtggactccgctatgccatggctggtttaacatccgacgtcccaaggtgacgcccatcctctttctcatgtgtcctatcgtttgcgtgcagtaattactccacagtatccagaggaaggttgtttttattatagcgatggcactttgtacaacagataaatacacaaattaagagaaaagaacaagacgggaaggtcgtaaagcaacgagtaggtgagggtataaggcaggccgagcgacaacccggacggaccagatgagaagaacgcgcgatcaaaggcacaagaaaagggtataagccacggctttagttctcagacaattccaagatagtcgtcttttatgcttccaatggcgaactggagatcatagacatgtaggcaagcgaaggagggggacagtcaacgacccgtaaactcagacagacacatagggcgaataatttcgagtaacaagcatgtatattttttcatgaacagatagagtacagaaagacgaaaaagaggactgacaatctcggtcgcgtccactcttgtcccaatcagtttgcaacgcagcttcgtacctttctccaccttgatagatccattttcgtctgtatcgtcattgtcttctgtcttggccatcgagtatgcaggcggattcgaattcggatcgaaaatcatatttggcggcaagtgctgcgaaaagagacgtagaagaccgagtcagtcaagatcgttcatgcgcactttggtatcacattcaagttggatagttgatgttggtttcagccataattgtctactaaaacgaattgttacataaatcaacaacctctgcctaattaaggtcagagtcggatgtccctatgctaatgagtcatcatatagagcccacgttgtctccatcttttgccctgcgggttgtaggacatagaagagaacaggaggggaaaggaaatatgaggatgagaaaagtcgaaagaggaacttacgtgagaggaaacaaaaattgagagaggaccatgcccaagaaaaattcccatcttggatacggtctcgacaataccgtcgacgacctctcccttgaagggcttcatgacaatagccgaatattttgttctgaattctgcttgaccagttccaggaataacttttcctgatccaatgtcaagaatggacagaacagagatgatgtaactacatatgtcaacaccaagacaacaaaagcacgcttagattagtcattgtgctaggtcatgattattgcgagcgaagttggatgttaagttgaaagatcagctaaaaacaagtttgttctcatttccatttggggcgttactcccggatacgaagagctgagtttaaaagttctcatcatgtcgaattgactgtgtgtatgtggttgtgcgtagagtagcaatgagcgaagcagagaacacttacccaatacgtccagagcaagtaccttctacgtcggcgtgcagtttctgtttcagatattctgtcatctgtggtccaaagtaggacggatgaagaaggatagtttcttcaagttctttctaggttgaaggttagacagcgaaggggaaaccaggtaagtcgacggctttatgatggacgagaagaacagaaggaacagacataccacaaagaacatgttgagcaaaacgtgttaataataagattaggatgaaaggaagacacaagagatacaataaagaaaagaaaggaaaagaacgatggaggtcgtggtgcgatgagagagagaaatagaaagcgaaaaaaatctcgttcctgtttttgtactccttggtcctgatgcctgtgttactgtcacgcgcgtgacaagcgtaatcgtcagtgggtatacaagctgtgaatcatcacgtggttacacatccctcttctttttccctatagtacccaccagtatatcatcttcgcactcaccatcagtaccatcgtcatgtccacagctatatcctccatagctgttacagctcccaaaaagtcagtatcatgctttatattgcgctgactagatgtgccgtcacttagtcgcgatttcctagagaacacgaaaatatatatcgtatctggtcccgtcgcatactcatctctcgcttcgtctttcaaccaacgcatttcctccttgcacttgactcagactgagaccagctcgaagacaagtaaaaaagggcgagattcaagcgcctgtacaagaacaaacgggtagagagttgagtgagttgtttacttcttatcgatttacagacaacccttgtaatccactgctcactgatgatcgttcttcccaatgatttagacatctggtaagatattttctgtttcttaatccattcttcacctgtgttctttcttttcctcccactcttggcttcagcagtaacacatatcgagagtgtacttaacttatactgacaccgtatcaacatgaaatcttgctgatcgattcgttcatctaattgtaggtatggtaaagtaagttgtaatctttcgtttatctccctcgccccttcatagaatatgctaatatggccaactgactccttctcaccgcgtatcgcgttcatcgaatatccagtggtgagcacgatatccgttctatgaactgattcgatacgaaacgcgtctcaacgaatgatttgtctttccgcaactatcaggtctgggggtgaccgtgaagattctttccacacacaaacaaagtcattaacccgctgtatcctcgcccgagatgccggatacacaagagcagacgctcttggaacgaaatactgctgtctcttctttgcaagaggttgttgctcgttagggttcgttcgatcgatcggctggtccttgtaggattgatgcgtacgcgtcagaggtgatgataatctacagtcaagctaatttattcctacaacttaatatttcgcccgatcaaacacatgaccaatcagatccgactgcactttcttgcatcgactaccttcatcctcgcacatcttaccagacctttccatggactgctttggtcgagagaaacatgctgcttatagagacgatatgggaggagttggatcgatgatgcgggtaaacagaacgtgcgtttattattcgtcttctcgcttcggcatttgccaaaatctctgactaaccgaggtttgcggctatttgtaaacatcaggttgtatatcggaagagtcaaagaggaaggatccaagaaggatacggaagaagtcgtccgtaggcatttcggagagtggggggatatatatcgccgtgcgtcactctttctctcctgctctctagtttcctcccttcacttcgattagtaaccaatacatattctctttattcaatatcaacagtcaacgttcttcccggtcgaggagttgctttcgtcacgtaccagaccgagatcaacgcccagttcgctagagaggccatgtctcatcaatcactcgactcggatgaaacgctgaacgtccgatgggcaacagaggacccaaacccgggcgtgatcaaacgggagaaacgacgggttgagaatgaaggccgtgctgctattcagggaaaggttgatccaactcaggcagaggctgagattgtgctacaagctttggagagaggacaggaggatgagttgtacgcgttagatgaggaggacgctagggacgagaagcgaccgaggctgatcaaaaagtctgaaacgaaccaaccgagctcgcagccagacgatcagattccagatgggggtctgttggatagggatgctctggagggtatgaagtatttcctagagattaagcgaagaagagaaacagaggaggcttcaaagacggagactgcttctcaacctgttgctggcgggctgggcctcttgggagggtatggctccgaagatgattcggattgataagattgtctggtgtttatgttgtatcctgcccatgtgtttataagtttacacatacaaataatataagaaatgaactatcttgcgagacggatgttttccgagacgaggtgactaacccgctcgcaatacgcgtgttcgaagtctgcatgcttggcatcttgcttcaccttcaccttcattctgtgcaccatctaccttcgggttctccaacattcttatttcgattctttgcccatcaattagaactagaatcagtccagtcatgaagttcaccattgttggttgcgccctcggttcgattctctcctttggcttcgctgccggtgagtgttgttttgatcttcattttccgttaacctcaatgctgctctgttcaagtagttccagcatcccttccccttgatgcgccgttctcactctccaccttcgcttctgtcttcttgcctcctcatactacattgacacgtcatgcttctgatgaatcgaacgagatatagctcagacactgacgatcaatacgccgtctagtgtcactcagtgtcaaccggtcttgctctcggtaagttggttcctcagtatcttgagagaagagtgaaagaacggtctgcgaatattcggaaattgaaccttacccctcaattctcgtgtccttttgtctctttgttaccactcctatgtttttcggttgttgttccctctatacctctgaaactcacaacttcacaatgacaacactggcggtcaacaactaacgcttgtttatatcgacacttcgtacttgtcgtacgatggcctggacctgataactttcatattttggtgtatagtggaccgatactttggcgccgtactatgtctacatgtaagagtgcttctctcttcctccattcatttgaacatctgctctgtcaagcaaccagcccactctgatatcgttttctctcagtctaccgggatcgactctcatcaatccatacgagaccctcagcccggtcgatactacctcggtcacctggctctgtgatcttggaactgggacgaccgtgacgttcgccgtcaaggacggtcatggtacatactctcattttgtctcccttgctgagataagtagctgttgtcgttagattatgagaagactaacttcaggctcggattggggcgtgtaatgtaggcgccattcaatacactggagttaattccgttatctctagttcaaacactacgtggtgagtttgtgatctgatcaatcttctgggattgagatgactgatatctcgggagttgacgtgtgcatctattttcagtatcggaacggtgtgtcttgtctttctcgagccctcccaatcagcatacgcatattcatatgcctggttcttcctttcgaaacttttgttttgtagaacgctgtgatccaagcatctattgcggctcaatcgtctgcttcggttgcttcagtagggacgacttctcagtcagcctcggccaccagtgctggtgcttcctcaacgttcgttgttttcaatcatctactttgatatactcttttgcgcgtgcgcgctttggttgaccttcatgatcccctctttttcccatcttatgtatcgataacagagcctcagcttcggctggaagtagcgcctccaatgctgtatcgtcggcctctgcctcggctaccggagttgcctcgtcaggcgcatcgacttctgttcgaactttcaaatccatcggtgagtcaagtcgtatctgtcgtctttcttgaatatcctgtggaaacctatttgtcgaaaaacatcttctgacacttactaacttgtgggcttcctcctgaactctgtttgaatgggttcaaaaggtattgtgcttggcttgtccgccggagttgtcggaggcgcgctattgttgtaggcttatttacctctgaaggctccatcgtcttccacagttcctccgttcctttcttcttctcgtacacattctaaggcgcagtctttcggtttcgtccgttctgtgtcgtctacttcggatattcttgttttgtttcccttctggactgttcaatacagcttcgttagcttggttacctatttacataattgtctccctaacattatatcccaactattcggtttatgtcattttgcttcctaccttgtttagtattggtctttgtgctttcgctcttggtttccttttcaactggcattccctcagaaggatgtcaagtcatgcacagtattcaaacgacaacaacttcacatgcaagttgaaggatgagaacagcctggtatatcaatctgaatacactgtggttttgaaaaaagcagaggatggctcaaaacatgggtacgacggcattcagctttgctgcctctgatacgcaagtattcgttcgagatgatttttgtgattttgattttctggttttgcaatcaacatcgacctttggcttacaccatcatcaacctgtcaccaattccctcaggctcgtaaactcattgacccaattctacgcgtatagcctgtgggacaaacctttctgggcacgcatcttactatcccagttaataccgccggcacggatcgatcaaaccccgggaagtaaacgagagatacgcgtcgaaaattaccttttcttctgagcgagacgcgtctccctttctctagatttataaatcatagacaatcatgcctagagaaatcatcactctacaggttcgttctccttacgactattctttcagattcttacatggataggtgtctagtgaagagaggggtggtgcatgtcaacttatgtatgagaggctaatgcaaaggttggatgcgctttgggctcgtttctgatggggttgtgttccttgatcgggttaaggctggtcaatgcggtaaccaaagttagtcagatcgcctcttcctgtctgttgtgttctgcttaattatcttgactgactcggaactatctttactggctggtgtgatgctcatgtctatttggaatagttggaaacgaggtaagaggatgtttcatgggatccctcggagatttttctgaggtaatatatttgctgatcagatcatgtcttgggttatcatgctcgtggtaccttctcgtattgaatccagttttggcaacgtctatgcgcagaagtaagggtttcatcattccgttccacatgattgtctccttcagccactaatggaggaagagtacacatttggcctcatagcacggtatatcgaaggatggaatcctggaggatttcgctacagaaggtgtcgataggaaggatgtgtttttctatcaggcagatgatgaacattatattcctcgagcaattttgattgatctcgagcctcgagtcagtcctgtttctcttctccctaagttaggaagtatctgctgtatatgtgtgtatgctctgactcctttgaaaatgtacttcgggggatcacaggttatcaacacaatcaaatcatcaccattcgctgggctttacaatccggagaacatcttcatggacaaagaaggtggtggtgcgggcaataattgggcaatgggtcacggcagaggtgaacagaagtatgaagatttgtttgagatgatcgatagagaggcagatggtagtgattcattagaggtgaatgaaacccctcagttgttctgctcctcaacaaaaactgacctcactagtcaacccttgtttatttaaccaaacgtataagggcttttcattgttacactcgatagcaggcggtaccggatccggtcttggttccttcctgctcgaaagattgaacgaccggttcccaaagaaattaattcagacatactcggtttttcctgatcaagagtcctcagatgtcgtcgttcaaccatacaactctcttctgacaatgaaacggttgacgaaccatgcagactcagtagtagtcttagacaacgcggcgttgagacggatagcaaccgacaggttgaacgatgagaacatgtcgcatgatatgtctcaaatcaatcaacttgttcgtcttcttcgtttgcgtgtttttcaaaaaggtcaatgggctgatctgacaatatgttctctatttctatcggctggttgtaggtcgcaactgtcatgtccgcatcgacgatgacccttcgataccctggctatatgaataacgatcttgttggacttatcggctcactcgttcctacaccgcgttgtcatttcctaatgacatcctatacacctttcactaatgataatattgctaaggttcgttttcccttggactttcgcttgcttctcaggagattctgatcctctctctggtctctcctttttcgtttggcctgtgtttcttctcctcctacatcaatttgaaaatcctcattcaggcaaaaccgatacgaaagacgacggtactggatgtgatgctcagactattacaacccaagaaccgaatggtgtccactacgccgaccaggaccagttgttacatcgcctcactggcaatcatccaaggtgatgttgatccaacagatgtatgtctcttttgtccttacatatttctttcttccggtcgaatatctgatggcatttccttctgactgaccattaaaacacatccaggtgcataaatcccttttacgtatccgagaacgaaacctcgtcaacttcattccttggggaccagcttccattcaagtggctttgacgaaacgatcaccttatcttcagaccagtcatcgggtcagcggtctcatgttagggaaccacacatctatcgcctcggttcgttcttcgtgaccttgccactcttcttctaagcatcctctccctctttttggcgtgcctttaatcttgttctaatttatattttaacgtgcgggaaatagttgttccaacgaacattaacacaatacgataaactacgaaaaagagaagcatttatcgagcagtacagaaaagaagctatgttcagcgacggattggaagaatttgatgattctcggttcgtgctcttctttcttccatctttatctttttctttttctatttctttttttaccgcgaaccactaaatgctccgctaatcttgagcttgattctttcgtaatatttgatatcgggaaaaacagagcggtcgttcaagaccttcttgaggaatataaggaatgcgagaagtcgacatacgtcgattacggatcgatgacgacgagcgcttcgggactcggtggtggttccggcgagagtttaccacctagagggacgtctgggtctggttgatatcttcttccttcctcttcttgttggaaaatctaatcgatctttcatcaaggaaagagagaggtagttggtcatatatgttctagtctggtccggtccggttcgatttgattttctctcagggctctttcgatttattttacttcagttcaggtgatgtttgtggtccatgataccttcttctccttatcaagaaatataaacaacttagggagaagttcgtgtattatatcttcattcgtgaggtttcaaaccttaagagggaatttaagtaaggaaaaagaaggttcaccaatcacagatggaaacacaacacaattacaagcttcacgacatacatgacaatcagataatggatagtggacatcttccagaagttttccagggttcgccgccagaaagatatgaagggaacgacacaagaagacatattgaatacaaaggtaagttagagaaggctcaggatcttcctgtctgtgcttctgttcgacgagaattgtgaccaccggatgtaacggatctcgacccaaataccggaggtgctgatgatgccgtcgttgtatatgatggagtttcaaggaagacagctgatctaaggactctggcgattctgtcatctttggcgaactgtacccagtggaaacaaaccccgagtataaatgaggcagtcagacagacgggtacacaagaacttagagcaacgggaagcacagacgcaagaagggagcttactttaggcaatgagtctgtagccataccctcaaagactgacttctgagcttcctcgaaaagcgagatgatcttctgcaactgtcctgccacgcctactggcataaagcccggtgctggtgagggtgcgcgttgagaagactgtagcggttgtggttgattgtttcgaacaaacaaaaaatacgaggcaatatctttcttgatcgaagagggcacattgatctctgctttcgatcggggtgtcaaataggtggtgtatctacgtacaatatgctctattcggtcacttatttgctctgaacagataagaaacaaaaattaggaatgagacttacatctcaattgccagttccaagagcttttgttgatgcgctgccatttgctcggagatccttcccctggtcgacccatatcctgccacaactacggcccccattgtcccaccaacctctgctgagctcgtcatccgatacctctctttgaaatcctcaacgtcgcaccaaaaattcagattctcttcacagaagctgagtctcatgaactccctgaagagtcctctcaatgcaggctctttcagtattcgagaaagtttcgccgctcgagaatccttcagggtttgtgcgatggacactccatccctagtgcctggtctggaaaatggaatgtaccgagtcttggagccttctttgttaggttttggcagaacaggttgcggattaaggtttagattgggaggtggagcgatctgcccgatggacgcagtctcgtttactatgggtaacgttcccgagggaagtttgctcaaagaagcagtcgctagtttcttagtagacaccaaggccgcacgggtcgtcgtttcatgcatgggtttgattggattgcccagagggagtacggtctcggacgattcagtctggtgaaggggaggcaacgacgtcgtgacgttggtggccatgtgttgatgctctgatgatcgctctgaggagagtttgttcgctgtttggtcagactcggcggttgagatcaaagtagaagaaataacagattctttgaaataccctgggctgagcgagcttctcgccctttccgtcctccaggcgagtgtcgtccctgccgaagtgatcttgtatactgtcttttcggatgctcgaaattcttcgttgttcgacgctgtacgatatattccttcgggtgacatatttttcttgcgtgttgttattttatatggcctctccgtctttttgacatctctgcccttgacatcggtagtcacacagatgatccaaccgagtttgacccagagcgcagcaagctggccagcctcagcgtatccgatagagctcgtaaaatcgcaaagccagtcaagagcagagattgagttgaaacagtattcggttgaacttgtgccggctttattcttctggaggcttatcccaggcgtggaaaccagatcatccggattcaagctgtgaagatatgacgtttgggagaggtcactttgatgactcaaatcagaggaaaacgatcctcgacggttaatcttgcccggcatgtttgaaggtttattcagaaacgtgctggctctagaaggatattggtatggagtcctaggaatgagaaacgtcttgggtggttgaccgacaaatcgacgaaagacctcttcaatcatgggttggttttcagagacaatcatatcgtcatccgggtgtcgttcaagatatatgatcggctgaggacctgccgggtatgtcgagcatagcttcgtaaagtagggggtgtgtattccttggcgagcgatgaaccgctcgaggctgatgtgacagagatatgtccgttcagaaacgctgatgactgtgagagacaagtaagggactgaaagagaatatataccgacacgtctaatcccttgggtgatagaacccagaccgctcgttctctgaatctcgtcgagctgagatcagccgcattttccttgaggaaacaaaggtacaaactcagcaccaatcaaaaagcgcaaaggaggagagtgatccatacagaccatcaatctggcgtctaccatttgctgcaatactcctttagcagcgtcctttgtcatagagaacgtggtggtcgttgtcgtcgtctttatacgagggccgtgcttgccagggttcgaatcagcgagacgaatcgattgagagaacctgagggaggccacgttggtcagagcatcatcgctgtagtaaacagacagaagaaaaaaacaacctcatcactctgggaatgttcatgattataaagagagaaaacgtgtgacctacgaggtgaatgaatccggatagattttaaagaactgcctgtttgacttcagattcagtgagatgagcaacgtcgagaataaatcatgtataaactgatgtgaaaacgacatgttccacaaagaaggatgagtgccagtactcaatgatcacaatgggtatatgctaagggtcgagaagataagaagaactgtacttgcgtgagtaaaaagccttcctgaggatgtctgaggaagattagattccgaagttgtggcaggtgacgaagtgtgaggcatggcccttgttcaggaaggggatataagtttgaccgagatgccagcagatgggtggaagagagggagatggagtagaagaaggaatctatggcaagaaggacggggaaaagaaggtacagaaggttgtaaaggagaagggatccgtgcgtcctatctgatgagcagccagtcagtggaatcacagtaggaacccagagagtttctctacagcaagggtcatcagcaacatggtagacgagcggcaggatatgatcgctaacatctagtcagtgttgttcagagtgagccactctagaaatcaaggatgacagaaagaaagagagatgatgagcttcgttccatcgtcgtttcacaagagatggagttcttgtgttttatctcttacttccactaattatctttaccatctcactcatttcctctcttgtttcttatcaaccaccacgactctatacacgccacttctagatgacagactctataaggttactagtcatcaatcccaattcttcggactccgtaacttctgctcttcggacatcttttgatcaatcctcaccgcctggagtgacactctcgttctggaaccctcggtcaggaccggctggaattagtgatgagtgagttatatctctgtttttcagtatagtcaagtgctacaacatcagctctgttctctttgccttctgagacaatactctattcgtatcacttcttcttacctgtttccttcctatttgatagacaaacggccagggagagtacagacgcgtgctgggatgaattgatcggagaggacgatcgggtattgggcaaaggcctagaaggatatgatggatttctcatcgcttgttgtaagttctctctatctttcttcctatttctccggtgcccatttgtgtatatccaatcgaatactgatgcacatactggcgctttcgctttgcttgatgagaacagtctctgagcatccgttgatatctgctcttcaggctcatttgacaagacattcgtctcgcgctaaagttctcggcatgtttcacgctgctatcacccacgctctcctgcttggctcaaagttcgggattatcacatctggaaccggttgggaacccgctctgacgaaaggagtcgccagttttctcggttccccaaactctgatcgtttcgtcggtgttcattctacaggtgtcggcgtggttgaactcagggaaggtgacagacagatggtcaagcaggtgatggaatgtggctccaaagacttgctggtgaaaggggcaggcgtgatcgtgctcggttgtgcggcgatgagcgggatggaaagctggatcaagcaagcagcagacggggtggcagtagtcgatggcgcaagggccggagtggagctcttggttggattggcgagagctggaaactagaacactaaaaagacagtcatatcaggaaaaacgccactcagatatagatgtatcgagggtttcgtatatatatgcacgtatcgaaaacagcgggtcaaaagaaactaatttgatcgagagcggatgtgatagtgattcactcatggtgagtatagcaaaataaaaacaggtcattcttatttctttccagacgacctaagataaaatcaagaagccaatttattcagctggtcagaccttgttgccctagattagatgaatcaacgaaagagctcacttcttgatacctcctccgagagcacctcccttggccactgttgatagtcaagaggattcagcgaaacttcatacgtgtgatcgtcgaaagtgagattcgaaacactcactcttgtctcgagcagccttcatctcggcagcctcattctttcgcctctccaaggcagccatatcatcctgtaggtccgaaaatgatatatattgttgtatcaacagatgtaaccataccgaaaggaaggaatagagcatcaggaacgatgcttacatcgtcgagctccttggtggccttcttggcagccctgtggtggaagtaatttgtcaaggtcagccaaggaccatgaaaagaatggaaatggtttacaagacatacttgagcggcttgagttttcctcctatagatgagcggagataagatcgatttggataagatataaggcttaattcagcatagaaagagacccatgctgctttactcaccttgacgtccagacattgatgttattagagaaaggtagtatgtgtgttgggcagggctgacggtaaggatagaggaaggtaagagagggaggtaggtgcagaaggatttacaccttaggtggtttcgaatataatttcatataacacttatgtaaggtgatgacatatttccagcgggttctctcttttttttctcttctttcttctcccatcggacgaccaccaccaacgacaacgatagcatcgatcggtaagccttcttctcagtctgctcaagcgttgtggacacccagctcttctctgggtggttgatccgtcgaattctcttctgcgtgctcaatcttgtcttttcatcttttctgccctcaccctcgatcgctcatctacatagaatcttctcgaactccctcaccaacatcgtcactcgttttttaacttaaatcttacatattcaaacatcatgtctgactgggactctcacgttgtgtatgtgttcctcttactcttctctttcccttggtttgggagttcggtttgttgaaggacggcatactgatcctttttcaatcgtttctctcgctccactctttcctcacatcacaaaagtattggatcgaagggtcgacgaccggcggttgccaagactgagtctgccgttaatgccgctcgacgatcgggtgttgctgtcgatacttcttccaagggagtcagcaacaaggctgccagaggtcagtcggcttttaccttctctttactccctcatcttcttcactcggccgtgagctccaattggaggccacgactgattgcatgtttctgtcttcttttatctttgatcatatgattgatcgatatgctatctgatctgatcaacaggacctgaccaccaaaagatcgccgctcttgaccgagatgacgaggccaagcctccggctaccgtgaatccttcgtgagtgatctgccggattcaaattcgctttccaacgactgtacgctaatctttggtggttggttactctgcagcgtgggatccgccatgtcgaaagcccgaatggccgttaagagcgcggacggaaagtcgatgacccagaaggatcttgccactaaggtcaacgagaagcccagtgtgatccaggattacgagaacggaaaggccagtaagtgcctaaagcttcctctttgtgttgttggattacatatagtcctgtttgttctttgatttgtggaccaagggcttacaattcatccaccaacctctcgttttgcaacctagttcccaacccggctcttcttgccaagttggagcgggcgctcggtgtcaagttacgtggagatccgtccttgattggaactcctctcaacaagcctggatcgaaaaaataagcgaaacccgtagaaaagaagaaagggaggagaagaaaagacaacaagatcaaagtggtgaagtgattgctggaatcatgcttaggtagatgcacctgtaactttttttttcctctcttcccttttgattttgtttcctcatgaaggaacacatcatgtatcaatgtcctacgtctcgaatacttccccctgtcattggatgacaacgcagttgtaaaaaaacacattgatgaaacagaatacaagtgcggtgcataaccctaacagacgctgttcattcgccccagcaaacatctcaatttctttcctctattctctcttacaacacccatcgctcctttctttcttagttcaggaaggccgattagtcaataattctactctgatgcagagaggatattcctcccgatcagatactcaccctcccagctcttcgacacacccggacctaacgttctccacagactaccaggatactgaggatctagggttaccgctccatcataaccctccttcacatcatcatcatcaacaacatttcaatcagccactcttgaacagctctcacatggatatcaatccagtaggaggaaacccagcttccaggcgaagagggaaactcggagcaggagcagatccagcagaagagatcgataatcgaggctcaggtggaggtatagagatgagacagtttggagttgacggtggaaggcaaggaggtagtaatcagcttgaaagggataggcccggaaaagaaagaagagtcagaccagcgttcaagccgcctgccaagaactgggttcgtttctctcttctttttgtttgactctaagagacatgtgtgtcgccacgacggagatgtctgtgttcactcgccatcctcctcacggctctagtcgtcaatctctcgtccatgaagagaaagaagagctgactagactgattgttttcgtatgcgctctctatcctcattgtaatctctgatcatgtagaaggaattcatcgaaaacaactcagaacacctcatcccgctaggttatctgatcctttcaatgatcactaggtactggaagatcggaaagagcaactctgtcgtttgggacgaggttagttcttcaatacattttccctcgccgatgacggcaataccaatgatgagaagatcacacgggtactaaaagatttggaatcttcgttcatggtcttttcataggcccactttggtttgtccgacctccttccttgtatcaggagtatattcattgaagtgacgcacgaagacaaggaaatactgactagcactttgttgcttcctctcaatgctcatcaggaaagttcggatcgcattacctcagaggagaattttactttgagtacgttgccttttgttacaaacatccgagattgaatttctttcaaagctgagattcctttccccgtctcctttcctctctagtgttcatccgcccttaggaaagatgcttgtcggcctggccggtctattttctggctatgatggaagcttcgactttaaatcaggggaggtctaccctcctactctgcactatactatctggcggatgtacatggccacctatggtgtgctcatggttcctgtcggatggtacaccgccagagggcttggttggagtcggttcgcctgtcatttagtcacactcatggttctcctcggttggtcgattttaaacatttcttatagggggtgacaatcagattcgttaacagtcatccactttctatttttatccttaacgatgagcgatgtagatgtggggtggcttacgatctctaggttcatcctgctagactccatgctccttctttttacgttcactactgtccttggactcgttaacttccataaccaacaacaagagtatgtctgcccttggcatagaggggtttgagttgaagggaatacgcaagcgcgcgcctattgctgattcctgacctggttttggaaaattggtgcatgccagctcgttctcggatgattggtggctttggcttgtgtttaccggtctttctattggttgtgtcattaggtcggtctctttgctgttgcgtgtcaagagctcgttgcaatccgaaaactaaccttttcgtcttgtcgccattttggaatatctcagtgtcaaatgggtcgggttgtttgtgaccgctcttgtcggactctacactatcgaggatctttgggacaagtttggcgacctttccatgccctttgtacgttctctgtatctttctgctttctactttctgttctgattgtatttctggcaggcaagtctgattgatttgaaattgaattaaatacaaaacaaaacccctttctttagaggacttacgtccgacattggatagctcgaatcgtaggcttcatcataattcccgtgtcggtgtatctactcagcttcaagcttcatttcttgatcttgagaaataccggaccaggtgattcccagatgagctcgttgttccaagctaacttgaacggaaacgatttcattcaaaacccgctcggtgagtttacctcttcttcctcactctctattgtgttttggttctttaacactcgatgagaacttcttctttaaaaacagaggcggcgtttggttcgaaggttacactaaagaacgtcggttatggaggcggtctccttcattcccatattcagacataccctgtcggttccttccaacagcaagtcacgtgttatcattacaaggatgataacaatcaatgggtcatcacccccacttgggaagccgatcctatcggatctgaagacgatatcaaattcctccaagatggagatatagttcggcttgtacatgctgcaaccggtcgaaaccttcactctcacccagtagtcgccccggtgacgaagaccaacaatgaagtttcctgctatgggaatgctactatcggtgacgcgaatgactattgggtgatcgaggtcgtggacgatactgttcgtgggaagaaggatgaggttaagaaaagaattcatagtttgaccacgaggatgaggatcagacatctcaattcgggttgttatatcagagcggcgaacggtgtgttgcctcagtgggggttcaagcagattgaggtctcgtgcgataaggacaacaacccaaaagatcctcatacgtattggaacatcgagagtcactggaacgaacgacgtaggtctttcccgtcacctttctcctgctatttgatctgactgctttcttctcccctcaccgtttctgatctggtctattatttctccagtccctaaaggagacgccaagctctacaaatctccgttcttttccgatttctggcatctgaacgtagcgatgatgacctcgaataacgcgctcgtcccagatccagacaaggaggatattctcgcttcgaatccgtttgattggccatggctctacttgggtctcaggatgtgtggttggtcggctgaacaatcgaagtattacttgatcggaaaccctgtcgtttggtggtcgggaagtttcagtttggttctttccgttgtcgtcgtggggctctacctttttagaggacagcggaagtacaacgattttggaattggtaagtgattaatcatacccatcatttacatgtaagaaatcgaggaagcagaaaaggctgatcttcttttggctctgctccttccctcttaggtgaatgggatcgatttatctttgggatcaagctatctttcggaggctgggcccttcacttccttccattcctaatcatgggacgagtcacctatctacaccattaccttcctcctctatggttttccgtcctcatggtcggacacttgaccgatcacttcatattttcgaacaggagattaactctccgggcgaaagccatctttttcggactgtttgcaggagcggtgattctagtcttttggtggttcaaaggagtcagtttcgggatcgatgggctggtggaggaccattggggactcaagtggaggaagagctggaatgtaggtcttttcttctttctttcagcatcttttattcttcttctttccatgttctagggaccatgaactaaatgtgaatcttggtttccattatcttttgtgggaacgatcagatctacaactaagggtagagtacaagccagaaaaaaacgagaaattgaagaacggaaccgacgatcaatggccgttttttccctcccgtcttttcatcgctcaatttcgccagccaataagacgatccctcgagactgactccataagatgacaagcaaacgattgagaacatttcttttctcatatttacgttataaagaatacatagagccgagactgaactttagatgaaagtgaaaatgagagcagagcggagaaaactgggctcgagatgaaaaggacgagaagaggtaaacgaaacgtggggagaaaaacgagacgtaaagaaggctccgttatggttggagatatggtagtcgcaagaaaacacagacaagagagaaagaagacatgaaagaaacccccctatgcgaccttcgagacaaaactaaactatataagatcgaaacactttcatttcacttttttagagcgtgatagaatcttgtttggccgattcgggcatgtaaatatccaaaagcgggtacttgtccttccattgtccatgaagatcgccaaagacttcgtagagaacctctcggacgtggttgacatagatgatctcgatgccttgcttgacagaggcatggacgttggcctcaatgtcacctcggcaagcggcgggaacgataagctctgaaaattgacaatacaaaatgactattaacacgacaagacgaaatgaagcggaagaaggaaaaaatacgaactcttgatattcgctcggtgggcggcaaggatcttctccttgagtcctccaactggcaaaacttggccaccaagagtgatttctccagtcatagctgtattggccaacccaaatttgaacacaaagttagttgggttgtatttatcggccaacatcaaattgacaatgagtaaagaagaactgaccaatgtctgggtcaactctagtcttcgtcatcaaactgacaagcgcggtcaggatggccgtaccggcactcggtccatccttaccaatcgcaccctcaggcatatgcagatggatatcctgatcggaatttcctccgagaataatatccgtctctttgctaacaataccgagattgaaagcgttcgctcgaagataggatacagcgatcttgacagactcgttgatgacctctccaagcttacccgtcgtctggacagcgcccttaccaggcatgacctttttggtaggaacaatcgaatggaccatgattaacaaacgatagtagcgtttgaagagaaagaacgtaactcacggtaacctcgatgggcatcaacgcgcccgctccatttccagtgtaacccaaaccgttgctaactcccggcggcggtgccgtcgagtatattctatccttttggtacaccggaggtcccacataatccttcaggttgtcgcctgttatgcgcatcgacaccgtggtggggatggagagcggtttgacctgttgggtcgtcgtggtaccagtaggaagagtttcgctcggagtcttcaactccgaggatgaagaggttactttttcggcttcggcttcgagagtcgcggacgaaacagtgggttcaggcacagtgccttgagctggtggagtagtagcagaggtagcggcctcgacttcgacctcggtcttggcaggctcagattcgtcaatatcctggacgatcttaaatgcggccttccggtagatctattccacccaaacggttgatccaagcggggttgatgagaatgtgtcttcaccttgtgttatgtatcgagaatgaagagacgtaccttctcaatctgcttcttcaggtttcggacaccactctcccggcagtagtactgaatcagtccgtcgaccgctccgtcctcaatcgttacatcggccgtctctagtccagaagccttcttggcttgaggcatcaagtagttccttgcgatctctttcttctcgtctgagacgtaaccagaaacctcaaggacctccattcgatccaacaacggagcaggaatcgtgttaagcatgttggctgtgcatacgaataaaaccttggaaagatcgataggaaggtccatacttcaagatatgaaagagaaaatatgattaacgacaagatcaatcgtacgttgaagagaaaggattagacggccaagaccaaacttactagtgatcggtgaagtttccgttttgctcaggatccaacatttctaataaggcagaactagggtcgccgccatatgaaccattagcggagcctccaccagagatcttgtcgatctcatcgatcaaaatgagagggttttctgcctgggtctgcttcaatgcttgaaccgctttaccgggcatggcgctataggagaacaagctagttaagaagctgttgaagttcacaaggaaaagagagcaaggagaaacttacgcgacgtaggttcgtcgatgccccttgatttcggccacatcacgaaggcctccaaccgaaacacggtagaacttcctctctaaagctctagcaatcgactatgaagggcgtgcgaagaacgaccgtgagcttatgattttcaacacctattgtgaacctcaagaggacgaaccttggcgatacttgtttttccaactcctggaggcccaaccaaacacaagattttaccctcaactgttccccgaagctttccaactgcaaggaactcgagaattcgatccttgacatcttttaaaccatagtgatcttcgttgaggatccgaagggactgaggaaggttgaaagaatcaaccgttcgctttccgaatggaagggaggtaatccactccaagtatgttcggacgacactgaaaatttggaacagatatcagtacaagtgaggaagaaaagagtggtgcaagacaagggtatggaaggaggacgaacttgaactcgctcgagttgggctcgatcatggagagcttgctcaactcactatcaaagacttgtttgacctgctcaggcataaccaatccctcggccgcctgtttaaacttctccaccaagttatccttgacatcgccctttccatcagcctggccaagctccttcttgattgccctcatctgctccatgagaataacttccttctgcctctcatccagcctagacttcatctcgccagcaatcttggctcgcatgtcatgcctcatgacttcgtttcttaaaatcctggtcaccaactttgatcgttcttctagggaaacacaatcaagaagctcctgtatctcaacaggggtggtgttgggcgaggttccagccatgagatcgcatcgttctccgagaggtagggtcaagatagcgctgtactcgggcaagaccgacgagagcgcctgccggtagccgggggaccgctcacaaagttcggtaaatgtcgcatttagttcgagatcaagttgagtaaggtccgagtaagcgatcgtgttctttgcgggagcagggctgtcagcaacatgagtaatctgtgcgatcgaaacgggatgcgcagagaggacttcaataggggtctttgtaggaagagctgtgtaaagatcaagtagaggcataatcagctatgtctgggtagcccataacctaatgtaaacggcacaagtgatacgaaccatcctcgggttcggactcaaagcttgtcacctcgtcagagctcctgcctgtgatatcccaaggcataagtcaagaaaacttaaatatcagacgcgttccctatcggcgtgctcgagagtggacaggaaaggcaaaccttcgctcttcttggtgactggctgagtatcgtcttcgctcttttcgaaactagtcacaccagcctccggcccctcattcgcctcggctatcacggtttcattttcaactacccccgtcgcgttttcctcgacagtaacagagtcgattgtaatcctgctcagtggctgaagacgcatctgccaagcctcctccacatcaggatctgtctgaccggcaggagcggatatgggctgaaattcatcgatgtggcaatagagaccagtggtgtggacttcggatttgtcgtgaatgatatcggtattctcacccttgagactattgaatcggattagaggagccgataatttagtcagcaaggatagtaaattgaatgataacatatagtcgtgtgcatacctataaactccaacgtagtcgattttctcagagatcaggtgtctcaccgctttaatgacagcagggttggtaacagtgaagactatgtcgataaattcaagaaggaagaaggggattgttggttgagctgaagattaaaagaaagagaggatagataatcgagacgtacatttcttccaaggtgggaggaagctcgtcgtcacagggatgactaagacttggtcgtacttgggaacaggtgttttgatgaccttgatcttactagaccttccacccttattgcctctcgattttggcttgatttctgctgtggcaggaggagaattagacgagggaggggcggctgctgctgccggtggaggggaggtactgtccgacgaaggcgacgcaccgggaggaaccgacgatgaggtcgaggtcgatgatcccgatccggtggcggtggaaatggaagaagatggagacgtggtcgatgtcgatgtcgatgtcgattgggaagagaagaagtcttcaggaagaccgtccggcttttgtgatgttttactagtcaacgtggaagtggcggctgaggaagggtcggcagcagcgggatcggtctttgaggcagcagcagaggccttgctatcagcttccagagccttctggtccttaacatcagcagcaggtgtatccccctcgccttccaaatcagcgtcctcatcttccttgctcacagggttctcccagcttcgtctgctagagaggttcgtccaggtggaagaaaaggatcggacgtttgatggaatggatgccgtcacgatggaagcgacaggtggaggtctgagtgagttaagggaaagtattcgaggtgccaaagaagacagagtccttgtgacagccctctggtgagcgtgtgccaaccttgaggaggatcgagacagcatgcgagtttcgatggagatgacgaaagagaaacgagatgaaatgaatataggtaacagaaggatgggaatcgacgttaagaggttgaagtgcacagaaaaaagacgcgatgggggaggaacaaatcagaagagggtgacagattatgtaatctgtatatttgatatgcatatatgagtttatcagataagcaaaagttacataagtgtcactcagtcatccatgcccaaacacgagaagaactgctcatagttccatttttgttttctatcaaaagaatagaggaaccatctagagttgatcgcaacaatgagcgtgccggggacgagatctgaaggttgtagagagtggaggatgggaagaggagggcggagtggtattacagacggagaaacaggcacatgccgtataaaaggatggaaagaaccaaatggaaatagcacacggggccaagaagaaaacgactaagaggagaaacagaaaaaggaataaaaagaccaaagagaagtagataaagatcgattcatgatttctactcgtcgtcctcctcatcatccatctcctcggtcgacttcttctcgactaccttgggttgcttgaccacgagtgccggtttgggtgcgttcgcagcggtcaagggaccggccttgaaaccctggtcctcacaccagaatccggaaagagtcacctggaacgttctgtgatccggttttcacgcgcgaggaagatatttacaagtggacagcatgcatccgttagttaaatgcatcggagttttgatgatagtgtgcagatatgccaaacagaacttacgccatcatctctccgcagagcttcaagagctgggcctgctcggccgtcagtactttacccttcttgcagattacatggggagccgtcaatgagggaacacctttaacaagagaagtggcgagtccgagcttccgaagctgggggtccattgagtgggggaagggcgacgtcgggtcgttgtacatgagaagaggacctgtaacgtatacaagagaactcagtacagaggaaaccggagttggcataggcagaaactgataacgaaccaacgggaagggtaacatccctggcagcaacgttaccggctcgagcgaaatcgggcttctggaaagactcgaagtactcgagcgtctcctttggagggtggttggtgaagaacaaaccagtgggcccgttaagttgctatttgagacatcgaggggagagtcgagtgagcctgaggatatttggaaaagaacagaaaaataaagaacgaacagccgacactttcgacaatccctccttgtactcgtcttcaggagtagttcccagagccttgcccataaccttgttccttccaaagaagagtcggccggttctagatatagttcaaagtcataactatcattagacggtcgaagaacacactgtgctaccatcactgagactatgacttaccctctccaagcagctcgaacctctttcaagtgcgagtttctcatgtctccgacgttgaacaaccaacagtaggtccactcatccgcgctttctctaacctgtaggttcccaccaagatacatgcccaccaaggaacaatcccaacacgacacgcaagattacacaccggacatccgaacacgagcaggttgttggaagagcatatagatgacgttgtagagatcgagaacaaggcatataagtaaggtcagacaatcacgcaggactgtaagtaaaaggtttgactctctgtgtcttgttcagaagaaatatcatgcgaaaagagaaaagagggacgaacggcttcaatcagaccagacttgtgctgcttagtcttcttatcggtcttggtcaaagagacgaccttctctctcttggacttaggcatgatagataagagtgtttgtgtgggttgggaagaacgagggtatgaggtgcaagtggtcgagactacgggtggatgagggatcaagagaaatattgaagggagggagcggaagaggtcaaaaatctgtgaaacgtgacttgtaacttatggaaagggctgtgtatatattttaattttatttcctctcacgaaatttgagaataatctgattatcccctttcgttgctcgattcatccagattttctcaccctctcacctacccacttttagttctctatacaacaatggatctcacccaggctcagatcgatgcgctcgagcacactttgctcgatcagactggtgctagcccgttgcacaatagattccgagctctttttaccatcaaggccgtcggaggaaagaccgcaattgatatcatctccaagggtctgttcgactttttgtcttcctttctattcttcgcttgttccgtttatcccggatcgagttcgattttctcttgttcttcctcacctgactcagataattgctcctgttcttaaaatctcggcaggtttcgccgatccttctgctttgctcaagcatgagttcgcgtacgttctcggacagctcaagtctgtcgaagccatccctaccctctctgcggttctccgagatttgaaggaagatcccatggtccgacacgaggtttgttttcttcctagactcttttttttctctttttctttgtccatctcaaacatgtcttgacgtccgtcgttccttttacgcataggctgctgaggcactcggtgctatctcatccttggaatcgctccctttgctgagagagtacctcaatgatgagcatgtcgaggtcagggagacctgcgagattgcgatcgaaaagatcgaatgggataactctgaagccggtgagaaagaggctcggaaggtgctagattctggaggagtgttagttaattttctctcgatcactctaccgcacatacacgctaacatattttcttggcattgtctccgcgtagcccttactcctcgatcgatcctgctcctggtcactacaccccatcaccgatggctgacccgtcgaaaggcccgcagatgaacctctcaatcccagagctccgagcaactctattggatgcgtcactccccctgttcactcgataccgggctatgttctcgcttcgaaacttgccaccaagccaagcctcggtcgaggctctcgtcgatggatttggagactctagcgcgttgttcagacacgagatcgcgtatgtatttggtcagcttagcagcaaatggagtgtgaagggcttagtagatcgattaagggacgacggagagtgcgagatggtgaggcacgagtgtgccgaagcgcttggtggtattgctagtgaaggagaaggtcagtgttcatttcgattattctcctttgttgttgccagacacatcacatcatgcttacccgtttaatttgctttccttgggatccatgacgaaaatgaacatatacagacgatagcgttcttcctctcctccgggaactctcaacagatatgtctctcccttcggtcgttcgtgaatcctgcatggtcgccgtcgacatgtacgaggtccgtgtccctcttctttttcaaagccccatccagtctattggcttgtgctgacctatatctttcttcgttccatcaccctcacttctggtatatcgtgcacaccaactctataaacaatacatagtatgagacctcgaatcagttccagccattggacgaactttcctctggcaccgttgttgatcaggacgctttccagaagacgatgggtggtggaaccgggtttgagcgatcggtcgggactgtcgctcattgattgcactctttgcgattcatactccatcctgtctattgaggattctctattttctctttccttctggccttagcttcttttcttcaaccttaaaaaacgaacagagactgagatatcctctctctttcttcaacgtgttctcttataacctctcctctatatgtttttctcctgatccacgatccacctcttcagtctctttgcactttgtttaaaccccttgctcctctgcttccattctctcatcgttgttgtataagaagcgagagaagggaaacgaagaaagagccttcactacaaaatctttacctctgcctcctctttttctctctttacttgctcttatcctctacccttctttcttcctattctctttctgtcattattctctcaatctctactccgctctgctttgttctctctctatatcttatctctctagaagaaaagcatcccgatagaattccatctcaaatacggacagctcctacacacgcatgaacaaagaacgagttcacagaaagaagtaaacaagcgagacggtgcctaatggaaaaaatatcaacagccaggacgtcccgagatgatgaacaatccatcggctttccgtctaaattgattgccttcaaccaatagtaagctcactcccttgcttctatcgcgcgctttgaagatatgtctgtcgagtcacctacatgaacgtggatcgaaacaaagacagtagaagatatgtttagagtatgaaagaaatcaggattatccagattatccgaactatataccggactcaacgtaagctaaggaggaagaaacagggcaggctaacgcgaaaagatcagtgtagagcagatcatgagtatttaacatataaagaaaggatagcaaaagaaaaaggaagaagaagaaagaagaggttggaataagaagaaaggatgcctgcaggagaaggagcatcgatggaatgcgtttgagaatgaaggaatctctcttcaaccgatgtaatctaccgccgacctcttgcgttctcttcatccagtccgtcaacagcacccaactctgagccaccagtagagttctgcctgcctggacgtcgctcattgtccggagtcaggccgcggcctggtctgatgttcgatctgggcgctctgaacagaggttcggcacgattttggataggccattcgtactgatcaattccgggacctgagacgttccaattttgttgagaatgaggatgctgtgatagtagttgttggtactgatgttgctgagaatgggggggatattgttgaacacgagggggaacctgttccgaatggaagcccatcatggaggggtgcatatgaccacgccgcgaggctagctcttgggcccgagaactacccggttccggctcaagatgttgttccaccagcgactcactctgaaacgcctgtgtttgtatttggtgttgatactgagagtaagaattggaatgcaagtgtccgtggttggcagcgtttgacgagtggtttgagaaggagaaatttgtatagagagcatggtcgactggaaagttcgaaggatgagaaggataccgatatggactttgagactctagaggacgttgcataagatagccaactggctggttctgattttgaacctgactttggccttgaccgtgagacgagttattacttgattgatgtcgggaagaaaaactcgtgggaggttgagattgggagatctgcgtcgtcggatatggtaaacaagcagtatgggtacctgagtaggatgaagatggcattgatggagtcggagtcggagtcgaagtttcagtcctagaggatagatgaaagtgtgtagaatttcttgttggcaatgatgttgctgttgctggtgtttctgcttctgtttctatctctgccatggataggagtggctcaacgctagatccatcatacatgttgaagttcgtttgagacagatttccgccaagaagattgacgtattggttccatgaatctggaaaacccctggaagagctcctgattggcccacctgctgcaggggaaacattgagtgaagaattccagtcaaaggccgatagtacaagttccctgatggaaggaaggtgcgacctagatggctgaattgattctaaggacgaagagggcatcagagcagaaagagggtgtgtaaatggtaatgatgggtcgtctttgtcgaaccaagaaaacatcaagtgagtgaagaatggcatgaagccgatacacacgtatcataccgaacgaatccttctgaacttacctgcaccaaattcgacagggtcgattcctatatccttactcgctctatcaaatgatcctacagcttctccggtgctgccaatatgaggatccctctctctaccgagagcgccattgttcggaccccgttctgtatcaatcacgctttcttccaataccgaccaagagacggcagaagaggatttgtggattgatcggaccttggcggtcgaaccattggggggactttccgccaggcgtttccgtcctctacctttccccggtcctgacttttggcttgtattggactcaagttccggttctttctctgcctccttcgcctttgcctttcctgccttggtggctgtctgcttggttcctctcgtgcctgttccgttggtacccctggatactgctccgtcttcctccctaattagttcatctagcccagtggtcaccgcggtagctgagtttcgagcgacgcctgctcttagtttcaacttcatcccctggctggcaaagtaccgtgtgaggtccgtcgaaggcatcattccagggtatttctattgataggaaagtcgtagaacatatgatagcatgcatctctaagtaagactatggcttggtaggtaaaacagttggtgcagatcaggaagatagacgcacttttggagaaaacacctcaaacggatctgtgaccgtgcttgagaccttgtgtacgctcgtcctttggatcacatttattagagatttgttagtctatgcaaagagattcactgtaaattgaagcgtgtcttttcagggactcacccgtttttttcgtaaaggatgaaccgcaaacgaaattttccaggtacgcgaatggagagcttcgaaaatacgcagaaacttccctctgagaaacaaagcgcgcaaacgtcaaaaaaagggaacaaatgacggatcttctgtttcatagcaagagaccggatccataaagatccagagtacttacggccaccattgatatcgcagagcatttcagtcgacataacccagtcgcctgccgttgcatttgcgccggtggccgtcttgacgaccgggtacggatcggtcggtcttatttgttccgcttgagaggtagtctgaaagagagagattggggtgagaatgggcacaggggtagtaggagtaagcatcggagacgtgagattggtactatagacataattgggcgtaggaaattgagttggcccattcgagaattgatcgacatcgatccgatcaatctcgctaatggcaggggtgagagcagtaaaaggagcgtcggtggtaggaggaacagtagcacgcactgaggtgagtggtcgtgtgcgtgatgcagaaacggatggtgatcgaagagcgggattaggaggattgaatctggatgtggctgaagacgattgcgcagaaacaagggtggcagtgacgaaaaagttgttggatgctctgaattcagccgtttctttttcgaacgactgcacctcaacgatgatcggaggatcgatcggtcggcggctagggtgttataaatatattcgggaaagaagaggggaggagctgattagcttagacttcggatgcaatacatgaattgaagacgatagacttactcggcttatgagttttccaacggatgttatatacagatacgcaaagacaaatacatagaatccagaagtaaacatcagcgaacaccgatgtacgaggcctatgtatttgagtagaagagaaggatggaaaactcacaggtttcgttcgcttccttgaatgaactgagtcgagcacgaacgggctgctgcaggacagaaagcttgtaggatctgtcgatcggaaagtgttgaccaaaccgagtcaatgtatgaagagacttggtgagcgagaaagacgggatgtggagagaccaagatgtgcacgacgaacctttgctggttaggaagttcatccctcttgaagcgttgtatccaatgcttctcagtgttccctgaggtaagcttcttgccagtcgacgctggatttagccttctcgtcaagtgtggaatgagctttacttgagcctgagtagatagatgagtgatggaagcagatgtggactggtcggactgtcggttattgtcgcgactggtacctgaggccatggctgtggataggcgaagaaaaatgttgcaaggatcagagtaaaacagaagtatatggtgcaactttttttttgtctatcaaaagagacgacgacaacgacgagggaatgagaagaagagggaggggggaagaaaacgaaatctggattgtcaagaatggaccatatgctagtgctctgggtatggatgacggagactataggaaacctcagcctagatgtaccgaaggaggcgagcgtttcatctcgattgaaaaagctaaaagtcttaagagaacagtctcttctcgaagggcaagctcgtgtgtgatcttccccgctttctgttcaggttagggttgctctagtccgaattcagatcttttcttggtgttccaaaagagcatccgatttcgtctgtcctttcattgggatcaatctagttctggcagttgcctagggatcggaagctattctaatagggctgatctagaaagaatttctccgaaggcgcgcagtggaatttccgatctctctttgacgatcgacagcgcagctttcttatattcagcaggattcatcgacatgaactatgtgatagagggaaaaaaagaaataatcgaaataatcgaaagactcacgtaagataacaaacttcgtcagcgcatagcgcattatgccctgctggcggacaacccaccacaacgtttaatttcaatttgttaatgtctgtttttataaaacgatatgatacaagatatgacaaacaaatagacccaaaaaaaacacacacgcaaaaccaaaaaataaaacaaaaacaaagaacatgaaaaggatgatgcgcagtaaaatcgaccgattagtaagcctcgggctagtgatgctgtgctgcgcctcccctcaagttgccctgttctcaaaagtaaagaagtaaaaagaacaacaacaaccaccggaatgtccagagaggcaggaagcccgagaacaatcacctaccaaggagactatacaagaaacaagaaacaacgatcagaacctgggctaatcttcttcttcttttttctcttgtatcctagtaactttctgcgcacagctcaacagggcctgaaatgttgtttcttgactgacccaggcctttccattatttcattttaatctatgtttcctgttactgaccactaaatttacaaagctgaccctctgaccactctactcactatgtcgcgtatgattttcttgttgactttccttcaactttgttttattttgttttccttcttccttctccttttcctctttcttcttctcaatccatctcccttgaccacctcatcctatcttcacctgtgttcttttttatttctctattctccttgttctttgggtcctcagacctgtccagtcgtttccggtgtcaccattctctttcgcgctttcctttcagcaaccaactctttctcctcacatccaaccagccactttgtaccggacaaagtcatctcacattcacttgatatctcacactccttcaaactcctcttgtctgcgtcatcttcttctcctcctccccttcttcctaactctctaatcacgcgtcccccaagatgtttcacgtaaacatccctcgactacactcgtcgcgcgcacgaccgattacctatcttgttctcctctgtctttgggcatgtttgttcccctcggcttgtgtcaacgctgccaccaaagagcaatggaaaggtcgatccatctatcagtaagcagagtatcgtccgattggagaaatcacgcgagcagagaaataagtcagctctccttccacccctcctttcgctcactactacaaatactccaccttcattcaatcgttagggtcattaccgatcgttatgctcttccgacagagaccgctccggctctgacgactccgttacctacggtgtgtgatccacaggatcagacatggtgtggtggaaactggcgaacgatcattgagaacttggattacattcagtctatggggtttaccgcgatttggatctctcctgttcacaaaaacattgatacctctaccccgtacaaatacgcgtaccatggtccgtttttttgttgatttaaatctctcaccccctcctagtcccacgggacgtgctgttttattcttctctagagtcagccgtttgttctgatgtcatattgactctcaaccttcaggctactgggtaaccgaccaacgagctcttaacccccgtttcggagacgaagacgaccttcacgcactcgtccaggccgttcacgacagagggatgtatatcatggtcgacattgtcattcaaaacgttcccctcgtcgcgaacccgacccatctggatgtaacgacgagcatgatgcaagcgaacggatactggtttactgaaccggcggaatgtaagtcacaaagatttatgttgatcgatcagtcaaaaacgtcctggagatcagaagctcacagttggtcatgggatatacttgatggtaaaaatcgagtttagatcacccgtactgcgctatggactactcgaatgatgccagtgccgaaatctgctggcttggagatactgagctggcgttgatggatattaacaccgaaaaacaaatgtcatccagtcgttcgacgcttggattggccaatttgtctcaaactactcaattgatggattgcgaatcgatgctgccaaggttcgtgcctcttttaaattgaatcttttacatgaacgcgtccaattcttagtcaccataagctgatgagatatcgattgtctgtcatggcgagtagcacgtcagagagaccttctggcccggattttgtcaggccggtggagttttctgtatcggtgaagtctttgctaacgatatgaagtgtgtatctcttccatatccactgtcgtttgatctgaggcggatccatgaacttcactgacgctgtattcattgtcgtgtatcgtctttgttatcacggttgtctttctattgagataggacgataaaacgatatgctgataacatggactctgtaatgaactagtacgccctccttatatctgtcgtacattgtccggagaatttgaaccaacgtgttgtattaacttgagtgtttttgtagtccggcgtaccagggaatgatggatgcgttccagctgcccgggccagcgaacatgagtagcttggtaaattacatggttcagatgaacacgaccgtcaacgtacgttcattgtatctgtctcccccctcgtctttctcgtgcagagactgatcaggattctcgcccctcacctcccaaataggatacacatgtcctaggaaactttatcgaaaatcatgacttggtttgtctgagtttctctcaatctcggccgtgtgaatatgagcatagttgacctgatagggttggtcttactttcgtttctctcttttcttgatcatcctcctgccgtatcatgcagcctcggttcgccaacacgtgagtgcatatttagatttctatcacaaaaatatattcatgtggaaaaaacatgctgataaacgagttgcatctgatcacgtatacgacaattttcatccagaacggtggatccattattgcagtacaatgctctagcttttcaattcattggtaacgatggaatcccaatcgtctactatggacaggaacaaggatttcatgtacgttcctcttctgaaaccctatgtatgctaatatctgatgtttgtccgaccactttgtatgctcccatcctttttgcttctttttttgtcagggaattgctgatcccgtaaatccatccacgcgtcatgccagacgggtttgatagaggcgatctattagactgactttgattctgttgtaaattatcttgaatcaaaacttctctaagtcaaaccgagagcctctgtggacatcagaatatgcaaacacgacgtatcgtcaacgagtcgctttcctgcacgagtttcggagtcttatggccaccacgggtgccaccttcaatggctatacctttgagaacgcttcggcccagatcctctcgcatgatcaacagacggtggccatcagaaaagggccaatgatgagcgtgttaaccaacgtgagtttcttttttctgcgcttcttctaagcaggcacaccgtcccgatacatgggactgatagcatcacacaactgacaacgatccaattcatctgaaccctcatttttggtcacaactagcgagggtccccaccgacaaacgagccatattcgatcttaaactctggttggccaatgtatactcagttagttgatatctggtcgtgcgataaactcgtggtcggctcgagcgaatctttcctgatttcgtataatgtccgaggcggccgacctgttgtatgtttcgctgctgctttcttgttccctctaaatcttatgtgagctgtcgacgctgactgtgatactcttatgacttgcgctcttacatcaaagattctcgtgccgctagcgctcatttcgaatacgacgttctgcccgtccatacaacagataactatcacacagaaggtctctgattccagctcatcttcctcaatgctcggtagatgctcaggatgggcatcgtgggcaggactgctagggttcagcataagctgtttgcttaccctctaagggaccatcctgtgttccgctctcttttcttgtgggtctaaaccaaaacaacaaagaatgaacaaaagacggccatataggtgtcgcatcgagcaacaacatcagaactactagcattgtctacacctcttatcaacacatgggaaccatcataatcatcatcatcagtatcgtcgtcattttcattcaggtcttcctttgtactttatcatcaacgcgccacttgcagctcaaggaaacaaatctcatgaaccatcatccgtctcgacttatccttacctcaacgctttcagttttatctatctatctatttcatccttacagctttccttgttgtacttttctttcaaaaatgttgatccgcctttcaccttttccgtccgcgtctcccttgacagtttgcccatgtttgttcattgagggttgatcttccgctctgtaatcccttcaaaatatgtactattacgccaggactcgtactatctcaagttcagcttggaaacccctttgctctcacattcttctcttctctatccgacattcgtttttaacctgaccgccccacgttcttttcttatttctacttcaaagcattcaactggaaccgttcgtttgatgtaacatcatgggtgtacaatgactattcctctcgtttttcgtctctattcttttcttatcagatccctcacttttgtgatacagaaacaaagatcgatccaatcttaatcctgtttccaggactagcgcgaaagatgtggattttgtagaacacggatgcaaacgaggtgacgatttttcatgggcttcctaaatatttgtttacgaagtgcatcaaacctttggcgctttacgtaatttcattgactatcactagccgtcctgcctctcttttcaatgtctcttattcacaggaagtatttaatcaatttcctgtcccaacaacttatatctgccatctcctcgactcaaccagataagctaccaccaccatcaccatcatcatccccttccatcctcccagggcgctatgtcgtccgaaccgtcttcatcgtcctcgggcaatctcagacggggcgcggcgtgagatatctcattcttgccagagatactttgttctgatattggcagctaaagcagacaactaacctaatgtctcggtcgtctggttcattggcaactactcatcggtcttcttctcttgctcatattcagttgtcagcgttgcaggtgatatactctacttggtagctgattctgaatattgaacgagcgtcttgaactcatcatcatcatcatcaccacaatttggttccatctgaacgacaggaagagaaagctggtgggtgataccttgtccatgcatgacgcttaatatagtacgctgacacatacgagacacatgcggtctgtcttttgtatctttgttccattgcttattcacttgttgctagaaatggtttgttgctcagcgtccttttcttacagatgaacacaagtgaatataacctgaatttagattactgttgactgttgcagtacgggtgacaaaccatcttgcgggatgtgtcttaaagtgagactagcctgatagatttctgtaaggctaaatcttgctcatcttaagcttattttctttatctttctgggtcaacgctctcagcactcaaaggagtgcacatacgaagattcatatcgaccaaagactaggctttcgaagctggaggaaaagatctgttggtgctagacctgtcttgtcgctttcttttgcggctgatcaattttttcttgtcttttgtcgaccatactcaccacttccctttgtcatctgtattacttgacttcagcacggctagagaacaacctcgcatactcggaacctagcaaagccggccaagtcagaccgcctcacttggcccagagacaaagattttcaacagggtttccctatcctggctcgaacgaaaccagatcggaaaatcacacccgcccttctaattctgttcagcaggtaaagtttaacagccgaaaggcctgctcgccgtctctcgaagagccaaagaggttgcgctctacactcgtcatgaacgaatcacagcctgttggagatcagcctctgactcctattcaaacgagttcgaacagtatgcctgaatgtactgtgaagacagacttttctcctctggaggctcatagtcaactgctcatcgaagcagatcaagcagaaattagatttgatgattgggtctatgactttgatccatacgcagatgatagcctatcatctactccaaaccaggccgttgtaacagaacttgagctctcagcatctctgcggatccataccgatcaacgttctcaaccggtgattagttctcagttgcccactccggaagagtctccatcatctctttcaccgttcgcgccgctggaggaccgtgcggcagctttgaaggtagccgtggttgatcgggaagagcttccgaaagaagttagaaacagtctgctcagcttgttcttcttgaagaaggccatgttcgcgttcagtctaaatctcgatagattctggaggtcagtcttcaacctttctctgacatccaaaaatgaccaagaagaagaggacacgttcttgcgatactgacgtttttgcttgtatgccatttctgccgttggtctcaaatctgtcagttctcttgaccaagagacatgcgatgatcaaccgcatcctgcttttctttttgctatggtgcgtatcgttcttttctcgtttgacggttgcttgtatatatattgataataactctcagctctcgcaacaaactctgtcgcgtatgtttgatattccgatatacctctgcaaaaaattactcttgttctctaccgacctcagtatcattgcgctagtgtattttctcccgatgtggccgtccaagcgttggacgatgtgtttttcgatatcgccaagaggaagctggacgaggctttcagagactgggactgtagaacaattgatctgatcagagccgccataatcctgagcttcacatcatgtgagttgatcaatgattgactctctgggaggaatagaatattcgtgatatcgtcagattctgactgttcaaaccgtcgatgctgatctgcactagatgcgagagcaaggccatggttcgcttgggtcttttctggggtaaggtttattttaccttctttaacgctctaccattcatattctgttgtttgttgacgcccgtctcctgggtcacatggctctcagatggcgatgcgcctttgttctttcgcccatcttcagagaatcagcttcccgttctccatgacgtctatccagaatctaggatccgacgcatatgatcagatcaaagggcctcccggacgtgagtacaagcgtgtgaaacctccgaaggattctattgagctcggagaatacattcacgtattctggatggcatgcgtgagtcgcgtgccctctctgccgagactagaggctgttttgtctaactctgaattgatgccgaacatatccctgtaactttgcatctgctcttggtcgtttgtgccaatcagactatagacaaggtcacctcaacatcttccggatgcgctcctgtaggtttcctttcagtgagatgatacagaaacatatggaacttaagagcacttctcttattcgaatggtcaactttatacttagacgatgcactggtcagaaatcgagacgccttttccgttgccactggagttgtacgccaatgcaagttccaccgagtagcttctcatcacacttaacggcattgtttctcaaccaaaggatctgaccattgtgttgtgatattatagattgatctggtcaatagcttccccaaaacggcggtgtacgatttgtttaatgactctcagcatgtcattgttggaaacatgtatgtgaacgttaactcattaagctctcgtggtaaagggaaacctgatagagctgattgttcgttgaaatcttggtcgtgatctagaagcgcatcttgccattacattgcatccttgttcttgagtgaggcgtcccggctaagggatgagttcatccagccttccgtccggaacgggtatctctctcgccggatgtcgtcttcaaccaaccctttagcctctcccgcctcgattaagaatttcttcgaggatttcttgagcgagagcactgtttctcactcgatgggctgtgtgccagaagaggtcattcagctccagaacgcggttctcagattcatccggtctcttcctgctgaccgatcgaaccctactagaaggatgtacgtctgtctgatgattcagataaaggctgttttggagagctccctggctgatgattgacaccttttttttcttttctttctttggtcgaatggatgatatagtcttgggggagtcccgtcttggaagtcagactctacgttcaattttgagtcgatcacaggaacgatgaacgagctgtccggtcagacatggggagtcgacccggaaactatccttatccataccgaaatccatacgtacgtatacaaagacatggatacgcactaccgctatttttttttcttcgaccgtttctacttgtcatttgcacgtgttctgatgagaccgcacctgattaccttttattttttgtattatttcattcgtgggaacagcgcgctcgccttaatcttccaggagcgatcgaaatatgaacccgatgcgtgggcccaagcggtgtcgtccgctcggtccgtagttaagatccttcagatcatcgtcgatgtggactttagtcaagtgtgtgtcatcatggcggttcgtgtctgtttcatcttttatattcgccccgacgtctctttctggcttgcaccatgggttagactcttgaggaaaggctgactcaagattcctacgggcgcagacctgttggcgaatcgcggctcgaatcttgtctgacgaagtgagacgtcatcgttcggccgaaaggaaggaaggttcgtctttagctatcgtcccggtgactatgtcgaggacgtttgctgatcgacagagaccgttcgacctggtttgctcacagagccgaattgtgcgatggttgacgtcgatcgtgagtgttttatgcttgtttcgataggttgatccgagggggatcaaaaactgacaacgaccgggctttgtcttttttttttcgaccggtggtcgatgtagtcttactcctcgcgcttgaacggatcggtcaagtctttgtggccgagtaagaatagccgatcgttgaggtctttcctttgtttttcttttctcctcaacggagatttccaaagcctatggttcctcaccgttcgttgctgggcttatcgacagggacgagtgtcgaacgacttctacgcacgacgtgcagtcgtgatagagttttctctctccttttttctctatcttttttctttcgtgtgtgtgtgtgtgtttgggaggggaga

SEQ ID NO: 2928 - DNA, 687 bp, Xanthophyllomyces dendrorhous; identical to SEQ ID NO: 1373

SEQ ID NO: 2929 - DNA, 1034 bp, Xanthophyllomyces dendrorhous
aaaagaaaagaaaagaaaagtgaaacctgggaaacccacctgttcacccgggacaaggtctctgagggcgacgacgtccatgcaattgccatcggccttggagccgtatccaccgaaaggaaagacgacgacggcgttcggccagcatgagtgattgaagagcgcgaccggtggtgagatcgccacaccgaccggggcgagtgaaggggaagaaagcgtgaaggagtttgtcatgaacgccgcgcatagatcgaggacttctgctacggatgcgaacccgaactgggacatgtctgccggcgggatctcttcgttttccgagctgttggaggagtggagggcatgtccgaggtagacgcctagttggagagcgagttgagcgtagggcgctggcgcgccggtcgagggatctgcgaggggcatggctgatcgttggcaatcgagttgagcgatttgtgtccaccagtagtcgatttctccgcctttggctttggctttggccgaggcttcgatcagtctctttcgtttggcacaaagtcgactcaacgctctaacggcctctcccgggatccatccgtcgtcgtcgtcgtcgtcgtcgtcggtggtgccatggtcgtctttgtcgctgttgcttttgcctttgatgttgtggctgcggaggtggtgtgcatggagagagctcaacgcacgacactccaactgatggtctagccagccggtcgatcgacattcagacgagcagtaacggaccacgcgacacccagtacactctgtgagctcgggagtgtcttttagagggaaggagtttgacggcgtgctccgtcgacgactacggtcttgatggatctcgtgggggttgagaaaacaggccgaacagacggttcggagggaggaggtggatagactggctgcgtagggtgctgtcgagaggatggttgagcctgctttgaaggtgaccggggctgactggacttttttgatccatacggctctgcctttggttgggtgtgttttgatttcgagctgtggaggga

SEQ ID NO: 2930 - DNA, 768 bp, Xanthophyllomyces dendrorhous
tgggtgagctcggtgtgcacagtgagccgggtcagagtaggcaagagcagagtgcactgagctgcactgagctgcactgcactacactagaacaggccagaacgagcgatggccttgacggaccgcagagtgtgctccagcggtaggccggagagagtactatggagtgttccacagatcacaccgccaactgtgttacagcgttgatgaaacgagcgacacttgccgagttgtgtgtctctatacgagcccgagcttgactgggggtgtgttggagggcatgaagagagcttcaagagagcatcaaacagcatcaaagagcgctaggaagcacaacagaaggagcgctgtgtgttctgtgtagattgcttgtagtccattttgtagtacactcccaaatgcggtctgtagtgttctttgtggtccactctgtggcactctctctgatgcgctctgatgcgctctgatgcgctctgatgcgctctgtagtatgctctttcttgtactctttcttgtactctctgttgcactctgtgttgagcgttgtaatgcactgtgtagtgcactgtgtagtacattctctattacaactttccattacaaatcctaatacaacttcctaatacaacttcctaatgcagccgtccccagccgcacgcgttcaccagggtgggtgagtcaccggcaaattttccgttcctgagaaacgtattaggaattctgaccggccgtttgtagtgtggtattagggggaatttgtagtatgtg

SEQ ID NO: 2931 - DNA, 814 bp, Xanthophyllomyces dendrorhous
ccccccccggttctctctctctctccctagcctcgaacctcagaaaagaaacacgtcatcgaaaagaaagtaaagaagaagaagaagaagaagaaaaaaagaaagaaaaaaaaatccaaactacatttctctcttctcctcatttccccccccccaaatccatccatccaaaggttttaggctaggtcactgaaaaaaaaaacatacacacatcgtacgtcttctctcgtctctctttctcttagccttccaagacggcgtgtttcctttgcggtgttccggtgtgttgcacaaacacacaccagtccccaccactgtactcgatgggtgagcgtcgaatgtcagtcaaaaggacggctggctggctggttggtttacaagattctctcggaacatccggttgagagagaggagagaatcaaaacgaacatttcccaacacacaaacaatcatcccatcgatgggtctgtccatgggatgtgataaagactctccccctcccccggcttaaggccaacacactcagccccgctcgccaggctcttctgattgattgattgattgattgattgactgcctgcttcccaccgagcggtgttccgttgtcggcagtcttggtgtcttgcgagctttgaattttgtcgattttttttaaatcgtcaaccgaaatctcaccacctttttttattttttttggtgtccttccctcttcttcttctcctcctcctcggctcctctctcgtccttctcgtctggtctggtctggatcggcctcttctttatctcgtactccttctcgtactccttcttaacc

SEQ ID NO: 2932 - DNA, 13854 bp, Xanthophyllomyces dendrorhous
ccccgagatcaagagtcatcgtcatccttctcctctttccggagcgagcgcgaaaagaataccactgctccgcacgtacaaaaatctctcgcttgatctgtgtgtgtgtgtgtgtgtgttcccgggaaaggggggggggaaagaaagaaaatcgacgggaaggaaaatcgtcatagatggtgtaaagacgttcgagcgcacggacgacagagaaagaaagaaaacaagggggaaaaaaagaggccgagtcgattagggatacagttaaagaggaggggggaagaacagaagaagaagaaaaaagtgtatggaaaagaaaagaagacgggaccacagagggaaaaaagaaagaaaaaaaaaggaaagccctagtggtggtcctttctagacagagacgttgattagagatggtcttggtaatattaggatgagacgaaaaattaaaatgatgtgttcatgtatgtataaagttgaatgtcctggggtcaatttcactcagctaaaaaaaattgaaaaaaaaagaaagaagaagaaaaaaaaaacaggacaaatccaaaaactatcagtgactgtcttgacggtcgtgaaaacaaagacatccaacaaaagggaaaagcaagaaagcaattcaaagaaagggagggagacaaactgtttgaaggcgcccatgatggcttgaatgccgctcattcccaatccatgggatgggtaacagatgtacaacttttcttcttccgccccgaacttttctctgaacccggtcttcctgctcaatccgaactggttcaacaaaacggaacagtctattaggtcaggaaaaaatgttgatcgtgctttcatgcagaccgccgacgaaggtcgttactttaaaacaaaaagaaaaacaaaggaactcacactcttggaaacccggctgtatacaccagaaagaatctttgcctggaacttggagatactgttgacagcctctagatggtctgccgcgcccgcgccgaacgtagccgtcttcacaccggccccgctcatcaccttcatcgcttccgtcaacaacaactcggatgtcccgttcggtgctccggggaacatcagggaccacttgatctgcagtccgttctcggcggccagatgatggagcacggtgaaaccgacgacgtgaccttcggcgttccgggcgatcaaatacgttcggtgttctgcatcggtgaacggtcggatctgatgagggcgaaaagcaggagggtcaacacgtcgttccaaacacacacacacacacacacacgccaaaggggatataatctcaacaacaagggggaaaaaatgacgcctgtcgggcttacactagtggtgtggatctgcttgctgctcttcctgttctcctgccatcgggcgattccatcctcaatttcctttcgaagatcagccttgatctcacgctcgatcagttcgaccgtgactcctttgttctgagcttgatggaccttcttctcgatcgctcgtccgtcgtcgctgtcgtcgtcgttggcctggtggttcttcggtcgtccttgtgggctcaccctttgttcgttcgtcaccgccaaagctggaaagtatcaaagaggtgtatgtgtgtgaggagaggaggaaaggcgagataaaagggtgggaggaaacgtcaataaaaggcatcaagaaacgagacgaagcagataaacataccatgccaatgaagaccgttggtgaggatttgctcggttccctcattgcagttcaaccagatcggcttgagcctcctgtgatgcttcaaccaatcagtgtaatctctgatgacatcaggaagcgccgactgtgggcaaagaggagatccccaggtgatggcatggcctacgaagagaaatttaagaaatcagtgattcgttcttacgagatacttccctgaaaggaaaaaatcgatcgtcacctttagagtcggtgaacccgatggcgtaaccgtgtctttcctctcgccagatctcgtacccttcgtctgtccaagcctgaagggtttccaatcaaaaggaatcagcctggagaacccccacttcgggacgagcgaaacaaataagaaacgagcgactcacagtactggtcgagtctccgtattttgcgatcagatcctccaacttggggtgtttctccttcttcatttcatccttcgagagcacgttttggtcgttctcactaccagcaaccttggtgggcacaggcaacgcggcctccgcgacctctgccatctctttcagctgagactttggaggcgccgggaacgaatggggatccctggggaacaaggtggcgtgtctgatgtttccgagtttgaggaacaacatgacaagtcgctcgagaccgattcctccaccggcgtgaggaggcatggctgcctggaaagcctcaagatagtccgacatcgagctctctgcgatatgagccttcttgagtcgttctttcatcacggcggccgaatgaattctctgaccgcccgagatgatttcctccccacggacaaagacgtcgaacgaatttgtgatctctgggttgtcagcatccggcatggtgtaaaatggtctggcggcgaccgggaatttatcgaggatgtagtagtctgggagagcctcatggttacgtcaggacatagtgaaggagatttaaaaggaactgaaagaaaaagaaaagaaaaaaagctctgggacctaccggtattgtacttctctttcactagagctcctagccgaacctctgccctggtggagaggtcgtccatatccggagggtcctcgtcccatccagaatccatcaagagttggacaccctgtttgaatgtgagaacaacggtctcatccgggaagacaaggtcctcggacggatgtttcttccggacgacatcgatctcttttgcacactctttctggacggtacggaagatgtgcttgagcatattgtcgatcatgtgcattgcctcgtgataactcgagtcaattgccatctcaagatcgctgttcgatgtaagaaaattcgaaatctgagtctgatggaagagaaatagatatgaaagagacctaagaaactccgtagactcacactccagtgtattcagtcagatgtcgatgagtgttcgaattttccgctcggaagactttgaacaaagggcaatcatcgagagatcagtcaagcgacacgtaccaaaaggtacacttataagcaaagctcacctggtccgatctcatagaccctctcgagatctgcaccaatacacatctctttcgcgagctgggggctctgtgcgaggaaggcttcacggccaaagtattcaaccttgaacacagacgcgccagactcggtggctccctgttgaagttttgccgagtgaatctctaaaaagtcatgcgagtcaaggctggcaaggaagggcaatatttaaaatgatcagagcagagaacgaagaaggatagccagccaagaacagaccaaaaactactaacaacccacgggccgctcgggtgacggcggcggtgaccctgaagatggcgtgtgcgtctgcagttcgaagggacaccgctcggtgttgaagttggtaaccaaagggaacggtctgatgaggctcattctggtcatcgagatcgacatgatctgcctgtgcggcaccaaaaggaagagtggaagtgacttcagagaggacaaagattttgtagatctcgatctctgcctgatgaacctcggccgacttgacgcctccctgaacctctggcttcttgactttgccttcgacaagaacgattgtttctcgcggcaatttttccacccagcggaccatggtttcggacaccggagggagctcattcgtatcggtcgagatcggttcgagcaagtttttgggagaatgaccgtccgcgttgggaccggtaacggaggatgaggcgttgatggaggatggggcagtgctgacggcggtagaaatggaagagtcggcagaggatgtggcggtcatgggttgggaggcggtaacatcggtaataggtggaccgagatgaagattgttcagatcggtgggcaagtcggcagagtgatcgtgagtggagacatttatcgccctatcgacgctgacggtggcgtcccggctgtccggactgtctaaaacgtgggaagcctgggctgaagaatactgggagtgaagagaaggtgtggaacttgattcctgcgcgatgtgctcggtgctcgtgcctgtgcctatccggacaataccctgcacggtctgcagtctatggcgaaagaccacaaatgctagcttggaccctaagagtgtatatatgtgtgtgcgcgcgcgcgcaaaagagagagagagagggaaaggggaaaaggagaaagataaaaaaaaatcgaagagagagcatcagtcagtggctcaacacgggcacggagtgtacgttccgcttaccgagccgacgggtagagtgaattctcgctcggaacagcacggtatcaccgatagaatcttctgtgatgtgctcaagcggcgttcgctctctgccttcgacatccttggttctgtccttgccagagtgctcgatgtgaccgtacctgcctgcggctggatcgttcttgatggcctgagcaaagttctgtttgagctgttgctccttctgttcgagctcccgcttatgtttttcgtgttgctcctccttctgtttggcttcctccctctggcgcagccttctggcctcttcgtctgagacctgactgctccccggacttggagtgtgaatcttctgatggagtttatgtatgattgatgacatcagaaaagggggaaaaagagaggtatggacgggagaagagagagaagagaagaagggaaggaagagaaaagaggaagaaactgccacgcttaaaaaaggaaaaaacggtggaaaaacggctacgtaatcgaagaggcaaaaggggaagattaaactataacgtcaaaaaacctctaggtggtaaatacaaacactaagctgaccacacaatttaatagggagagtaatacgaaccgactacaaaccggccaagaatgatacatacaagcacttagcccctccggcgaagagggaggatgacgtcagctaggtccgtatgcgactgtggaaccccgcttggggtgataaccgttcctcgacgcgcaattggtacgcgtgcggacgcgttcttgagacgcaacgatccgctcaagcatattcactggggacggaattggaagagtttccccacatggccggctttcttttcctcttccacctcaaccctgaaacacgtgtcgtcatcagtcaacgaatcattttcacgtgtcctcacagcttaatggtcaacacgtgatttgcttatatctagctcgtctttcaaataaccttagacaaccttaaaattgaagactgatgaatttgaacactccctcgagtgtagaaagcagagtagaatatacagtagacacacacacatatacttaccaacccacagcacctatagtcccaccatggccagaaagagaaagaacagaactcatcttaaaggagctgccaaggatgagacgaacgacgttagtgtattcctttgtatccggtctttcgctcttgttcttactttaccttctatgtcccttctctcacacccgtttggatttctttcgaaacagccgaaagcacctaagtcattcgtgattaaagtacgtttggtctcattctcttgaacgtttgattgagccactttcaacatagttaacttttgtgttgtctcccttgcactctcttctccgctccatttgtagtcaggtcatgtaggcacatctgtcgctcagcttgttagagacattcgaaagatcatggagcccaataccgcttccaggctcaaagtttgttatctctactactatgcgttctttctagcgttccacctaaccaccatccctgacttctgtctcgcttctctatattcctataggaacgagcatcggccaggctgagagattatcttactatggcccctgctttgaacgtgacccaccttttggtcctcacgctctccccgcagacagcctctctccacatgagagttgcccgattgccagccggtccaaccctgacctttaaagtagagagatatagtcttatgaagtgagtgccttgtcctcttctcctttgatccctctcagagtctcccgtttcctgggcggaattttttgttgttgtcagcactcgttgttaaatacggtttcctccatctaacatacatcgccctttcctatcaacccctctgtagagatttgtcaaacgcaaagaccaagaatgtaggacacgcgcccagcttgggagagttccgaaccccccctctagtacgtgtattggttatgcttcaatacgtgagttgatcgtgtatgctaatgcaagctatctcacctttctctcatgctagttggtgctcagtaacttcaatcctgctcctggggagaaaccacaaccgcaactgaaactgatgagctcaatgttccagggaatgttccctcccatccagattgacaaagttcgtttgtacccttcatttttcgctcgatcattctatacccagatcctgtaatgaacccatcacgtctatctttatggtttccttcagtccgctttgccctcattccggcgagtgctcttgatatcctaccatgcgccgacccatctgatctctatcagacattatatcatctccattcgaccgactggtgtgtccagacggctccgacggacgctcgaatcatctaccaaccctcagtcgttctcccgaccggttgacctgtcgaacgacaatgatatctccgactatctccttcgagctcaacaggatggatacgaaaccggatcagaaacagaaggtgagagcgagggtgaaggaagcgagggcgagaacggaatgaagtcaggtagggtagagcttccggccgactatgtcggtagaggaaacaaaaagggaactaacaaggccgtcaggttggtcgaggtcggacctagaatggagtgcaagcttgtcaaggttgtagaaggcatcgttggtagtcttcgaggagagggtgagaccgtgttccacgaattcggtgagtgtttctcttctttttctgttcctctttgtcttcctcttaccttcatactcatacttctcttgttctttccttcaccgcgccactcttctcagtccataaaacggcggctgagagatcagaactcaagacatctcacgcgcaacgccagaaagaaaaggcggcccgtcgttcagaacaagctgcgaacgtggccagaaagaaagaagcggccgagaaagcggccgctgccaagacttccaaacgtggtaaacgacccgatgccgctgatgctaatccggccgatggggaggaaagtgaagacgagttagtccacgattactccggtgaagacgagtttgagttcgaagaccgactcgccgctaaggctactaagaagtcttcccgatcgaccgaggctggacagcccgaagacgaagatgtcatggaggaaagtgatgccgaagacgaggttagagtgggaggtgatgaaccattggatttcgatgaggaggacgaagcgggtgatgtcagttcctccgaggatgaagcccccggtggagaggacggcgagtcgagtgagagcgatgatgaggttgatagaccggcggcggtcaagcagaggttcatcaagaaacctagggtcgttagcgcagggaagacaaaaggtcggattggaaagtgagaatatatcatgtaacaccagaagacaaataaataagatcccaccggaagataaaagatctcatatacatatatatatatcaatcatcttcttacatcacaatcaaacatatgaacacctcaactgaacggatcaaactcatcggccacagctttcagattccccacgcgaccgtccaaaccagtcgacgatgaatgagagctcgacttcatggttggctgtaagactcctccggaagcataacccggtggaagactcggttggtatgtaggtgtgcgcgtgtttgacgtgaaagaagatacagctggagagttcacagaaagatcgtacatcgtttttggacgttggttgtaactttgtgtcggatgggaattcataggaggcgtaggaaacgagaggttgttcagagtgtttggattaggacttggaatagttgacgatgatagtgcagaagcaggggcagatgcagtagcgggggcgatcggttttggcatgaatagagaggggttgatagtattgaagggcaacggcctagccccaaggcctcctccactcttcgtccgactattcgatccaactagaatttgagaaactggttgggcaacagccatcgtagttgccatcggactcgacgcaacgccggtcgggacggaatcccacgagtcatcaccccatggatcaaccgaaccagattcttcaaccgggcggccggtggatctcttcgaggccccaccgacaagcgactcgaacgtgacctcgcctgtggacccagaacgaccgttgagagcgtcggtaaaggaagatccactagtagtttgactctgaatccgttggttctcccgaaggtgttgagcttgttccgtttcaattcgatttcctagagttttgatgctttatttgtgaccgaaacttatgatatcaggctagatttatacaaagaatctatgcaatgaaatgactcacgtcgacataaaccgattaaactgttccagattcaacactatcaagagagaaataaacggtgaatcactcgatccgaaggataatctgaaaatttggtcggactcgcgcgatctttactcacaaggacccatggagaacgtccaaagctggggcaatacaagagtagccaccgcttcccggtccactttggcacccattctctcgtgtacatctgaggcgaatttccgttatacatgtcagcacaaatcgaaatggatcgatagttcgcttgtgttatcaaaagaacaggctactcactcaaagtcgccatctgtacaatcaaataagaggccattcagcatgtgttacacaaacataccaaagagagagggacgaaccataacatccggttccttggtcttgatttttgctagcaggggtactagtttcgaggtgagagtcatctgttacacgatgcgatacatgagctatttgcgcagaggaaataatttagaacaacatgatcagaaagaaacttactttatccaacacatttatcatagcaaggaaacactcgagtgtcttgacttttactgtgaacgaaaaaagaatgacgtttgtgtgtataacatagtctcacagaacttcggaatggtttgtcaaacttaccactcaatacccttgtttttgtaaataaaatctaccattttattcacaccgggaggaaaagggtcaacgaaagataccggtatgcaaatgagagatctcaacaagatgtgtactcaccgccactctcacaaacagtacgtcttgcacgcttcccacatccagtacatctagtagattgggaatcgctgcgagagccttttcttgaacctgtccgtcatctcagacatcacactatcagctcgggcgtcactgaaaaacaagaacaaagaagaaaaatctacctcgggatgttccgaatcaagagaattgtaaattaatggcatgatatctagagtgcattgtgagatggctcagctattgtgaaaagagagtggcagaaaagacaacaacaacaacaacaacaacaaaaaagctgacgtactttcccgaaagactctcgggtttgttttctccatgaacagaggcagactattcaacagagctacatgtacatggtcacaaggatcgatggttacgacattattagccatagaagcgagaaatgtatagagtgattgaacgtactgagcatattctgcggagggtctgtcaagctgaatagcggcttgagagcagccaacgtgatagcattgaactcttctaacgattgagatttagagatctcgaaaacatttggcaagatgaacggtagcaaccatgcatctttcatctatggccaaattcgcgatcaggtaagctcaagtatctggcatagcctgaagcaaaaaaaaagaaacaaacctcttcgagtagacttggcagaatcttcctcttacgcaatctttcagagaaggttggaagaacgttaagcaacccccttaggaaagttgctttctcttctttaggttttgaactaaatgttgatcgatccaagaagaggagggtagagatggccatgttggaaaaaaagggatggcttgggagggtcaaggcagtcagccgattttggggataccgagttatgaggtttgacaagatgtctacacagaaagaagatcagaagcagatctgtaacaacgcatgagacatatacacaagcgaaagaaacacaacccatacctttgagatcattgctcagcctgccccaagcggcaggatttccaattgcccctcggccgagctgattgacgttttgtctcaaattggtcaacgcgtttctattttggaagggaggccttccacctaggtgaacagcgtagatgacacagcccagagaatacagatcggacgacgtgcagagttgctcatctagcgcgtactccggtgcttgataggtgtaatacgactcaacattgtgaattaacaaaagttccggaaattaaaatgaagaaaaacaggtggattactcacccatgtagtcccattttcgttgaaggctctctggcattcgactatcccattccggaaaaacccatctacctccagatcctccttcgtctgaaagcgtggtagtaagaccaagcgcacctagcttccaatctcctttcaaatttatcagaactgcttcaggcgagatattttggtgaatgattttagcttgggtgtgtaggaaagagaggccgtgagtgatttgaaggattcccttctgaatctaaataacgaggtgaaagcgagtttgaggacttgcgcacaccactttatgtcgtcaagttcgatgcaaaagacatacctctacttcatccaagtcaactccttctaatacaccgccaggcctggccgagcttaaagtgctagctaaagatgacagtataagctcggtagcgaacataagctctgatctggactcctccataggttccaccgtttcgagtatcgaaggatgtctaagtctagataaagacgttgcctaaatgtatagaggggacgtcaaacaggaagattccaagagttcgacaaaagatgagtaactcatagttaatctcacctcttttttgaggacttctagcgcctggtcttttgctggtcctcggagactgtcgaggacatttttgttcaagatccaaacagagacaacctgacgatcgatacagatcctgaccgtaagccaagacgttttccgatcagagagtttaagagaacaaaccttctgagtggtcttgttggtagctcggacgatcttccaaaggccgacgtagaatggcttgtcgtctgattgattggaggatgcaccaaaagcgggtgatgctgatgctgactgttggctatgaatctgatagttagcagaaattgaggacctgttgaacagtgaggaagcaaccgcaagcatggctgtcaggtcctactggataagcagaaggagagggtaaggattgaaaaagcgagagatcgagaatgtatgctgtagtggattggatgttgatgccaaactcgggatgccggtcgataaggttagggttatttcaaggtcagagatggggaaatttcgttatatcgacgaggtgttcaatacccaacaattactctcggaatgcctttcagtacaacagaaatgtcaaatgaaacacatcggaagcgacagatgaagaatcaagaatcgtcaactcatcctcaagaatgatagagtgttagcctgtagataggcgtcatacttcatgtcgccggtctcatatttattggataggtgcgggctctgcaagtcctgtccataacacatgtttcgaaggtagggttacgattacggttacggttatccgcatagccataactacacaagacctgttagatgaagctcaagctgtggaaatgatttctcccgaagagcatgcatcacacaagacaagaaaaagccatacttgaacgctcccgaagcagggagaaccaagagactgtctgattcggtatacgtgtttgttcatcagctgttctcctaacagacaaggctgagtacaaacggacaaagttgaatacaagcggatatgattaacactccttgggtttagaagatagctaacgttccgcaacaaatatcgtcggtgatcactgatagttgagagcgtcggcgagattcaatgtcaatcagtcaagatggtatttcttctccactaaccggagagcaatgatggggtttctttgttctcatgaggttcttcaagtgaagaatgacgaatagactaaaatgataacgtcctcccaaggtcaagtccgaagaaggtgagagattgaacgaaatccgtctggtcgctgacgtgctttgacttttctagtttctcatctctccggttttctcattcttccgctctgcattcttcacttgaccttctcgctgcttattttatcaatccaagctctatcagcccggatattgcacaataattcaaggatgcctatttaccggtcttcccagatagaacgacttatgtcctaatccttgtccagtgaactttcgcacatcggcattttataatctcttctatcctctctatttcttctccactttctctccctctacttatccatcctttgagaattgaatgatggtgcaataccgcacgatactgagcacttcaaatccatttcccttctaccatcttttttttcccaagcattattcttgtcggcatatgtcgttttttcgaacatttttcgtaacgtggtcttcagaaagctgtatatatacccaaccatctctcatgtgttcttgatcaagaagagaactcaccaatctcgaaacttgcttcagtatccttcagcgccaatgtctgctcctcatcaccactctccgattgctgagcctcaacctgttccctccgcccgttccaattcggtcacatctaccatctcggcagaggacaagaagctgtatgatgataaagtgatcgatcaggtcgtgctcgcctccgacataccgcctttggctgaccgagcgtccattgatggaaacgccactattggctcaaagatattgatcgctctcagactaaagaaacgtcctgccgtccatggcctcgactcgatcgccacccagccatcagtgtacgatactgctcaagccgaattctataaacctagaagcgactgggaggttcgtgcaatgatcttgatttaactgagtattctagtttcccttgcccactttgctcatgccttgccatcttacccctcgccattgacactgcagaacatctcattcttcgatccgttattccgctggacctggagagaagaaaaaacggcagtgaggaagatcgatctcaagatcatggcctgggtgctggtcatgtttctggctctagatatcgacagatcaaacatctccactgccactgccgataatctgctggatgatctaaatctgacacaaggagactacaacctgggaactactcttgccagactcgggttcttattggccgagcttccgtcccaactgatctctaaaaggttcgtttttctaccctcatggcctttaatg

SEQ ID NO: 2933 - DNA, 3354 bp, Xanthophyllomyces dendrorhous
gcctttaatgtccctagcgctatactaaaatcataactcatctattttctttcgcatcaaagacttggtcctgatcgttggatccctattcaaattgtcattttctcgttgatatctggtgctcaattcttcacgaaaggccgatcaagcttcctcgctatcagattcttgatgtaagccaattaaaagttgtcaatttccttcaattttatcgcttttccagagggctgaccatattctattttatttacgccagtgccgccttccagggtggatttattcccgatatcattctgtatttgtcttacttttacacaaaaaatgagcttcccgtcaggctctctttcttctggtccataaattatgtcgccgacatgcttgttggatttctggccgtggggcttttgcaaatgagaggagttttaggctacgctggttggagatgggtaagcccacttttctcaattcgtaacatatcttgaaaatcgctgatctgaatactttgccttgttcacttcagatgttccttatcgagggcctctttacctttgtaattggaattgcctccttctggctgatgccaagtgaccctgttgcttcttcagtatctaggaagtggaggcccaatggatatttgaccaaaaacgaggcgaaaatcatcgtgaacaggtctgttagagacgaccatgccaaagttcgtcccgtaattctattcatatgtactctatcttttgacctggcttataatcgtttttcatccatatctctagggaggaatgcacaaccgacagcccctcaccttgtcaatgatcaagcgatccctctttgattacgacctgtacccgctgtatttcattgggttgacattcggcattgctgcagtacctgtcaagcaatacctccaactatctttcaagacacttggattcagcacgatcaacgctaacttgctttcgatcccaaacaccgtcatctcaatcatcaatgtaagtcgaatggttgttgtttatcctgtcctcgatggttgctgagctcaactttgttatgtcgtccatacagttgctcgcaatcactgccatctcggagctcgtagacaaccgatctttcgtgtctatggctgaaaacttgtggatgcttcccttattcattgccttgtgagtctggtccttctatgctcttattctcttcgaccacgttcactcaatatcatctgttacctatctgcttgatcagagatgcactcccatcgataggtgcttggcagtactttgccatcgccactgtgttgctcgggtttccttacgttcatgctatccaagtttcgtggtgtagtcgaaattctggaagtgtgcgaacgcgaacggtgtctgcttcagtttacaacatggcaggtaagtcagacggccctatcagccaaagtcgtatccgaagaatcgtcttgctgaccaagtctccttcaatttgtcctccaacaacagtccaactctcgtcgattattggagcgaacgtataccaagcctcagacaaaccccggtatcacaaggccaacaggtggctcattggaattctgtgctttaatctggtaagtgaaatcatttctcatctactgtgtttgatggtacctacaatactggctgatcaatcatgcttccgtggtcaattggtttgcattgggcacctagataattgtgtatcccggcacatacttctactacggatggagaaatgcttcaaagaacaaaatctgggacgctatgacgtcggaagagaagtcggaatacttggccactactaccgacgagggaaacaaacggttcgtcatacagttcccttcttttcccttgctctctggactgactttgactaacccatttgatgctctgatctctttgtgttgctccagactcgactttcaattctctagatagattatctctattcctacatcatctttctgctatatctttaatcgttgttctgtcatctattgaatcggtttacagttgtatattaccgtatattgccatacaaaaaagattgtatgtctttggctcctgaaaagtgacatcaaccgatgatggttgatacatggcccttccggacttaagtgccttcaaaccacccagattccacgagccatgtgtttggtttatgccagcttcagcctcaacagtcatggcagtctcaacgttagcctcatgagcgacagcctaaaaatctcagattcttgccacctggattttctcttgatgaagggctaggtgcagcatgttgcgcgatgcgttccaatgtctgttccactaatcttgagagagagcagagaaaacaataagcaattgaaacactatcctgagacacgcgatacacgtcacttactcgacagacgcttcgacactccatgtgcgtccacgctttgctcctctctgagaactcgccatagcacttggagcacaccctcgacgtccgatgctcccagactttacggacctggagcagtgcaggagcatccagcttggcaaacagcatcttgacaggaccaggagcatgcccacgagaggccaatgggaaggcgccgtccccgaaggctagagaaatacgtagatgtccttccagcagacagaccggcagcttgtagtatgcttgctcgcggctgatatgcgcgctccagcgaagacacctccaccatcggacggcgaagaacgtcgcgagtcatgagtggaaccgagaatgcgaggcgagagtagcgcagagaccatcgagcctggatgttctgaacgaaggaagacctgacagaaggaagcaaaacaagaaaaccaaggtgagtagagcagttcacaaatccggcaaggcaatttgtacagtcggcatgagcgtgagcgtgagcggcacttatcacggagagctgttaacacttccgcgttgcttttcatccacagccgctttttctgacggtctcggtccatgcccacaaggcacttccatgatttgagagagagcgaccactgcgtgccgtgctcagccagaccgccgttgtccagagacatgtcgggccctcctgcggtcgtcgagagcagcgtccgacgaccagagtcgtgagtcacggccttgtcctctggccgcacaccctaccgaacgcaccctgctcgctgtcaacctttgtcttcgcccttctatctccacccttagtcgtccccttcaactggtgtcgacgtcggtctcagcactctggtagacgcccagacaccccgatgccgtccgtactgagtgaccggacgaatgactagacgagcgaccgggcgaaccgtcggtgttgggtctcgactctggatatacggaaagacctcctccactctt

SEQ ID NO: 2934 - DNA, 15736 bp, Xanthophyllomyces dendrorhous
tgaaccgatgagatagatctatctggacaagatggcatgcgacaacctgggtcaacctgacgtcatctagtccaaggtgatccaccggtcggtcagtcaggtattgcatgttgcatggtgtcgaacctccaagatgggttcctttcatataccgataagctgctgtgaacagtcgttcgttatgacactgataggtggatcatgagtcgctccgaactactttggccgccgaactgttcgaaggaaacggcgtaacttgcggtcatggctcgggcgcacatcggcgtagtcatctggatcttctcgttgataggaaagtccgtagtgaactcacgagtctcgctcgaccacatctacaagtaaccgatttccgacgacttccatgacatcctcccgccgtcatcgtcgtcgtcgtcttcatcgccatttgcagactgactaagatcacgtacttcatgccgtatttgaccaatgacagtggtagagactttgccagatctgtgcgagactggcatccatagacttcacggcttgctaatgggctttgctctcgcaggggtacgctggtcgtaccaatgttccggtgagacgtctgcttgcaatttgacagcaataataacctggctaccgcattctggcttacaatcggacagattgaccggaggctctgacccacatcgaaacagtacactcggatgttctcggactgcttatagactggctggtcgtagatgctgacacctgcaaggttcataaaggcaacgtcaataagtacagcgtcatgagtgtggggtggttgaggtcaacttctagagaacccatctttctttgatccgatgcctgccagcttctttccgactccagtgagccccaacgatgatcatccccaacggacactcgagacttttggcaatcatgagacgggtgtgagtgaactatgggctataaagctgcaccagttttgtgctgtcctcattctaagtttctttttcgcttcttgctgatcttctttccccaccctaaatgagactcgacttgagagaaatgctttactctgccgtcgttcctgccctctgggcctccctttctctggcctattctgtggacgcggctcctttgacggcccatcagaccagcacgtccgatcctgccgctgtgttcaacacgacgatgtttgctcccggtcgtgagccaggtgtctactcgtccaacttttcccgcttggtcatgttcggggattcactcagtgacaacggaaacggcaccggtgtgctctcgaatggcacgagaccaaaccccgacgtaagaaactccctgtttaattgatgagagacgtggtaatcgacaccagcaccctgacatccgtgcacacttgtctgaacagcttttctggagataccgctggtcgaacggaccggtctggatcgaagatctggctgaacgtatgtcggcttcgttttgtagtcaatggttggtgtgaagtcttctgatctgtttctcatctatgaccatttccagggatggacgtcccgttgtttgactatggtctgtccacgcaggttctgatatgtgtgctctggccgagcgtggtttcctgatctgacgaggtgtgatcatatttctctacatcggcgtcgtcctctagctagcggaggggctaccgtcaacaatactcggacgcctgcttatcttaccaatgtcaccggtcgtgttccgtcggccctcgagcagatcgatacgttcatcagcttgacaaactcgtcgtccggtcgcaacacccttgacgacacgctgtttgccatctggatcggatcgaacgacctgttcgccaagatcgaaagcaacatctcgttcacaggggctgatctcatccgggataccttcatcggtatcgagaagctgcaagctgccggtaagttctggcatgttctcatcgtgctcttctatcattcattctactgtgcttctcgttctcggctggccggctgcttgcatcggctgtggagcgacgtcaccacctggatgggacctgaagactgactagatatgactgtttcaggtgccaaatactttgtcatcaacaacatctacgacatcggccgccctttcatcgatctcatgggatcagaaatcgcgtctgtgatgacgaacagcctgatcgactacaacaacgctcttgactctgaggtcaattcccaggcatcagccgtccagaacgcgacgttgcccactgctgagttcgtcgtggtcgacacatgggtggctgcgaaggccatcctcagccagcctcaggcttacgggctggcgaacgagacgatcggccggaggtgtgtcatcggctcgagcatatgttccgacccggactcatacttctactgggatgcggtgcgtcttttcgttgctttgtatatgtttactgatggtcgatgatcattcgaactaagcatggctttctgtgtatctcttgagttcagatccatcctacgcgggtggtgcattccctgtttgctaaagccgtagccgctactctcctcagagcaggttggatctctcgaaaatgagtgatgcacaaacgctactcctatgagtatcccatccatcgagaagggatttgtttctttctcatgagccagctctgggtagtcctgctccagaatcggccgctgccgttctcacactgagatgtgaaggcttttcttcctttcttcctttttactttctttctcttgtaccacttctctcctagattagttaagtcaggattaagcaacataaggtacattagttcgaaactgtcatgactttgttgattgtggccaacttctctcctttctgtattcatcacttgattcttgttctttgggcgagcgtcgtccgccatcagtgtctactgattttcctacatggtaacataaagccaacaccctcatccgctgaccctgcgctacccacatctgacacccttgttctcccttccacttttgtcgcacttatgcctatttttgtcggatcactactcatgttcatttagtacgatggccgcgccggtagagtagcggagctgtgtgctcatgggtgtttgtgcttttatcacccgttgtgtctgaagcatatgctttcacttcctaccttcttttccttgtcgcctcttgttccgccatagctcaagatcctgatgcggatgaggaaaactcggagagtatgggagtaacaagtgcgcttcgatatttttctgatgatcttctatatgtatttcttgagcttagacctcttcaatcatcatagttgcacatcagaaaccttttaatgttactttccctctcatttctaacaatctctgatcgcatatacgtccatatagctgccaggcatgtactttgtacgaagcagaatatcgacgaaatcaacattttgatcatattggttgttagtgcggattatttgtcttgattgaaaattccccaatcccctctatacacattttttcagttctctttccctttttcctgtcctttgcttgtcaataccttctctcttggttttttttttaatttcatttgctttctacctcctccttccattccctcattttcctttctccttcctctcctttctcatttctgaatgtatcctctccgctttatttcatgatgctcaaactgagtcgtcctccattttgaaatcctttctttttcgatcatattcttgataaaatagcaaattggagctggcaggattcaatctgcgctccctgaactacgtagggccgctcttcccactgagctacaaccctgacgttaaagtgaagaatgcccacattctacaatttctccacctctgtctccgatgatccttttccttttcctttcatcatctcttcataagatcaaaacttcggctatgtacatatgtatagatattgtatcctgtcacctgaatgtagaagtataggatgtagtattggcagaagcccattctgctcagaacaactaagagagaggataggatcaataagagtagacaaaagccttgatcatgtgtcaaagagtgtctgtactataatccgaaggcttcgttttcgaattcatggtcagagatgttgatcaaaaggattgatttgacaaagaggattgagcgcaagacggatcaggataaatagtgagaatgagaaaaagactctcagcaatcaagtcaagcttcacaagggcttgatatgacttgatcgtattcatattgatctcatcattatactaaatagacaccgaaatctggccgtgcttgatctgaatagttgccatcgtctcaggagaccatgcgaagatgtccattaaaaagagaagcggctggaagacggtatgcgatttggaatagtatctaatgagtacaatctgaatttaaggagaatgacagaggctacgatactggacattcagcaaagcgagcctgaagaatattgaaagcaggttgtagaagatgacgagcttgaacatggtgaatatgaccggctagataagagaaagattacttgactcagacgataaatgacatgtagaacgaacggcgagacggattgatctgtgaaagaaatcagtgcgttggtagatgcccaaggcaaccataagaaaaggaaggggtgggccgatactgtcagtaaaacctcatgtgtcaacgtcatgtggtgccttgatactaagcaagtagccatgaccgttgtcgagcaatcgtagtgatattgacgagtcaaatagtgaagctattgaaaaactctcgcagtcttccttcttcagtacgaactctttttgttgctgctatataatatcgaggcaggcgcaaatcaaggtcgcgattttcaattgtggacaacgcttgatagatgatgatgtacaagtccgtctatcggtggctttttttgtatcagctttagcatgctcgacagagatagaccgagttgaaacgagccaagagatgttccgaagccatctgtggactgtcatatttatatagaaagcggggagtccgaaatcaggatcacagacatcgcctgatatatcaacctcgcataagaaagaaatcactatgatcatggtattcattcgtgtttcctgttcatttacaggacgcgtccttgacttggaaacaatgcttgcgacgaattagtcctgcatcgaacttttgtgatacatcgcaggtgtttctagacagcatcttcggcccgagaaacatgaaacatacgaacatgcattggcaatgagaggtaagaggtgcatcgacctcgatgaactgtatgagttgtgtatcgtcagatatgcgtccatcaatcgaagcgctcatccattagatgccggtcacaactctgattagttgggcggatgtcagcgcacagataacatttttgtacctcacatgagtgagcgaacagcgaatttggggaactgttcaagttgatatatatggaagagtcatcgagatacagcgccaatatacttcatgcttgattgtatatttctcaacctgggtccaataataagacaaaaaaacgttcctatataagatgcgataaggtagttcagaggatcaggaacatgacgaaaaaaataacctattgtatatatatgcgtttgtgaaatctgtttgaactacaaacaaaacgatcaaaaagcatgcaatgatactcttaacactagttccatgactaccgaataccagactcatgtcagaaatgatacatctaaacagcgaacgatgagaattttgaagtatactctgaactctcactgttgagatgcttatgaaccgccgatttcggcttttgagagatcttatgatttgataagctaccgccttcaagttgagaccgtctcgcaaggcaacacaccgcgcgtccgccagtcacactgacatatccctccaaccccctctacgttctcctctttgcctgacatgaagtggtttgacagtgccaaaaaatccagcagtgaatctacaagcctcgtcgactgcattcgccaatcagtcataggtgagggcaacatcttcgatggtcctttcggtcctaggcgcatcacctacgcagactacgctgcgtcaggtcgaagcttgtcgttcattgaagatgtcattcgtctcgaggtgttgccattatatgccaacacgcataccgaggcttcccagactggccgtcagacatctcgtcttcgcgaaaacgcaagagatatcattcagcaagcggtaggcgcaggagtcgaagatgtggtgatttttgggggatcaggatctacctttgcagttaacaggatggtggatatactggacctcaaaaatggggataacgtatcggacgccaggaccgtcgtctttatcggtccgtatgagcatcattccaacattcttccatggcgagaagcgaaggcagatgtcgtagtcatccaagcgagcagctcgggacatatcgatcaagtcgaacttgcagctgaacttgatcgatataaagaccgccctatcaaaattggcagtttctcggcgggttccaatgttacaggaattttgactgatgtggacgctatcagttccctccttcatcaacactctgctctcgctttatgggattatgccgccgccgctccacacgtcagtatcaatatgaatcctgatggcaagcaaggcccgcgaaacaaggacggtgtttttatctcgcctcacaagtttgttggcggtccaggtacgcccggcattctagtcatcaagcgacatcttttgaacaataggaagccaactcagccgggcggtggaactgtagcatttgtctccaaacactcgcagcgatacgagaagaatccggtgcatagggaggagggaggaacaccggatatcattggatctatacgcgcggggttggtatttagaatcaagcaagagataggagtggattatatcgagaggcaagaacagctttacaaccaattggcaatagctcaatggagccgaaatccttctatcgagatacttggtaatatcaatgcccctcgtctctctataatcagctttgttgtcaagcatgcggagggagcgctacattacaactttctggtcgcccttctgaacgatctcttcggcatacaagctcgaggcggctgctcctgcgccggactatacggcgcagatctgcttaatatcggcgacgagcgattacacaggctggactcagtcatctcgcaggggtatatcggcctcaagccaggatggacgcgtatcagtttcaattactccatggcactgccgtctattcgcttcatcatcgatgctgtcgactttgtcgccacgcatggtggggcgtttctgaatcaatataccctgaatgtgtttactgggttatggacgcatcgcaacaaccgcccagtgaagttactaccatccgtgacctctatgctagcgacccgacgaccgactcctaatgttggagaggagacatttccggtctatctcaagagggcacaaatgctcgcttttaatgcctcatgtccatcagatgctgcgacatcaactctgccagaacatgtcgaggcgatgcgatggtttcctctcgttactgatgagaagtagtatggctttcaatgtattatcttaaacatgtatgatatggaccggcatcgtgagtccttgttaaagtgtgcttttcattcttggtcacagtcagaaatgcttccagcttgtgattctggcgatgatgagtacccaaatctctccaagaagaaagagtagaaaaaggcaagtaaaaatggattcggaacggatcatggaagcctttttaagtcttataaagatatcaggttgcatacatacatctacacgatagcagagtttgtctcggcgtgacttccgtgagcttcagtagatgctatagtaacaacgataaatgtgtcgttcaatctctaccaccctcaaagagactgttgggtggcttgagcggaatgagcaattttttaacggcacggcttatgtgtagatcctcatacgacggtgatacaaacatcgacatctagtgagaatcttagaggaattaaacaaagagcttgcaatatcaactatacataacctcaaaagtatatctggtctatctccgggcaaccagcgggagttgattatatagcgcattggtatacagctgagcagtgatgaggaaaaatcttgacagaagttgaaggatgaccaacagccaaacccgatactgtaccaaaagatcaattggcttatctttactgcgataagtttcgtagcctcaaagcaaattcaagtcgctggagaacttccaggcgaacgcttagccatgaagaacaacgttgacaagaaataatgggcaaagcgataacaattcgaagaattcgctatcctcctcactgtcatcctctacttccccctctactccttcctcattcatcttggttgtcgccggcgatttatgctttgtctgacttggcaagtgtctgggattaaaccgggtgggttataccaaacatcagtagatacattcctgactgcacaaatttctcgtctagcccctctcaatattcatatgcactctacctgtcttatctttatgcctgagcaacgaaaagatgcaggcgctttggcgcttgtcctttcttcgaaattctctctttgtcttcctttctcttcattcctcaattcggatttggtccagacagatgaacgagacatctatatatacatatggttatgacaagagtttatttctcttttccatttgagcagatgctacatggacagaaaaagaagagaaccaaccgcaccgattagacctatctgattttaaggatgtaatccgtaacacgagcccacccccagcagcagtagtattggcatagcaatcatatagagatgtgaaaagatactttgacacctagcttgatacctactgtttcaaacaaacatataggtcatcctgattgaccttcttatgtcctcccatcttcgacagaacacccagtgccatcaacagcagttccgccctcttcctctctgagttccataactatatctctcttacccctgcctctccagatctctagagcgatctggttatccttctgattacaccaatcgagaacaccggctgcacaagcgataccagtactcatcgcgacagtgacgtgggccatcatcacgcctgtatcgccacaagcgaagacgccaggcatactcgtactgttgaaaggcggagtcgcggtgaggtagctcccgaaaggtgagttcgatgtctcaagctccaactggctaatcaaatccggaaccgagggctcagtaggaggtttatgggcaatccaccctaaatggatagacgacgttggattaggggttttgctagcacaaatgtcgttagcaagatgtatatgcacaccctccttgctgtctggaactagtttcaatactttgcgttggtcgacggttatgccgtaggcggcacaaatctcgagggcacttgcatggctgggttcatcagaagggctgagaggaccgttggtgaagaatgtcacttttgactttgggggtgacgttccacttccctttccggatggaggtatgacacgcgctctgtctggtggaagagagatgaagtgcgccgtggtgagtagcttgatcgtcatgggattgaagaccgggtatgctaagactcctgatggaagatgagatcgctcgtgaccgtcacaaaagaggcactggtagctgtaaagaaaaggtacaggtcattttctcaatttctttatcaaaagattgaacaagaggaaaggcaggcaaagaaaaacacaaacatgttttccccccaattatctgcgtatcctgcgagatctgggaagatatcgcggcatccggtggcaaaaaccaaagtgcgtcctctccaccgtcgtcctcccttgtcagcatcctcctcgacaacaaactcataattatctccagcctccttcttcaccttcgtgatcttgccctcgataaagtcggtatttccgtaacgctcgatctgctcgcgaccaatccttcgaatctcttccggatcggtgtgatcgcgagtcaaaattgcatgagcagcgtggctccgtgcgttgcggtattgcgagtttgagattacagcacaagtccggtgaactcaagcaaggccaagagcagtgctgagtcctgcggggccagagccgaggatgatagcatcgtatattttggaggctgtcatttccaagatggagagtgtctgaaggcaaggagcactatgtttgtatccgttgaaatctgtttcgaagtaacttggctaatagcgagaactatctggttttatgctgcctgagaaagcctatcggtggtaaacttcaaaagtgaggtagaacggaattgcgcgacgtcagtgtcatgtcaggaggtctattctgaggtcggcacagtcgttagtcacttggcgcagagactaacatcatgactgttacaaaccgaaattcgggacgatgagggcgtcagcttcgagtgtgaaggagagctgagaaagagagatgaagataggagagaactaagaatgcgattcgagtgatttatcgaacaagctagaggagaggaaggcgatggccaaaagagctcagacgaaatatagtgaataaacacatgaccttgactgagtagaccgtgtaaggggcggaggctgggttggtaacaaggttgcaaagtagtaaccacacaagacttttagatttcaagggaggagttcaagctctcgagacttggaaacaggattgatagggtcactaggaccaggacaagagagcaaggataaggacaaggataagaataagggaaggagtggaatcaacaaaaaattcaagactggggttttatctacaagtggtcagaagcctgtcttgcacctatttttcagaccctacaaacagtatgaaaggacgcgctggcattactgtgctctggcagtacaatgcgctagaattaggagcgggagaagtagtggaagtgaaggtgtagattatatgggttacggcttatcaatcaggcggaactcaggttacattcctgacagaccgacacacgcatgagactgtcctgaacccttgtcagaaatgtgacccgagtgtcacacccaggtaaccttcttctacttctgtttcttctcctgcctcgttattcctcatgatctctcattgcaacaacacgcaggtatatagtctggtagcgtaggtgcttctagcacttcctatgatatgttctcttacgcataatcgttggagtctgaggatgatatataagacgtgattcctttaccaccgatagtgtagtttctgaagcctgaatcctttgtcactctttggttccctagtactcttgttcccagtgtcatatcaatcttgtccttccaacctctctaccttgcgccctcgtcacagtcatcaagtcagagagcctgaacttccctcctgccggccacattgccgtctggttagacccctcgtaacctctccgttactctctaaacccggatcccgacatccttgacacaaggcttctaggtcacggggatcatgagacgcttattggaactagtcgctatcgagggaagttcttgcgcgagaattcagagttgcaggtctggaggaaacaaggacaacatttattggacagaaaggacagcttgtaaaaggtagtcaacaaacaaataccaatttgaagacccgcatcaaaagaaatgcgcaagcgctcctttcgtgtcatcatcaatcagaatgataatgaagcagagaattttcaagtgacagatcaccatgcagtcgcatcaagagaaatgaggataagttaggatcatctagtgcattaaatggaaaggaaaggcatgatgacatgggaaggcatgacgaattatagatcatgagaagcgtccaccacggtgcgtgcacatgttacctgatctttgacagtgttcgcacgtcgactcttttcttctcctgcttgcccttgttttccgtcgatcagctttgcaaatgttttgatgaatgcacatacaatgtacatgtacacacaaactcgacttgaatttgttttaggcagaagtcgcgggggaataaaagacaattggtgcttcagtcaaaaaaccggctttgtcttttaaggggaaccagtcgaaacgcatgcttcatggttaaacatccatcacaaaccaacactcagaacagaaagacactcatgttcgttagcattctcttcttctgctttcagtatccaaacatgtctctgcgatctgatcgatgtttgacgggtgttctttcccacgcctctcgatgtgatacagatgaacgtacgaagcccatggcaaaatatcgatctgagacacgctcaccgtctgttccaccgaactcagactgaactaccttgacgtggtagacatgtccttctttgttcagccgactggcccccagcccatcagagctaccgactcagatggatacccgtcctgtccctccgatcagtttagttccttcctaccttgtctatgcccgtaccggaaccccatcggttaaatcaccaacggaagaaggccgccctccagacccggcccgcagcaaacgctggtgaacgacgaccggtcgattacaccggcgatgtcggctccgaaggccatactccaactctgtctccggtatattacatcccggggtcactgacagcggccgcggttaccgctgtctgtctagcgtgtcttcccgaccaatcactcaccatccaccgtcttccgtctggcagaacgaatggcagaacgatcgtcatcaggccctcagacgtaggctcgactgcagcgcccgtcatgtccgatgaacttccttttagacttgtagcgttcgttgtctgaacgagagaggggcgacatatatagcaagtgagtctccttaggatacggctgaaagcttcttgttcctcacaactcctctctctctctctctctctgtctattcccggttgtccattctctttcaatctacgctttcctttcctgttcccaaaagatgcgacgtgcattgagtccccttctcttgggctctgtcggccttgctgcctctctctccgagatctgcacgacgtcgaacgtccaggctgcccttccagccgatggcttcatcgagggtgtcaccttcaatgcgtcctctgttactgcagctctcgtctacaacgagacctacaccggcgagaacaactttccggatgccacgatctcctactgcaacgttacctttgcctacagccatgccggtctgggtgacaacgtccaggttcagtactggctgccgtccaacttctcgaaccgatttttgaccaccggtggaggcggatatgccatcaactctgtcagcaccagtctcccggaggccgtgttctacggcgctgtcggcggtgcgaccgacggtggctttggcgggttcgacagcgagtttgacgctgtcttccctctccggaacggaacggccaacttccctgcgctctattcgtttgtgagtggagagcgctcagagcagtgtcggatcgtgtcagacagaagagctaatggccattgctttgacctttttctttttcctttttttcttttttttctttttttacgatcttgtttgacctcttcttttaccctttcactggcctttccttcgatcttacctgccacaggcctatgagtccatccacgagatgagtgtgtttggcctcgagttcaccaagcagatctatgagatcgggaacgacaccaaggtctacacttactatcacgcctgctccgagggcgggcgagaggggtggagtcaagtccagcggtacggcggccagtttgatggtgccgtcgttggcgctcccgccttccggttctccttccagcagttgaaccactttggagcgaactttgttcagcagacgcttgactactaccctccttcgtgcgagcttgacaagatcatcagcgagaccatcgctgcttgtgaccctctggacgggttcaccgacggtgtcgtcagccgatcggacctctgcaagctggacttcaacatgacatccctcatcggcaccgcttactcgtgcgaggagagcagcgcatcgtctgtccctctgagaaagaggcagatggtcacctcatcggccacgcctgcccagaacggatcgatcaccgcccagggtgtcgccgtcgtgcagaccatcatcgacggccttcatgacaccgatgggaacgccttctacttttcctatcagcccggcgcggacatctcgtttgatgctgcgaccgcctataactcgaccagcggcgagtgggggatctctgtttccggcgtcggtgccgagttctaccagcggttcctcaagctcgttgactctagcagtctggactcgatcgagggctacacgtacgacaccctgaaagcatggatgatcgagggttggtacaggtaccaggactcggttcacaccacgaaccctgacttgacagagttccaacaggccggcggcaagatcatccactaccatggcgaacaggacaactcgatcccgaccgcatcctccatccgatactgggactctgtccgacaggtcatgtatcccggtatgtcgttcaacgagtcgaccgctgccctcgccgagtggtaccagctgtaccttgtcccgggcgctgctcactgcgccccaaacacggccgagccgaacggtccgtggtgccagactgccctgggagtgatgatcgactgggtcgagagcgggatcgagccggtcactctgaacgcgacctacctggcgggcgactacatcggtcagaacgctcagatctgccaatggccgttgcgaccgatgtggtcgaacaacggaacgagcatggagtgcgagtatgaccagaggagcttggacgcctggttctacgactttaccgacagcttgaagcttcctttgtactagacaatgacgtttgctagcttttgtattgaaaaagagagaaggatcatgatataatgtggcacttttgttttgtacactcgtttgctggaatctagagtattcagtcaaacattctgtgtgaacatgcgtgtattttgtcggacaagtaatgaatcgaacagaagaaactgaagagattgtcatcaaaaagagacacatctctacaaacgtagagacggctgactgctggtctggacggcatcattattcagcccacgactgtaaccctaactcgccccgaggattcctcagttatctctccttactacgatcgcgcattcatccctaacctcatctcaacacttaatggtggcaccactgaacgccttcaccgaccatgcttgacgaacctcttccgatgtcgcttccggcgatccttgtcaatcccaaacctgcagctgtctcttatcctcgtctggattccagagcgtctggatcccggtcgatcaaaccgcttacatccaccaagcgagctcaaggtcggagggctcggctgagaaaggagaacggtaagtgttgtgcttcaggtgctcagtgttgttcttttctagtctggcaggtactgatcgtgttgcctgttctgtttgtctgtggaaacatatcgatgttcagactctctggctggcaatccccatgccgtcgctcctagccggcacgatcttccacttgctcctcagaggcttccgccaccgatattcccttcgcctctgcc

SEQ ID NO: 2935 - DNA, 1558 bp, Xanthophyllomyces dendrorhous
agctggaagaaggaggttaggcgagaggtgatcgtattttccggtcgaccgcaccagtcaaacgaaggcgggaggatcgtcgatgcttttctggttcccacacccgctcgagacagcccgtcgactccatatcagagtgccagtgggcgggccggacctctgccgctggacatggtgagcagatcgttcgaccatgacggtttctgtccggccatcgtagagcttgcaagaagcgaaggaagcctgacgtgggcgatagcggaaggtttcgaaaggttcgtcttgcacatcgcctctgcatgggtctcattcggtagtacctttttgacgtcatgacgaccattctatagatacgtcgtacactgtgtcgctcgataccacggccttgtgactttctccaagacatcaccttatggcactcgactgacatacatcctcgtccggccatcccgtgttccggccagatcatcggaccgcacggtcacagccggcactttggatactcctccgacaactgacatgtctagtgttggtggaagcggtacagacaccgatcgagcgctcttcacggatgggcagagcgagagcgaggtcgagactggatggggagggtgggattcggagaatgagcgactcgaagaggttgagacaagagcagaggaagagaaggctcgattattagcgcggcctaccggacttgtttccacggttccgaaaaccctcgagctggtctccctggcgaatcatcacgacctggaagctgatgtcgaatcttcagacgatgagtcggcctcgtctacgactgatgcacttgcgtcctctctggtgtctctggactttgtttcgacaccttcctctccatcaaccttgagtcatgactcgtattccagctcgatgtcccgtgtcatccgaccatcatctttgtcattcttgtcttctgccatagcggaggacgaagaggaggatgctgatcagactcttacctcgagtccatctttcgaaacttccgcacacgtggattcaccgacgatcgatcgtacgaaagaggatgcttcaccaggccctgtggacgatgaagaaggaagaggacgacacttgaatggaaagagcacacgtagtttttggcagtacgtgtacggctgaacaagtgtcaacagttctgtcagacggcgtgcatcagcatcaatatcggcatcagcagcatcagcatcagcatgaacatcaatatcaatatcattatccagcattagtgaaacagtagattgtcatcaagctcattatggaatattcctgaaggatatatgtctgtctgcttgtgaattcgagcttagcttgactcttcttatgagatgttggccagcataaggacatgccatcttgtaggtatggcgtgtctgagtctaccttcatcatcgacattagggcaggtaatctaacatgagcggcggactcaactatgtatcgagcgtgaaactagaaagaacaaaaaaaaaagagcagagaaaatatatataagaggagtaaaaaatctgagagaagattgtttgaacgtgagcag

SEQ ID NO: 2936 - DNA, 528 bp, Xanthophyllomyces dendrorhous
ccatcccatgcgagatacgagtacatgaatgacagaaggatggcaggaggatgagagaacgtaaatatgaatagaaacagtgacatcaagtcagccagtgcaaaattcctttccttgcacacccacaccttcccatcggcgcggtttctcgctcagtgacgccactcacccgatcttctctcctgcaccaaccgaaaaagacaggcccttcaacacaggaggcaagtccgctcgatatttcagcaccacatctcggaacgtgatagcacctgaatgtggccaactctcaggcggatcttccaaagtggatcgtgccgcttcgggtgacaggtcggcatagtaggctactctctctgcagtgttcatgtcctgttcgactgtgaagtagtatcaccaacaatgatacacgtagttcatccaggcacgtcagtcatgaccatgtctatccaaatcgacatgaggaccagaacataccttgagcaaagatactatgtgtccaatgaggtcagatcgacattccagtccctt

SEQ ID NO: 2937 - DNA, 662 bp, Xanthophyllomyces dendrorhous
cgttttgcctctcgcgaggatgctcggtagtagacagcagtgatgtagtacagcgagagcagtggtatgaagatcaaacccagataggggaaggctatcgagtgaagcgataaggccatcgaaccatcaggacatgctcagattcgagcccactgatcacatatacatccaagaagaaaagggagtaactcacagtagaagaccaaggcgatagtaccaaacacattcagactcatagtcaggaaagtgttcctgttgatacaaagaaagtgatgtctcagccatggcatacacctcatcacccatcattcgatcggcgcaatgatccatctacagtgataggaactcaacataccactgcatcggtagctgatcatccagcgtggttatatcttttgacaaccgactaatgattcggccgatctgatcgatgattcatgtcagcttgaacttgtaataccatatcgccagtggatgaaagaccgtgcttactggggtcgcatcgaaccacgagactggggtggccatgacgccatcataagccgagttgaacaagttgaaactggcattgatagccgatagatatctgtttgggatgatggatggatccccatgatcacagtcagccggatagatcagtcattcgcccacaaggacaaggt

SEQ ID NO: 2938 - DNA, 4871 bp, Xanthophyllomyces dendrorhous
  misc_feature (2222)..(2231): n is a, c, g, or t
ggaacgttccagcgactgtccgtcatacaaccggtcgttggtgtggccagtgtcgttgatcaagataccaagagatcaagtcccgatgaataatgcttacaagtcaagatagtgtatgccagaccgagctgtgggtagaaaccatggatgaagaggtcgatatgaggactttgatctgagaggaaacaatatgctgaaagaaagatagaacgcgaaccccagcatacaaccccatatctgagaggaggatcaggcgcagagagaaggattaagaagaggcatttcctgatcagtatgatgtcttcacatgtacaatcccgacacagcttgacgtacaatcactctgagaccatccaacgatagagctatcagaccactttccgaggaaaatggtgttcccaacgatggaagcctgagtggtcgcgacgagagatcgtcgagagaacagtcagacgagaaaaagagaggaagccgacacaaaacacctcaagagaacaggactctacagacctgagctaatatgaagcatgacatgacttcatcaatcagccatcgaagatagccatcatcagtaacagattcggatggtcaagaacacgccagctacgtgctacacagaatctcacagactcacaagcgagcgcccaccagacagatcccatactgtttatgtacctcgtataaactttcgaagataccgctccgaccgcacgctcttccttcatcgtcacaagcgcaccaggagcctgtgatttcgccaactcatcagccgtaccctcgttcgttcgaccttcaccggtttgtttctcgagctcgtcctctatcgcaaccttcttgagctcgatatcctcttgcgtctcgatgagccctgcagaatctatgtctaaatccggatcagtcacggtctcagaactaccatcatgcgcaaccgacatgtgctctgccatgagttttgcaagcgccccgcttgttgcgagtagctcttgatacgtccctttctcagcgattttaccatcgaccatcttccagagcagcattcgagccaaacggacgccgataagagagggagtaagcaaaaacgcgagaccgaaagacatcgtcatcgtcagaaacgctcattccgtaactcggcctcactcctggtcatacatagagacaggcaatatactcaccgtgatgataagatcagctttcgaaagcacctccaggtgatgggtgatcaagatccgagttttagtccgcaacggtccgttgacgaggccgtcaactagcgacttgcttacatgagcatcaactgtgacacacggaaacgtatgataaaacgtatgcaaaggcagcgagtttcagccagagaaggacggtctgcaatcgcttggacggagtataggccatcagcattggactcaccggcagatagctgcaggcgggaaggttgtttgtatcagagcaaagccggatatatggcgagcacgttcgaacatcaccgaaaaaatgagataaggcaaagaccccccatgatacgtctcagtcaacatctctcgcctacattgagcaaacagatgacttgagaaggaagcacgtaccggatcatcgaagaaattgatctcgttgccacagtacacagctcgggctagacacactcgggcctgagcggatgagtcgatgcgatttaggaagaagataagatagagagtgcattggtcttgtaagcaaatcaacccaccaactgtatcgaaataactaggaatctgtcgatgagatatcatcctctgcgcctatcgctcagactcaccttctgtccaccggatatgttgattcctttttctacaagattcaatcgtgatgtccaccagcaacatacatgacacaaccgatccaaacaagatggacgtcagcacactgccggtctagtacactagcgtgcccccaagagcatgagttacctccgatctcggtgtagatcccatggttgagcatcgcaatatctctctccacttttgaccgtgcgcagatggaacacatggtgagaatgatgaccacgtaacagaaacgtacagaaccaacgatcagagctgttaaatctgccatcgagccgacatcgttcctgatgaactgtactcacaggcacaggccttgacagcagcgtcgaaacgcttatcgtccatctctgagccaaaaaggatgttctctttgagagtcgcatttctgatcagacgttgatnnnnnnnnnnaacggccatggcaatatccaacgagaaagtgcaagaaaaaagaggtggtgagtctgcatggacagtttctacagcgaccagacgtatccgtttcactcagtctgaccactgggtagacacatcactcacaatatccaaggcgattgaggaactagttgcgcccgttcagatagtatgacagtatccgaagatacaacagaatgaaacagaacataccccggaagaagcgtctcttgtcagtggctgtctcaagcactcgccaggggtaagacagaccaggaatgtcatctcgacacgttgaacgataacagtgcagacgtacagtaagcggaagtgcctccgagatactacgtgcagtagacaggcagacccatgtgtatccccactaagtcagtcacacagtcacaaaaaagggacataaagaatcggtctacttacagcttcacccgacacaagcttcatctctccgagcagcgcctgcatcaaactagacttgccagacccgacccgaccgcagaccacgacaaagctgcctcgagggatatcaagatcgatgtccttcaatgcgaatggaacgacagggggtgcattcaatcgctccagcctctttctctttcgctcctccttctctgccgccttttctttctttgacttctttggtggcttgccctttcccatcggcccgccctttcctggagtcaccctaacaggctcatcgcttggcttctcggcactctcccaagagtagcttccatgagcagagacagcctagatgaacacaaatagtacacgttgcaacgattcagtcggtgcacaggcaaggctttgtcacatgcaacacacccggcctatcagaaagccactcacatattccgcatcaggatatacaggtactgggttatcgatctcgtctcccaaaaggcataaggacactctaccgagtccgacatatgcatctgagaccgcctgaatagcaagcggaatgagttgcagcggttgccggatgttgttgaacaactggagggcggtgaagatgattgccgcgttcagatcatggccagagagcgaatatgtgatctgtattgaaagatgacatatgcgtttgtcgtatcagcagcagatctcagtagctcatctcattcagtcgacgactcacgaatgacaacaccgcggcaaagacaggaatgaacgccatgacagcactcattatagctagccggtccgaatataagtggtcagatctactggtcagcatgacacaatcgcttctctgaggtcttcttccgtcactttcgaatcctagtcgacaggagcacaccaagcgcaacatacctcgcatcaaacagttcttctttagttcttccatctcgtcttgtcgatagtccgagatccgactgccaaagtattcttcgtaggccatgaacttgatgactcggatgcccgagaggatctcctgcagcaacctaactcgagagtcgacgatcttcatttgccgttgtcgagttccaatcattcgcgagaagagccacgcttggaagggtatcccgatgacaagcaccgcaaagcctacaagggccgagtacccgatagtgtgcagcaggatgataagtctgtgacgtgtttgacaaagagaagcatgtcggtcaggctgataaactacaatggaacggtatgggtatcggatgaaacgcaagacacacatacccgacaatgacctgcgcaggttggagatagagctcatgggtgagaagggcagcataatccatgaatgaggcatcggacgagatgtgcgtgacgagctttccattggtatgcaccattctggcttctccggacagccgaacggactttcttgagacgaccgagatgaccgctgctcggagcatgaacctgaaagcgaatggagatgtaagccggtgtgtgagtctatcagaaggcttggtctttgttctgagaactgtgtcagatgctgaaggttcacctacccagtgatcaaccctctctgaagaaacatattcatgaacagactagaaacctgctgcatgaggtagagcgcaaagcttatcccgatcccatagcccacagacttcggtacggacaccgtttctccagtttctcgatgcgagtattcgtacgactcggtgatgtagttcaagatcatccgtgataccaaaggagaagtcgacgttaaggcgatccaacacactccaagcattcccccggtccagaacctgtacatgtgttcatagaaacaaatcacaccaagatcaacacagccataataaggagctcaacaactccgaaagtctgacacgtacctccacatcactgttctgtgtattgccagcagcaaattttgatcatagatctttccatcctcctcgattttctccggatgcgtccgctctttctcgtcatcgtcatctgtcttcttcctcttgctagtctttccagtcttacccaacttgacttgttttcctgtaagctcgtcttccacatccacgccttctccagactccacatcctttaactccattcctgtaggcttcttgtcagtcacgtcccgtttagtggcagggccagttgacgagggtcgtagatgttggggtcgtcgactcggaggaacacgtccatagaagt

SEQ ID NO: 2939 - DNA, 2746 bp, Xanthophyllomyces dendrorhous
tttctcgagctctatagccagtcgagttgctttgaactcgtcggtgagctccctgttgggaaacaaatgaagaaaagagtggccagtgagcatcactcgatcgagttctcaagacatacatcgtcatgtcagcagacgacttcgaacgactgaaacacgctgcctcaccagaaatcatcaatctcgaactataccccaggtcatagagcaatcagtcagacagagcagtcttccatggttatgcaactcaacaagggactcacaggtctcgaaacaccgacctattgagagaagcaagatcacgtcatccagtcagtataccccacgtatatgacaagccataacaagcgatgacaagccatgagaacctgacggagacctactcgtagtaaaggagtcaaccatgagaacagaacccaagaaaagaagttgacatggttctgagggatctctttcccttctgcgaaccctgccggtcgaggtttgatcttgaaaccaagaaagctctgttgggcgacttcggaaatttcgcctctctcggctttgtccgaagttccctgggtcgcactcttgccaggcgacatgatcgatagaaaattgagcagacagagaagcaagcagacgtctatggatctgtttcagtgaagtcgggtctaactgacaaagctgaatcgaaagaccaccgggaatgatgagtgttggttgccacaacgaagaacaagaccgatcagatacgtagagtcgagtttggactgacatctgcggcccggtcgtaatctgatttgatcttgctgtcgtgaccgcgtggacacttcagtatgagcactagtttatcttgacctcatctaacgttgtaccgcagctatcagtctcgtgttcaacatctccatatgcgcaagctgattcatcatataatattctatgtcctcttcagtccaagctcgccagaatctctccctctatcgtccatccgccctcgggcacggtgaccacgccagctttggtcagtgtcctatcagtaccggtgggataaaagaacagcatgaagtgtatcagtcctcgaacgagctatgtgagacgttgaatgagaatcaaacatagataactgactcgagagtggtgaggatcatgcttttgtccatgccttcgagcttcgagaagtaggagaccgtctgaagccaagcctcgacatcggttctgagttgttcaagatgtatacaagcgaaacggtcgtcagtcgttgcatcatccgtctcgcacccatcgcctgcagcgctgcccggcctctcgatcgagtggtaggaaacgacagacctgggatacccaaactccttctcgaccaagtcgccactcttcttcttccggctcgtctcagagtcaaactcgttcaccttggcctccagcctgtgcaagatctctcggacttgactcttggacaccgcagaggcaagcgtcggggcagatgcagcgatggcccacgagggccatggtgttggcaccgagccgatgaagcggacctcggacaggtatggcttggtagtaaaatgctcccacatctgaccatgccggacacacacaaatatatgcaagaaagacaaaatccaaggagtggagcaagtcgagatcagtggccactactactgagcagtaagacacataagacaagtcctgcgcgaacatacaaagtaagcggtcgacccgtcgttgacggactggcggagtctctcgaaggacccgttcactggaaggggtgtttccggccagcacagtgcatcagccttaaatatgaacggaggatgtgcaaacacgcacaaacaagcagagacacttatcacatacccacaaagtccattgcttcaggtcgaccttcgtcgtccacccagccctgctggtcggccatgacttgcgccatgacctagagagacaacagttacacaccgcacatcagcacgtgtgtcgctggcgtgaagaccaagtgatagctacggtacttacttgagaaccacttccaatccgagacactccacacttctgtcccctcaggtcggctatcgagttgaactgggtgtccagtccagtgatcacagccctggaacatacggcagaaaagtacgggtaagagcatgttcaccgacaggcgtctagtccggaagcagagaagcatctaactgaccagttgagaggagagctgacgtagctgccgatcatcttgtaggccttggatccgttgacgatgcctgcgatcagactctccgtcaacgcgctacacacattcaaaccgagaggcagcatgtcacatgtcagagctgaggagatacaggcggatggttccatacagatagactgacattgaaatatcgatctcgttggctgtgagtcgagagatcatttctccagttccggctggacacttgaccagggtgaacgtctgaccgccatcttccttagctagctcaagcagaggggtactgcaatggacatggcagggcgatgaaggggagaaaagaaggacaaatcagatgctgacggaggagacgttcgaacagtttgaataagacgagcaaagatcgcttttacctaaaatgctctgggacatatccgattcggagagaagtcatgttggttatgtgatgaagatgagagaagaaatgatgaacagacgacaaaacagaataagctgattgagcattaaccctaacctttgtgatgatcagatatgtcaaacaaaaaaagtggagattgtaag

SEQ ID NO: 2940 - DNA, 1806 bp, Xanthophyllomyces dendrorhous
accatgctaagattgcgctctgccaactgagctaaatccccttgtattgaaaatgagagtgatgcttccatataatgaactcagcagcgttagatgttttgaagaatattactgaaataaaagggtgaaaatggctttttcgttctggcacttgttcccaatcaagtttcactggtttcccaaaccatatacacaccacccaggtgtttcagtaaaatggattgagaaaccaggataacagaagggaaacccgctagaaaatttatagctcttcggagagagaggcttgggactccgcgcaaacggaagtcggaaggtgatgcctcaagaagaaataacaaattgcaaccgaaataatgtcaagactgctgaaatttcaacaccaatcaagttctcaccggtctcccaaagccatatgtatactgcaagaagcatggtgagagttacctcagccgatggtgatcgatacatggtccttttggacttgggtgtccttagaccataaaccaccaagatccccatgggttatgggttcaatttgtgcctgcctcagcctcagcgatcagcgtaacagcagtggtgtcaagcaccagcattcttgctccttcgttcttttcctggtgaagggcaaggtgcatcatgttgcgtgatgtgtttaaatcactgtttcaccaagtctgagagcatgtatagcgcacagtgagcaatcgacacatgatcttgaggcacacaacacacatcacttactcggcagacgctgcgacactccttgatcgcccacactttgctcctttcagagaactcgccatggcacttcgagcacaccctcgatgtccgaaactcccagattttgcggacctaaagcaactgaaaggccctcagcttgggatgcatcatcttcgcaggaccaggagcatgcccacgagaagacgacgagaaggctccgtcgccgaaggccaggaaggtgcgtggacgtcctgccgacagacggagcgccaccttgtggtacgcttgatcgcggctgatgtgtgcgccccagcgaagacatctccaccgtcgagcagcgaagaatgtcgcgagccaggagtaggactgagagtgtatgacgagagcagcacgaagaccatcgagactgtcagatatgaacgaaggaagatctggagaaagacaccgaggtggtcaaggcagttgcaaggtcagtaatgctatctatacagttagctcaaacgtgagcgtggacgtaagcggtactcatcacggagagtggtttacactttcggatggttcttcatccacagccgctgtttccgagcgtctcggtccatccctgcaaggtgcttccatgacttcagagagagcgaccactgcgtgccgtgctcggccagaccgccgttgtccagagacatgtcgagccctcctgcggtcgtcatgagtaacgtccggcggcctgagtcgaaacctacgacctcgtcctctggccgcacacccacggaacatactctgctcggtgacgatccttgcctctgccctcccatctccatccgtagtcgtcgatgccagatggaggcgacgtcggtttcagcattctggcagacacaccgatgccgaccgtactaggcgaccgggcgaaccaccgccatctggtctcgactttggatacataaaacgaccgcctccaccaagtgtctgagtcagcccgaaagaacttctgcgttaccccgcgcacatgtcccatttttgcatcttccaatctgagctgacatcaaaggttgtaaagaatcatggcatctacaaagacgtaggacg

SEQ ID NO: 2941 - DNA, 632 bp, Xanthophyllomyces dendrorhous
tctacaaagacgtaggacgaccggtgagatgagaggggcaggagtgacgatgaattaaactaaaggttaaacaagttaattcgggctcggcgaaattcagtcgtctaattaacctttatcagtcggtcagtcatcgatatcggtcccgtcggtaacgaccttggcgttgatctttgcctgaccgaacgatagcgttgctgactgagcaccatctttgcttactgatacctcatcgatttcgataactatctgctgtctactctttgttctttctgctgagtgagcatgtcggattgttaaagattgctcatcagcgacagtctataagaatgaggagggtagctttaagaaacggctccatttgattctcactctcatccgctcacacacacacacatctctatcactgaacctctcttgaaaatcccatagcactacttttcattctatacactaatctggatacgtctttcgttatgtcgtctcctgacagttcgactcgtcaccccaccgctgaatcagaagcggcgcaggtggtaacatcacctgctccctccctgagtaataccgtgattggtctcaatggagctcctgagaaacatgacaaaacaccacttccagtggaggagccc

SEQ ID NO: 2942 - DNA, 679 bp, Xanthophyllomyces dendrorhous
ttcaaaaggttgtagagaaccccggtgtccagaaaagcggaggacgatcggttgaaccaggccggcaggggcaagaataagatcaaaccaagatgagcaggagttgatccgggcttggcgagattcagatgtctggtaaagttatattagtcgatcagtcactgaattcgatcttgtcagcaacgactatagtgctgacctcgacctgaccgaatactgttgctgctgactgagcaccatcattgcttactggtgccgcgatgcttactgataacacatcgattttgattatcgatcactatctgctatctactcttatttcttattctgctgagtgagcatgtcgggctgttcaagactgctcatcatcgacggtctataagaacgaggagggtagcttctaaaacggctccatttgaatctcactctcatctgcatacacacatctctatcactaaacctctcttcgacaaacccctagcactacttgcatttcatatactcactagacacatccttccttatgtcgtctcctgatagttcgactcgtctctctcccactgaatcagtaccgacgcaggtgataccatcgcccgttccttcattaagtgacaccgtgattggtctcaatggagctcccgagaaacatgacaaaacatcacttccagtggaggagccc

SEQ ID NO: 2943 - DNA, 1510 bp, Xanthophyllomyces dendrorhous
cacttccagtggaggagcccttgaaccagcagaaggttgaagccgaaaggccaatgaagctctctcagagaaagaaatggtcgttactggctgtgttttcgctaggcttctttgtggacgtgtggtcatacagtgctttcttcatcttcaccggtccgatatcggagtcgctcgatattctattcgaacaacagacctgggtgatcaccagttatgccgtcaccttcgcggctttcctgctcttgtggggacgggtgtctgatctttggtctgcaaagccagtgttctcgtatgggtaggtctggctttctcgtctctcttccggatgtagataacccatcaatctcagagactgactgtatcacgcgcgttccatctttcatcctcctagattcatcgttctgggcatcctcgacctcatcatctccttcctacccgacaagtactctttctttgtccttcgagctatctctggtatcgccggcgcgactctgatcccggcgtcgttccggctgatcgtcgctgttttcgaaccgcacgagctcggcaaggcttttactctttacggaatgtctggtgctctagccaacacgactggtatcatcatcgccggctttgtggagtacatcccgaacggtggccagggtgaggcgtggaggtggttcttccgtatactcgccattctgatcatgcccttcgccatcgggtcgctctactttatccctaccccgaagggtgcgatcgcccaagcggatgacaagtggaagcggctcgacattgtcggtactttcagcatgctcgccggcatcgtcctcctcatcctcggtctcacccttggggcgtcgtacggatggaagaaggccggcttcctcgcgccgttcctgattgcctgggtgttgatcgtgtttttcttcttctgggaggccagactatcggatgagtgcgcgatcttgccgtccaagacgtggaggatcccgaactttgccgtgcttatcactctgggtctgttcatctacggctggtggtccgtcaactttctgccctttgtcgagatctttgtccgggttcacaacgagagagcgatcatcgcggccgtccggatgttgccacaagggatcgcggctggggtggtgaccgtggtgctgacgctgtatccgaagcttacgtcgaacccgagatggccgatctcggtcggtctgatcggcggagctatcggtctcatcctgttcacccagtccgagggagacgtcgtcggctctggctactggcgatgggtgttcaccggcggtgccatcggaagttcgggcgtgatgatcgcattcacgggtacgaatgtcggggtcatgacatccgttcctcccgagatggcgggtgtggccggtgcggtgctgcaggtgtcgctccaggtcggctcggctgtcgcgctctccatccagagcggtctgttgacgatcaacccggggaacttggagaacttttcgaacgtcaaggcttcctggtactttgagct

SEQ ID NO: 2944 - DNA, 972 bp, Xanthophyllomyces dendrorhous
gcttcctggtactttgagcttggctggacgctactctggctcgttggtttcttggtcttttatcgacctggcaagagacctgtaagttcggcggaggatggagccgagcagggagagagacctatcatggcgcattagatgtgataggacagagtgtgtatatacagtgcttgatagactattagtagtatatatgtacgatttaatccttgtgatccgagcactattaagcaatttgatctagacttgttcagtaacggtgtcgtttgactaacttcgatcacgaaatatttacgccaagagaaatgaccgttgaacggatgaaagtctgctagggttttggcagtcttgagacggtctcgaccattatcagagatatcctttttcaggcgataccttcagatctcgctcaaagtctgaagaacttctctccgaagggctttacaatatcgcctagcactcctctttccttgtagtattttcattgtttatttgtatcttctgcgctaaaatagctaggtgatgcaatctggggtttagagtaataaaagggagcacttggtgggggttttctagagtagtctcacagacaacgatgtaatcctagtttccgaatgcgtcaatgatgtttctctggttcttctggatcgaattcctcaaataactgatgctataacgctctgatcctgaatctaattctccagttctctagttctctcaaacaattgtgcacacacacagtgagcaagttgattgagagaaccagaaagaaaaaggaaaaagaaaataaactagctactgtatatacgagatcaccaagatggaaataaactagaatggaaataaacgagacggaagtgaaataaagatgatatagaaatgaaataacatgttgaacgagaaaccgagaaaatagaaagtgaaccaacgcgcaacactcgacggttggtgtctagactgctatatccaata

SEQ ID NO: 2945 - DNA, 5425 bp, Xanthophyllomyces dendrorhous
agactgctatatccaatatagagtaccattgaaatcctcaatgtcaatgtgtttcaaagtggaagattgatcgttcaacttgcgtttgtgccaaaaatcggtcatactctggataaataaactttatacaaactcataagaatggacattttaaaaagatcgtatagtatagtggttagtacttccgcttgtggtgcatcagccgaaacgcaatatcgcggacgacgggtgttcaattcaccctacggtcaattttttctaactcagtcaatttctttttgtcaagattttaatggaaaacgtgataaaatgagatagtacaaactatcagagtatttgggacatcgtttgaaccctcaaaacaaactttagacttggaacaatgtaaactcttgatgatgtatgtgaaacgtgatgtaaaaacattgtaaaataaaaagctgatgaagacgagattcgaactcgcgccacgaatgactgcgaaacaaggctgaaaacctgaacacagcgccttagaccactcggccacttcaccttttcttatattcctgaaagcgttgtttcttatatcaaggacttataccacaagcgccaattttttaaaatttattttatctcgagttcaaccatcatcattctgggttaacaacctccaaagatcaaaagtggcggtctaaagaatagcgtaacacggcagaaaagaaggcagtgtgtattacttcaagggccgcgaatcaacatgaattatcactgcattcaaccttatggctcttctccccggttgtcctttgcctttgaccaagggctcggacgacaagcatttcaaatttagccaggttgttcccttcagcgttcatctcaatatccaagccttggagtgttaaaatctcaccccttcgagacagatcagattcattctgtaagctcgttgttcaggtttgaacgaagtcattcaaacctctagggatactgccactgacatcggctctcgtctccttccgatcaatgatagcaacgataccgttctgcccctccacaacacctacgccggatgcgagtactcagccgacggcttttgctcattcgataccgtgttgaccgcgctcaaggctagaattgacgagatcgattacgaccacgtctgatatggaaatcagtaaaaacctttcgtcactttctcccatagaaggcgttgcgttaggtaacaataaacctggattaaccatctgtctgcactattctcctacagcactgttaaggctggtgtgaactacaacggtcttgctccatatccgtaaagatgggttgtctgttaacggagatttatatgactcattttatcatcatctgactatattcataaaactggatattgtgtatcaaactctacttttggattaatattcattgttataaacaacatctggcacaattgagccaacgagtctgaacaaagaggaatataatctagcaagtcaaatattcgaggatctgctaaattgagcctgtgtacacgggtgattcagaacgacagcaagaccgttggttgactcaactatcttgatattcatgttatgtaccttacaccagagttccggatgaagacatgagattgcttgcatgcgacctgctcagatatatcatctatgtctcttcgtatctctattccatcgcctgatggtctccctgtctgctcatgttcgtcttaggggagcgtgtcgagaactcatcgctctctctggtctctctgctctaccttagactgacaccgctgctgaggatgatgtctagactgaagctgctctatcgatggggtgactttaacccatggccggtgggatcctagtggtctgtgggctgaggtcctccaagtccaagaggggcatgtatcgaccatcatcggttaagatcactctcaccatgactaagctataccaaccaaaataatgtatttactccttatccgaaacaacttagtgatacaatcgaattgttaaccgcagccgcgacatagttcatttgattgtttttccgactcacacggataaacaaatggcaaaccctccgactccctcacatgtgtcttttaggtagcataccaacgactctacaggttgattgcagcggcggaagacgttgtttatcgagtgatacgagtagtgtgaagcagtggtatatttcaaggatcttctataaattatacgacttacgaacggagggacggactggccggctatgacgccaagagactgaccgattgatcgatcgaccgatcgaccgaccgaccgaccgactgaccgaccgactgacagatcaatctattgcttggctgacagattgcctcttcgatatagaactacatagattcttgttttcgggaacagatgaatgggttgcattcgtttacaaatagatgtacagcaaagagtccgggatgaaaggacatctttcacagggcacccgattccttttgtcttatccgtctctttgatcgatttcattgtcccttaagaaatcgtccctttctcgatgagcgtcgggagagctggctgaggatcattgctcggagccgactgatcactcagcttccgagtgtctttctagtgggctgtccggtattgatcaaaattactatttcagttgtctcggtctgttcaaactgatatcatcatccgttgagagttctccggaatgcttcccgtaggaaatttggggaagacttttgagttcagtctcggatcaacttttctccctcctcgtcctccgttttgtctttttctcacttctgccccatcgatccttgtgttccatatttctgaacgcatcagggtccactcaactataacttcatagacatgcgtccttcctcaactttgtataccctggccaccggctcgatatgtttgttcttctatgtctggggtatgttctctgaggcggatcaatctgtcggtctctcttttagggacgagctcatccagagtatccgcggccatgaccagggaacgacatggagtagtatctatgtgatcaacatggccacccgcccaggtatgtctagctgtttccttgtctgtgtccgttctcttctctattcactttgcatccggactgatcgttgacaagctattgttacctgacgcttcctgcagaccggaaagagcatatggaactgatcgctcatgctctagagctcaactttacctatatcgatgccgttctcaaagactcaccggtggtccactggatcatggaacgtatgcgggaagagcttgtcgtgaaagatctgaccagggaaggcgcctactccccaatgcagcaaagcatggcggacagactttgggatggcaagacctggtaggtccttttgtcttgcgttgcttatatttatcttctcaaatggacagatctgtctgatcggctgaacccatcgttgaatgcgcacacatcttaacaggagagagtatgtgctctcatctttcgatagcaacagcacagagtttcttctcgagggaacgaacccggacgtgcagtttgattatccgctctggccacctggtgaggcttgcgtcagtttgtggtctcaggcttctggctgctctggactgaccgatggccacctttcttgtcgacgttcatgttgatctagaggccccactggcgtgctacctttcccatctcaagacctggcacactgccctcaagaatgacgacgatgatatcctgatcctggaggacgacattgatgccgagttctcgctcgtcgaacggtggagggagatgactcgctctcttgccgaagaggctgagggctgggatatagtgtacgtcttggcgactgttgcagatgcgtccgccgcccatccgtccttgctagggtttgcttactggttcctctgtcgaacacctaatcctataggtaccttggatggatcctcggacaggaacgagtgaacaaacctaccttccaccccggcctgcgcaaatcaaaccatccgatgggaacccatgcgtactcgctctcccgccgtggtctccgccgactaaatggcctcgtccacgacttgcccaatctgttctcggcgccagttgaccacgagcttccgttcaagtatgtagcccagcactacaacatgggcactcttcagagcttttctgcaacgcccgcgatcatcattcccttttccgagttgggtacggacatcggaggatgcgcctcgaaagactggggaggcatgtaagtgaccttcagacttatacaacctcatctctactgtagacatcaatatggtctcattgcctctccttctatgatgcactcatctgacatccggtgttttctttttgcacgatagtctggccgactccactgtagagagaatagcagcgtgcaaaggccatcctctccccaagaagaacccagtagacatctggatgatgcaaagtgtggaagacatgtgatgtgtgttagtcacttattcatcccttcctctctttctctctctgtttcttctctcttcgaagggtttcgtggccggcccaaagtagccttatagttcattcttccttcgatttttctcttcttcttcaattctttcgctgcccttgttgctctttcttacaatcaagcgaactagaatattttgaatgaagccttacgtaaactgtcttatgaatcaaagcagttcatgaaaaaaataaaaataaaaatcgtttggtcgggtagactgtactgatttgaattactatcggaaatagttctgggcgttgcatttgggtgaaacgtcatgaatctcatttagttccggatcatcttttgttaagaatcacagccatgcttgccacgtggacggagagagctgagtgatcggccgtatggatgaacaccgccgagatcagctgcgcgcggctgataaagtgactgatctctatcaaaatgctctcacccttgtctcttcgaatattgatctctctccatctgtttctttgtttgatggtttcttcatctgttcgtgttcaccacaggatggttcgttaaacaacaattctgctctctgcttgctctgagacttggtcgaacagatatgccatcgcgtctcgcgacatgctctgcctggccctgcaccaggaggagaacgagggggcttggatactggtccttgacacggttgacaccgctgacgccgccgctctggctgcagatgctaatggacatggcgattgaaagaggataaaaattaatcgactggtctagccatgaaggtttttctgcgaaaggtttttacatcctctttgtcttcacggatatcttctggttgtcgtcctttcttaacttcctcatatttagggtcttagattcatagatagttcttttagcaaggtctggttgtagcgagcagaaagaagaaagaaagaggaccgacag

SEQ ID NO: 2946 - DNA, 2698 bp, Xanthophyllomyces dendrorhous
gcttcctggtactttgagctcggctggacgctgctctggctcgtcggtttctcggttctctatcgacctaggaagagacctgtgagttcggcggaggatggagccgagcagggagagagacctattatggcacactagatgtggttagagcgtaggatatgcttagtgtgattgagcggtagatagatcatcaaagtgtatacataaatacgacagagttaggtatcaagattgtattattatgtaaacgtgttttgtatcaatcttgcttttcgatgaatgtctttagttggccatatctttttcttcctcttggatcttgtcagcgaggcagcacaacgagatctcacagactctctcactctcactctcagagatatgttgggcaagtcattcggatatgcatttactaattgaacacgttgctcaaggtacatttgttgcagaggcaacacccaaatctggaaacccattccaagggacgagcgatatccaattaggttatgagcccggaatccagtcgctcagatcgtatccgacatcaggaagttggatctgacgtgaacgactcgatgccgggctcatagcctattggatatcgaatgtttccttgggagggttgagtctagctttgagcaaggacgctcaacccgatgtgttcagcagatgggatgaaagagaaagcaaggtagggttagcgaaattgactgtgtttatttttatttttaatagtgtaagattgatgaaaaagaacgtcacggccgcccctccgtttccgtgacaacaagaggagggcaaggagaaaattaacgaggtactatgcgtgattgagacaagttgttcacgcgagccagtcacgggctaacacgacttaatgtttgatagatagtatctttttttgaagcacactcaacaagatcgtatagtatagtggttagtacttccgcttgtggttcctcaatcgaaacgcaaaagtcgcggacgacgggtgttcaattcaccctacggtcaaatcttttaaatttttctttttctttttgtggaaaggcatctttcttctttctcttagacgtatatatacatgtctattagaatgatgtttgaaggggatttttttttcttccctggattgattttcattgttgttcttatcagtgtacgctcgcacgcacacgcatggtatgtttcattatagtagaatacatatatatatatatatatatgtgtgtgtgtgtgtgtgtgtatcactgtcggataaaagccaaggaaaagaaggatcattggggctctctttctgaccgtggacagagtatccagccttgtgctgtcaacccgacacgacctccgagagtgacggtgctgacgagagcgcgatcgagtctgatggatccttcgacgagggtccgtctgccggagggcgggcggtgaccttcgaggaagctgtaccgggtctttccgttcgctggtgtcaagggtgtgagggagagggcgaacgtgaggctgtaaaggacaacagagggaaaaaagagagagagagagagacagagagtagattgacgataaagtaaagtcaataaagtgagggcaggaaagaagaagaagaaagaaagaaacagacgaacgccaaggcgagggatgcgcaaccagaggatgtttcgtggtggccagtctgagtgaacgccttggctgtggtgaggacgtcccgtttcttcccgaccgagccaatcttgaggccagcccagaagacgacggtgagttttcggatgtctaccgatgtagaggctgtgtgatcgatggtaaactcgcgggcgagaccggcgatctgctcggggtcgagatcgagctggtcgagatcggtttggaatgggagttgaacgaagagataggtttggatgggcgtgtcgacggacgaggcgcttgttattgtgatggaggtcgaggtgagtgatcgaatggaggtcaagtctgcatacgggctggtgaccgtgtagggcaagaggtcggcttggacgaggatgatggggtccgacggattgaacgggcgagacacttggagacggacgggactggtatctccggtgtgctcgtgtgggacttgggtgatggttggatctgtgggacgaagggcgcctctgttgaggagtctgtttgtgggtgggtagtggtgtgaagggcggacgtgaataggagagggagagggagagagagagagagagagagagattatgtgtgagtgtgtagtgtcagatgtaagagttgaatgagcacagagagagagagagagagcaaagaaagatggctttacgaccaacaggctgctatcgacagggctggaccaggatgtcgtaccggctggtgatggaaagggatgcggttggtcaagaacggcccttgatgagagggagggtaggcaaagaacaaggcaaagaacaaggcaaagagccaaagcaacgagacgtacggtgtgtttatagaagggttggatccggaagctgcttggcgtgagggcctgtgcgaatacgatgtcatccaggttgagctctggggacggggtggaaggtacggatgagggtacgacaagacatggtgtttaggggaagggtgcacacggagggagaagagaaagtagaagagaagaaagaaaaaggaaacccctctggagagaaggaccttgtggctgtcggaccttgagagatgg

SEQ ID NO: 2947 - DNA, 1133 bp, Xanthophyllomyces dendrorhous
ggtgtaggagagggtgagggcgagggcgagggcgagagcgagggtgaggctgagggtgagtatgagaatgagaatgaaggggtgagagtgtgagcgaacgggttgaggatatcgtactcgacgaaaggcactgtgggcaatggttgtctgtgtgggaagggagggagtaagagagcgtctgggtagggaaagaatggcatgggagaggagtatgtgagcagaaacaagacgaggatgatgatgatggatgtgatgtgatgtagtaagggaagggaggggaaagaatggaaagggaagggaaagaatggaaaatgaaattcgccggtgtgtttacaaccggccttgtccgtttgtgaggacgctctttgtacggtgggtcttctagagagtgtgtgtttctgtagtgagtttttgtagtgattctgtagtgattctgtattaaaccaccactctgatgttttctctgtatgtgtgtgtgcgtgtgtgttgacctgtgtgatgggttgtatgtagtgctttgtggcctgtatgtagtgtgatctgtgtgtgtgtgttctgtagtactctctgacacgctttctaacacgctttctaatacgctttctaatacgctttctaatacgctttctaatacgctttctaatacgctttctaatacactctctaatacactctctagcacagtgcctgatacactctctatcatctcttagggttatcctccctctctctctctttcttgcctctgtgttgtgtgcattctattgactgggtgtgttgtagtgtgtagtctgcatagtgcatagggcatagggcatagggcatagggcatagggcatagggcatagggcatagggcatagggcatagggcatagggcatagggcatagggcatagtatgtattacctattacctattacctattacctattgcccatcacctatcaatcactccgtactgaacacagccaactctatacagccaactctatagagtcttccgtatgcaatcgatcaaacggcctctgatctctctatgctttgttccctctgttccctctcgccccccgccttgtgtgtgtgtgtgtgtgtgtgtgtgtgtgtgtgtgtgtgtgtgtgtgtgtgtgtgtgt

SEQ ID NO: 2948 - DNA, 2954 bp, Xanthophyllomyces dendrorhous
aggctcacgcgacatttaactgacccgatcaacttctatgggactcgtctccggacgtcaagtccctggtcatcaacattcagcctccacatcatccaccaactcccaaccgcctcaacaccctcttcccagtctttccaacggttccgtcagctccaacacaccctcactccctccgatgcagatccaaaatagctcgattcccggtttgctccctcaccagcagcagcagcaacagcaacctcaatcccagccttcctccactcactcccccttgccctcgtcctcccatctggccggctcggccggtaacactggctcgatccccttgaggggtagtccgaatctgtcgagcgcatcggcaggcccggccttgaccggcccgttcgcgtccaaccctcccccaccgccgagagtcgtcccccagctacaacaacagcagcaacagcaacagcaacaccagcagatgcttcctcccccgcccaactcccaacagcaaagggacattcatgaccggcaggctcgactcggcacaagaactcccactcccggccctggtggtatccctcctccccctgtcggaggggtcgtcagagaacaacagaccgtcgtctcggatatcgatccagacgtcacctccagagacctcaaaaaggaaggctcagactgggtcgtcatctggagcccaaaagcaaaaaaagtgttggacgtcaacctcgttcacaatctcgtccacgaaaggtaagtttttctttttttttgtgtgtgtgtgtgtgtgtgtgtgtgtgtgagatccagagcgacggccctctctttctccctctatatgccaatctaaccgactcccactctatcttccaaccccccttccccctcgtgcttatcgatccacagtatcgtttgctgcgtcaagttctcaaacgatggaaaatggctcggcacaggttgcaaccgaacggtccagatctttgacacaaagaccggagccaaaagctggtaagtcgcttttgttttcatctcgctctctcgctcttcttcttttttcttcttttttttttctcttccttctttccatttgtttttcctaacctactcggtacatcctattgttcaccaataatcctctcgttcaccggaccctcccctcgtagtgtgctgcaagacgatagcacgccttataatggagacctctacatccgaacgatttgtttctccccggatggaaagcttttggccacaggtgctgaagatcgacagatcagagtttgtccactcttcttcaaaacttccacctctaaaaaatcttctttcgctcacaaacgttctctcgtattttttccctcctgcttttttcttcttcttctgctcttacagatctgggacatcaaagctcgcagaatccgacaccttctccaaggccactcgcaagagatctactcactcgagttcagcagcgacggcagacaccttgtctctggcagcggtgacaagagcgctcggatctgggatatcgagaacggcgcttgcgtgtttgatcttcgggtcgaagactttgttatcggagagtccggaccggtcgatgccggcctcaccaggtaagtcatcgatccccccccccctttttctttttgtcactcacgacccgaaagcaacaagagataccacagatgtatcgcttgattattgaccccccttttatatgattttatttctattaacacttcacttttctggctttgctcatctcatcctttctcccgaacgcttgcagtgtggctgtctcgcccgatggtcgatacgtagcagccggttcgttggacgccgtcgtacgcatctgggacacccagacgggtgttcagctcggtcgattcaccggtcattccgattcggtatacagtgtggcgtttgcccctgatggaagcgttcgtcgcctcatcttcaatcctgcttgtcttcccttgcgccaagacttgtctgactttcggcattttttttctatctctctctctctctctccccgcccgtacagttcctttgctcgggatcccttgaccgaacattacgaatctgggatctatcccccccgcctccttcaccgccttcaaactcgcggacgctcgagttcatgcccaatggagaacccggaacagggtacggcgcctgccacaacgttcttgccggacacaaggattatgttctttccgttggaggtttgttctctctcctttttttttctctcattgttctcttcctcgtcgctccccgctgtctcgctgtccctgacatcacacccaccttctctatagtttcaaatgacgggcgatggattgcctctggttcaaaggacagaagtgtgcttttctttgattccgctacgaaccagccccagctgatgctccaaggccataaaaactcgggtgagtttcccttccgtcgtcatggcaatctttcaagagacctgtaccgactcctctaaactcgtttttctcctttactctttcagtcatctcgatcgatctttccaagtcgtccggtctgttggccacagggtctggagatctgaacgcacggatatggaggtatgattccgttagggattagtatctcttctttttctttcgatatcttttctctccctcaaggtcaagtgagtgcgattggggaggatcggtccaaatcaagagcgggatgataagaatccagtttctctgctttccttctttctccttttcttttctttccttgttttccttgttttcttcaaccctcccccctttggttccatcttcttttctacaaactcgacgttgttttctcgacagagccgcccttgaccgcttccctcgtaccttgtcttttcctctccttttctgtttcctcgagttcgttgtaatcatcttccaactatggtcattggtttttgttgctttcttttcctttcccccccttttttt

SEQ ID NO: 2949 - DNA, 37753 bp, Xanthophyllomyces dendrorhous
tatacatacatatatatgtataatgggtggataggtgcactgtactaagagaaccgagtctccaggggccagtcgctttgagaaagaagaagcaggaagaaacattaaggaaaggaaagaagaaaaaaaaagggggagaaagaagcgtcctgggataaagaaaagagagagagagagaagtgatagggtaacgaactatatgaacaaacacgaaaagaaagagaaataatttaaaagaacatgatacacacacacacatatatatgtacataaggccagatcttcaagtgaaggaaagaacgagaaggtcatcaaacgactccccctatatcctctttccctctcatcgaggccgtactaaacagtccatcgccagagttgaatccataagtaggtagggccgctgagggtgctgttgctgtcgccgccgctaccgccgatggccggagactatcccaaaagccatcccagacctcgtgttccggtatccgaccgacgcttccgcttctcatccgcctcatcttcttcctcgggtccacccagtcgtccagcccgtcgaatccaaaacccgagccagaagatgatccggaccctatcccactaaaggcagcgagactgcctgaccgcatcaattcctgggacggctcacgtttcatcccgccgaacgggttcatccgggaataggtgttgttcagcgccatcgtcgaacccgtagtttgcttcccggtcgatccgtcgaccagagaagagatctctgttgatgagccttcacgttcgccttcgtcgcctcctggcgaggcgctcagaccgatgaatgaagcgagcttccctcggttcgaattctttcgggcgtttgtaaagttcaaccgaagcggaggcaacgatttgatagcggtggaaaacgagtccgaggaagcctgttggccctgtagggatgatggtgatcgttgctgttgttgctgttgttgaggagcactttgaaaagagttcgtcaatggaggcgtctccgttgaggttatcgtggggagcatcaacgaggaagagatcgaaggtggttcaatcaccgtggctcctcccgagatgacaggtaaactagacagtcgtaacgggtgggacgtctgattgatagcgataggaacgtggtgctgagccgaagtcaagcccaacccagtcgatgatccgcccccggcgccccctgccccctgggcgttgttgaaagatccgccggtgccatagctcggggtgagaccaccacaaccgtcctgcataaacatcttccaaatatccttgacgtcgtcgagcgaaggaatcttgatcccttgagagtttccatgggaactattgtagtgaccaggtccggatccaaagaacccaccattgtacgccgttggaggagagaccacctcggtgggcgttctccgccgaggcgcggctggttgttgtaatggattcaactggggaggacgaagcacagggtcgggagaggatgtaaagtctcttttgggaacgcgcacattggtctccacgtgaggatcctcaccttcgagagagagcgcagggaatgcagacacaaacccgtcctgaagatctttctgctttgccgtaaggacagggaaagggcaaagattgaaaagggatgtcaattcaacataaaacggagaaacagaggaaactcaaagccgactgacagtcatgttctcagccttccacccaagaagaggaacgctcgtctccttcttaccagcccaatgacctgtcagtgactgaatctctttctcgctcgaaccatattgctgaagatgaggcaaataacaggcactgggcgaactttggctaagactgccatcgttgtcattatgcgcacggtagtcgctcgacaatgctccaaacaggctataatcctgataaatcgcggaggatttatccgctcccgtaggaggaagcacgttggacttgcgggaggacgaagtatcgaaagatgagccagaggaagtcgatgacattggtgacccatctgtcagagcggatggctgagaaggtaaggtagactggctaggattgtgtatttgagctgctcgccgttgctgttgctgttgctgtgatatctgctgctgcagttggtgcggtagctgaggttgcaagaaattctgacttgatagagacggatgctgctgctgtggttgttgaatggaaaccgtctgggcttctctcgcaggcgagcttgagagaggctcggcaaacggaaccagagggtaagtcgagccaagaaaggatggctcgtaggatgacgagagttgctggctgggatcaaagttgttagagtaggtatcagagagttgatagctatcgtagccaccggagccggtttcaggcaaactcaatcttcgttcgaaaaacaaagactcagtggtttgcggacgagactgggagggatatggttgttgttgatactgctgttgatactgtcgttgctgctgtaacatctgctgttgttgccgctgttgttgcggttgctgctggtgatactgctgttgatacagatgttgctgctgctgttgatacaacatcgagttgccggcgtcgctattcgaagagtcactgctagaggaaagacttgatctagataggacgttactttcggtaagatcgtcgtatggttgatggtgaagcgtttgaacaggataacagtatatggacgaggaagacaaggctgtcgaggaggtggatgagacatcgtacggctgggtcggacgaccatcaagatcagttcgagtgttgatgggctgagagtaagagtatgaggtagatgggaaaggtggagaatctgacgagttatgactcggacatggagctgattggaaaacgagacggtttgagagtgagtgctcgaagggatgaccagataagcgagagaaagaattactttcggtttccgaacgatccgcctggtcacaatcttggcatcgttcctttacggccaatgctaccttttccttctttgttagcgacttgagtttctttccctctttttcgtcctcgcctttgagttgacctaatttaggaactcgaggtttgacgggctttgtcctagtatacttcggaggcggaggttcgctgttggcgccatgtggatgaaacttgttacggtgacgggaaagaagatctctgtggaaggaagcaaatcaataagagatcagccagtggactatcaagatccatagggatatgcggtgcttggagacgatggtcaagtatgcaacatccggtcagagcctctaatcagcctttgtgattgtagagagatttaaaccttcgctcatcactacaagaagattcaggcaagactgaggtttaccaaggtcggtatccttccccgtgtctcagtcagaatgatggccgaagcttagatggtctataatgttccagagatctgatggaaaccgagggagagatgcaaaaatgaagagagaatgctggacaactcacgaccgagcgaatctttctgggcaaaagaggcacggatacggcctatcgcccgtatctggtgagagttagatatacgtcatttacaaagcacagaaaaccatcgatttataacgtcagttgatctgtgctgtctgttgtaacctcctctacggtcgtctttctcctcatcacaagtcgatatcgaaccgataaggcatacgaaaacaaagcagatgagagaaacagatacgaacgggcgcgcatatgcctagctacatgttgaggccgagtaaacgtagcgtcacaaagagggcctgttttaatttcataatttttcgggatgtcagaatttcccatccattcaccggttagcgttttagatttcaaagacaagaatgttcgtcaaccatgagaggaacgaaagcaagataagagagactagatgaaaagagtgatttgacgaaagaagaagcgagcgggaaagggatggttctgaagaacgataacatacatttgtttgtaccgcccatggttgtttagttggaaagtacgatcgagcgacagatgatgggatgtaggattgagaattaatagaagtcgtgttctggcaatgggttgagagacggagaatggtgaaagagcaatcggactggaaggatacgtggtcagcgtttgaaggaaacgggaaagaaagaaaccgtacgaaaggagaggaaaagggaagagaagactgtacgttgtgggctgagacaagaagcgagaaaaaaaaggaagacattgtctcttgagtgattgtgtatttactcttaccgttcaacttcctttttctctgcttgctctcgcttgtctttaattcttctcttttgcctttctgttctttcctgtgacaatgtttaagggtgtttctcttggatgtaattgtgtgcaatgcattttgttgcaaacagaagtcagtgcgaaacaacctgttctcttctgagatatcgctttcttcctcttcagactggatgttggaaggacgctttacgcttcagaagaacactcgtaccgtttatagagaaaggccctatagctgagatgcacgtcatgaatatattcttatgacgtcgataatcagactggcccggtccgttcggctctcgacagttcgatctgaaccggtcagggccggtttcgaatcgagttcaatcctaaccggtcacgtgttgtttccgcaacatgtgcggagggtaagttttctttctaccggcgtgttctaggccaatgtagatctgtcggtcgatctcttcttctgggccctcgtgcatccgtgcctgacgatctgttttcttatatccgttcactcagccccaggcgtacgagagcgatcgcttgaaggcccagaccggtctaggctgcgctctctatctttatgtccctccgaggacattcggtcggaaagtgagtgtgcttgttgagtaaaaacaaataacaaacaaacggcaagaacgaccgctggggactaaaagaacgaaaataacaaggtcctacttattccactctatctcggcaaagcgatagtgtaccagcaagcaagagaggagaaaggtggaaaaaaggaaaagagaacaaggggttcatctagtttcctccatcaccatcgttgcaaacctgaatgagacagggacctcgctacagtttattcgctctgttgtgagtattcttacccacgttcatccagtcaaaaggtttcttcttaaccgtccgggtgttttttttttggttgtttcctctcctcattctcctctcctcgcttcttctccgtctctatctgtttggtcaggcatctgtcgttcgtgcgttcgtttcagcacaaaggtagctggctcgtagagcccttaatttgaactcaaaacaaggggtggagaaggatctctcacgaggacataaacacaagaagcagactcacaccgcttcgacacactccttcaacacactcttttggcactcactcttttttcgacatcttctcataatgccagtcaatacttttcaatcagcgcctgccgtccttctcgtcctctttctcgcttctctcacctccaacgcattacacagctcggaccatactttagaacgacttgccctcaaggtagtcgatcccccatggaccggaacctcatatgacgatctctcctgggtttcctgtcaaaagcaaagctgtattgatgatcacgacgcactcaaacgggatactctttcttcaatatcttcatcttcgccatcagcatccctggtgtccggttcaagcgcgagcgcaacggagaattatatctcaacggctgcgagcacatcgagtacacctgctcaaacgacgtctacggcaaaagcagcacccgctgtgacattagtttcgagtttggttcctgatcctttgtatgttctccgttagagttccaaaaagatccctcttcccttttgattcattttgggcgtggctgagcctgatataccttccattgcttacacaatgccttcttcttcccgtctttctgacctctgggcttatgtatcactcaacatagccctcaaccattcgatctgtcactttctccaaatctgtcaatgtcctgccttgacagtttcgcctcattcctaacctcctctacctttcaagcctgtcggccgttctccttactctcgacctcatcagccttcaaccagctcatcagatcagatctcgattcgaccacagcggtggtcagatcgacgcttgacgaaagcatcgatggaaacgaatgcgagagttatctgaatgacgtaggaaagaatcttcggaagggctgtcagtcggatctggataaaggaaacgcgatagtgaatcaagcgttaataggttaggatactttggctctcgtttttttcttcatcttattgcactgagaattataatctgatttggatattcgctatcttacttgcaggcctaggagcctaccaaatgatgagaaatgcttcagccttgttgacctcctcgggcgcatactgctttgtagaagcactcgctagtgcagagccggatgatctgtactactggagtttatataccggttctccgtaggtttcctcctctctgtctctcttttatctcgttccataagatcgcttcaagaggtcttatctccgaaactttcgatacgaaacgcaaaacaggatcccggacgagactaagacatgctctgaatgcacaatcaagctgatgagcatatatgccggctttgcgacaaacactgatctcgccctttccatagtctacatgagcgctctcaacatgtgagttttttcgttggcttctctctctcgggagatggcggaaggtgaaatagctggtgtatattcgagtcagcgatgacttatttttttcttcttcctcccggcctaccagaacaaatgaagcgtgcggatcgagttggccgtccaacgctttggtgtctaagacggtcgagctcttctccacatctacagctaaagcaaaactcgaaagctcgatctcgctctctcttgtcatcgtctcttctttcttgggattccttgcttttctctaaatctacccatctgcctatctagcaggttgttatcttgatctccaaatttccggggatacagaactttcttcattccttttcattcaccctccccatctgtccatatatgatctcttcatcttcatatgtcgattccagcttatataccataatttgcataccctctcgtcttccttcgaatcagttccaatccctcaatcgattatgtttcttaaacccgactttcaatctggacatggttgtccttatttatatatcccttcgttgtttattatctgtatatcaatttatcatctccctccttcttctttctccttttgatttttttcctctgcttcggtacgattatctgatacccatcgaggatttctatctgaacaagtcttcttgccttcttgaaagcctttgatcggcattaaactcggaaagtcctgaacaagaaaagactcatcagatcatcgaggcggaaaatgatattaagaccagaataaaaccagacaagaaggtccgagtggaaaggagtaggaagtaacgacttagtctactaaagatacagtagattcattagggtgtacaaaagatgaggatacatagaacacaaaacctgatacataacacgcgacaccttcaaatgagggaggtgaacgagcgaatcgaaacgggccatacgcataagaaaaagtcgggagttcaaatcctgatggaaaataccaaatcaagtctcctcaatgtttaaaatactcagggcctcgtccactcccaaaccgaatggtcctgagactaggtcgcgcgtttctcaaggagtcgaccagactagccgttttcggtagttcttcggctgtcggtaggagcgtagtgttgtctacaacagaagcgggagtgggagtagcagtagcagtagcagaagaaggcagattgggattcaagagggaatggtgccgctgaacgaacgatattttcgaaggctgaagggggaggaccaggtgagtcaacgttgagggaaacgtagatatggctcgcaaggcgatgtcctatagaacatgaaactcgatacatgcatcagctctaaaagctatgaaccgcggttggttagaagcagcacaagcgtgcggagaagaacacgaacgagatcgtcttgctgccaatcaacgcaatccttcatcacaccaccttccaaaaacttgctcgtgatctctagctctgaaagtcccctcccggtgatcttatttacccaactagagagctctgttaggaaatccggagaaaacccttgaacaaagttgaattggagagatctgaggtctggtaagaggggtaagatgggtaagatctgggccgatgtcggtttaactagcaatttgcagcgcagacagagagataccaagttgggcgtccgggaaatcacataagatatgtgaggtgtcagtgtagacgtagtgattgtcagatgtcttgttatattccagacgaatccagaaagaaaaggcgtaatcatcaggaagacaaagaagacttagccatagattgacgagatagagacgcatggaaaggtcaaagacggaacctaccgaatgaacgcgccaactttgtccatccgcccgatcaaccaacggccttcatccatactaccgagaatgatgtttgagaacaaaatggatcgcacaacatcctggattctttttccgcccgcaagtcctaaacttctaagatcgacgtttcgttgatgagcagtcgcgaaggatgttggaggtagatactgtaggtcttggatgaattaagacgtgagaaagcgggtagagataagaagaaggaggaatttcagacagacgtaccaagagatcaacaatctgaaggattaattctgtgggtagagacagcagtccaacgaagttctgtttcgaagatggagctgactctgacgggaacctactatcccaagcgaggttaaaggtcagaattcggttggcggatgaggcggtcgaagtagaagcgggaaaggagtttgagaatcctgtggacagccggggtgtcgggaagggagacgcgtatttcgaaggggaaggaatcagcggtgatatcgctgtggatatcatgtggagactactgagtagaagagcgcaaagcaaggtagcggcaaccgagtgagtgaatgggtgggtgaatgaggtgctgatggttcgaaggagaacagaaggaaagaagaactcggtcaagcccggagaagtggttacgtcagtcggtcagctcattacgtttccttcctagtcttcccctatcggttcgtacaagtgctctgtatcttctccagtagctttcgcctgcgctatcgcgctattttgtcctttctgttagtggttctgttgtatttctgttcttttgttctggttggccttgttcaaagacggagtcaagactggctgctctgtatggttgatggttgttgtcgtaggtgacgaaatgagtggttgaacctgaagctgataaataacctcctgctcgtcttcagagaatcttttactttaactcttcagtcgtttctgtttctttccatcagatccttgaacatcttctctcttcttctttatatgtatctctcttgccttcataaagcttctttaagagggtacaaatgagcatcaagtatcgctgtaaacctggcgatgtaaccagcgtaacctcgaacggcttaattttcggtttcttatttttctcctctccttctttgtctctctttctctccttcttatcctcccttctctctcctctccatctctctttcttctgaatcaaatacagcgactagaagaagtctgttctgtgattctagatattttgtagaatctcaccaccctttcccctctttctttacctccttggccggtcttatcacccgaccaggtaagctttaatttccatcccgtcctgggcctatatctgctttttcgtttcctcttcttccctctcttctctggcccctacctctctatagcctcctctcagacaaagagagcacccatacatacaaacagcaggaaatctcgctcctcagatcacaaagggacagcgcgggtgggttaaatcagtgtcaacatttcgcataacgcaatgtttacgacgagatccactaaggtttatttctcctatcgcctcgctcaactcttcgcatacgacatcccggcattcgactcgttctcgtaggaagtttggattcaacagactgctgaaagatcactgatactgttcatttccatattttcttctatttccactcggatgtgtgttcaacagatatcagatcataaacaccgacaaggataacaacgccgcttacgctgaaaaattctccacgcaacactctaaatacaatatacatccaatatggccgacagaatgaatgaggtagatctggatttgatcattgaaaagctggtggaaggtttgtctcgtcggttttcaggattaaagggattcttcctcatatctgactttggcatcacgtaacttggacctatgtctgcttctccgcatgtcctttcgtccttcgaccgttgaatctttctcacctcatagtcagaggtcaccgacctggcaaaccggtccagctggcagagcatgaaattaggtttctctgcacaagaagtcaacaaatcttcatggagcagcccatcctccttgagctgtatgtgcttccctgaaccgtcttctctgctgatcaatgtatcaccgtcactgatcgcagcaccgtcattgtccctgacttatcagagaggcgcctataaaaatttgcggagatatccatggacagtattacgatcttcttcgtctgttcgaatatggaggtttcgtgagtgatcgtcctagtctttcttccttcttgtccgataagaatgtcatgttcactcatctttcctgtcaccgactgccaattgcttctctgcatacattccaaatttgaacagcccccagaatcaaactacctcttccttggtgattacgtggatcgaggaaagcagtctctcgagacgatctgtctccttctggcgtataagataaagtatcccgaaaacttttttatactcagagggaaccacgagtgcgccagtatcaaccgaatctacggtttctacgacgaatgtaagtcccagttcattctctcgtacatctcgtacaacgtcaaagtttagctagtccttggctggtaaattcagctagaaatgatggcaataggctcagtgtgtggagagcagaagcaatgggcgtgttcggggtgttctcatcgcgttgagttgaggtttcggtcaggggaacgtaccatgtcgtcatgtgggaatgaacgtattgagggatgaacgcacagccccgatatagacaccaacagagcttaataaacaagagtactaaccttttgtgtttgactattctttcacaaattaggtaaacgacggtataacatcaagctttggaagacatttactgattgcttcaactgtgtatgccatccgaattatttttttgaattttttaatcgacttttgccaattctagtaatgttgactcgggcttctatgtatgccccctcggacagctcccagttgcggccatcattgatgagaagattttctgcatgcacggtggactgtcgcctgatttacagagcatggatcagatcagacgagtcatgcgacccacagacgtgccggaaacaggtcagaactatcatcatttttccatcgcctcttgtgtgcgatataatgtcggacgaagtgatagatcgagggactaaaatggtcgagaataattttttaatgattgttaccacaggtttgctttgcgatttgctatggtcggaccctgacaaggaggtccagggatggagcgagaatgaccgaggtgtttcattcacgttcggaccagacgtcgtcaagcggtttttggagagacacgatatggttcgtctctcagttttggcttaatttgcctttatgaagtggcggcgtgctcattagtatgctcttttgcgctttgtttgatggaacggggctccatatatatacagcatctaatttgcagaggccatcaggtcgtcgaggatggattcgagttcttcgcaaaaagacaacttgttaccttgttctcagcacctaactagttcgtcccttctcgttttttcggctcctctatctgcctttgctctacatattgaatttgtcttgtaaaatcatcttcttcagttgtggagagtttgataatgccggagctatgatgtcggttgacgaaacgctcctgtgttcgttccaggtgttgaagccagctgaaaagaagaagtgtgcgtcagattcgatcccttactgtgcttctagtcattctgtcttttctagtaattcattcttactatttgttctttcgttcgttgccactcgacatgattcaattcatcttttcagtcggcgtgggaagcagttagtatctaaatatatctttcaacccgtcaaatgagacacgtgatgatctaatccttgactcatgttgcttcttctagttggcaggagtaacccttcaccaccgcggtctaagaaagcgcccggaaagaagtgaaaacagaagaacgatataaatcgctttgggcaggtttttaatgcatgttcctactctcactttcctttttctgcaaccttttacaaaacatcaaccttgctattcatcctctataaccctctctctccccaccctgatataaaaaaagaatgtctcgtccttgtgtacgaaatatgtctgcgtgcgtgtgtgtgtttcgcaatcgtccaagaggttggttggattgtttactgggggctttttcttccttcaatttctctttcatcgcggaccgatgagacttacattctaggctttatcccagtgcttctgttgagttctcttttttcgatagtcaattattcctcttacctgtcctcaccttcgtacacacctctgaggtaaacctctcttctttactttatactatgtacttcatatttctcgatcttcgattctaacaaaccggaataagttgttctcggttatttttttcctctctcactcttctctttttcgctctaatatctctcttctcccttatatccactcgttttcgtgtgccgcatgttttgtcgatgaacgcttacgtattgaaacctgagaggtaccgtgctgtctatggatagagatgagggcatacgttgagtcatgaagacataagaaagtgttttgtaaaaatgacagcaaaggatctgtaccctaatcaccgtttcctatctttcgttcaagcaaaagaccaacgacccgttttcaaagcccatctgtctagctcatcaatctccgttcccaccagcccatctttaagtctgttctccccatcttccggatcggccttagttgatgaaaggaatccgacgcctgaaccacccactcgggcaatataaggggcgaacgatgattgaacgagcgtctccataagagcttgaagggtttcagtcgagaagtctggttgaccaaaagtacaggatgcgcatcggtcagatgtgtcgcttggacggaagagaaaaggagagactttaccatcgggcaccagggttacagcgcaaccacctccaccggcgcctgtcaactttgttcgaagctcgaaaggcttatcagcaccgatccggataatctcttcgagggatgggtgggacacgccaagtgctgctaggtgtgcgtggttctcggagaccaagttctgcagaagaaggaagaaaaaagaagatgaaatggataagacacaatgtcacaaagagtcttgaaaggaacaagaactaacttgaagtcgatcgatcatgacagcacgttccatctctgaatctttcaagcatcgaatagcctcatcggcaatctgctgaatcgcttccaacaaagggacgatcacctctggctcctgaatcagtcgagcattcactcctgcaacgagagatcttgtatcccttccgatacgagaatctgtgatgaggaatcgaatggatgtgaagctatattcgaaatgtagaaagacgttcatcatgggtcaatcagactggagtatggcatatgaagcaccgtgtctgcgtacctcttgatcgcttccattccaccttcctgttttccctcaatctttcttttgaaagcaacagcgcctcctctcgtactgaccgcgttatcaatcccactcggatttccatggatgactttttcagctaagaacgcccatttgtcaattacttctgtgtcggccgtcgggattgttgattctctgccagtcgtcgttggactgaggtgagaaaagtggagaagaaagactagggcaagagaggtcgatagagcggcggatgaacccagaccagctcccatcggaagcgcagatcgagccgtcaactcgaacggctcactttaattgattgaacccccgaaggaagaaacccaacactttctccgtcagttaagagtctttataggcaaaaagaagagacagaaaaaacctaccttggcttccctttgctcaatagcaccaacaaatacaagaatgccatggttgccaccttctccctttctcctccgtttccaccttgaccagcgatcctttcgatttcggcgagcaatgtcgggcagagagattctggaatagacgcctcagtccagtcaggcgcaagtgaccaaggaagagaatcaacaggccaagactgcgtaaagttcaggtccgttagggagatggtaatgtttgtagacgataacgacgatgatgttgttgtcgtagcagtgggtgagagaagagcgtagcatcgaagatcaacggaagcagcgatcccggtctgtttttaagcgtagaacgtcgagtcacaattcgcacgtacacccacacacatagagacacgtatcagggtcagtgactgattctgaacgctgagttttgacgtgagcagaaaattagtgtcgggattggccccccaccccttgatgatttccccaaaataaacatgtccgaaagtgaattcgatttatataggaggaagaggaagagaaaaggcttagcaagatagttcttgctattacaatctaatcagacgtaaagatggccgaaagcctctgaccgaaggatgagagaaatgaataatcaaaggatgctaaaaccaaaggttgttataaggtacaactagacgctcttaagagcgaaatgtataaggaaatatagacagatgcaagaaggggaaaggggcaaaggggggcatccctacaatcaagacgggatgaagagaacaaaaaaggcgaggaaaagttaagatgcaatgagagcataaagctttcatttctcactcacaacaccatggactacagcatgttcgccgaacagaatgacctttcccggtgcactgacaagaatttcttctttttggctctcatcgcccgcaagtctggctgcatcgtctacattgagttcggcaagctgtccttcgacgccggctgtcgagttagaaggcctaacacgctcgaactgtctggctcggtcgacggcccagttggagtgaatgtccgaggcagaatcagaggcaggaggagtgagcggtcgggatgaatctgaggtagagactgatcggattgcgccagcgttcacaagagaggcctccaaatcatcaagcaaatcgtgagggtcctcaataccgacacacagtcgaatcagatgttcggggagacctcgctcggctcgaaggtgagcaggaatagatgcgtgactgaaatgcaagaacggaaagaccgacccaattagtcagccagaaattttagaaggcgcgaaaagaaggcataagaactaacctcattagacaaggcatgctgatcaaactgttcacggctccgaaactgacactgattccccaaactcgggttccgcccacgatggcctcactcaacgcgatatctccggtctcaaagctcatgacggcacctgcaccactcgcctgagagttatgaagttcgtacccagggtcagaaggcagaccggggtagtgaacaagaaagccgagggtgtgtaagtacgaggcgatcaggtgagatgaggcctgctgcttgtccagtcggagaggaagtgttttgagtcctcggagaagaaggaacgagtcgaacggagacaatgcatttcccatagcatttgggaaccaggccattctctgttgtaggcaaacgacatagatcagactctgtcttatggcaatggctttaggcacgacattcaaagcaagcaagcacgaaccttcccaatctcctcagtacgagtagtaatcacaccagccatgagatcgtggtgtccactcaaatactttgttccagagtcgtatacaatgtctactcctagctccaacggccgctgaagatatggtgacatcatggtgttgtccaaaacgatcaaggcgtcctgaaaagatattttccggtagccgagtcagtcggaaaatttcaaagacgtgtcatacaaagaaggtatataaacgagacttacgggtgctcctgagcggacgacctcgacgatggctcggatatctgcaatcttcaacatgggatttgttggcgactcgagaaggaccatagtcaccttgttgcctttttctaagtggggctttaatgcttgcgggttggttgtatcacaatgttggacgtcgaccccgccgtcagttccaatgtagcctagcagtcggttggttccaccgtacaaatcatctccagctaggacggtatctccgggcttaaccacacgaagaatcacatcgagagcagccattccagaggagacggcatgtgccgtagcagatccggagatcttacgaaggtgatgttctattcaaaatggaaggaaaaagttttgagtggaaggagaaaagtatcgagaagtcagtatcgagtcatcattttcttgcccgcgcaagaagggctgataacgatgtggggaagaagggaacggaccaaggaaactacgggtagggtttccggaacgggtgtaatcgaactgtccgttcattcccttgaaggtggccgtctggtagatgggcacagaggacgagccatgttgatccttgaggtccaaggatgggttctctacggtcgcactggtgtaaatgagagagcaatattttgttcgggttatcgaaccgatagggcaaagacgaatagaaattgagaggtcatcgaccgagcaagccaacaaaaggaatgaacaagtgtatcacgacgtcagtacaaacggtacagacacccatcagaagacaaaggcaggtgtagaatctaatataggaatgatcaagacgaaagggaagtatagaaagggcaaggcaggaaccaagaggaacgggacgactgaccattcagtagcgaatctccaatttcggttaggcggcagagatgacacgctgtctgcaatggatgctggtggagttgcgaatgaaaagtctggtttatctgtcattgtatatatgtgtatgtgtatgtgcgtgtgtatgtggatgggtggatggagggaagatgagggaggagaaagataaaagtagatggaattcttcgagggagaaaagaagttggattttttttttccaaatttccaatggcgtctttttcgcgccaggccggctcttgctatttacgccttcgtttctagctcgtccccggtcggcttattggatatcatagatgatgagagatatagattcaggaagagcagacaacagagaactcattttatttgctgataactactgtatggcatctgagatactcggtgggaaagccgagaagtcattgaagagattttcaaaggaggttgaacgagcacatatagaaactcctagtcacgtctgtttcttcaactcgccatctcatctcgtccatcgttgataccatcagtgaaagcatactaagcccgacatccatgccaccagctcacgttctcgcatggctagaccaggcagctaagccgtacgctcagccggctccaaccacgcttgcaatcacctcctctctggacacatatgcttcgctcaagataaagactgatcagttcagtacgtgcatcatagggtttcatcttgaaagagttttgaccgatcaaacgagataatcttcatctaatatcgatccttgtctttttttgttgcccgaatagcatatgatgatggccggacactccttcttctctgtcttcatgggacgcttccaattacatattcgaaagcaaaatacaacgttcctctcaacatctggttcccgatcgagtatccctccttaccgcctatcgtgtacgtcgtgccgacgagcttcatgcttgtacgtaaaggaagaggcgtcgatcttgacggaagagtcaacgaaaatgagtgggattatctgaacggatggagaaggaagccagaggtacgatatcatccggtccagtagtaggatacaatatgatagtatgaggctgaactcttccctttgtctcgctcttacggtcttggctggcttgatgttcattgctgttcacactgaaggcacactcgatccttccgttgttgcagtctctagtggacgcattctcaatctacccacctgtatatgccaaacctaaagacccccctgcgatatctggctcaagacccaatggtatccaatctcagcctcagtctcagtacttacattcatccgcgtctacccctgaacccggcccaacgacgaccttctcttcatccacacgaaattttcctattcaggggagtgaaagaccatctgcttcacctccgccaccacctcctcttccgcctgcagcttttcctccgggaccaccgttgccacctataccctctctgaccggtcaatcatcgcccgggtctccttcccgttcgttctctactggcgcgactgaaggggtttcctatacccaccagcagcaactacagcagcaacctgcttcatatcatccccaacataactctcactcccattctcaccctcaccctcaccctcacctccaaccatactcatatgaccaacaacatcaacgacaacacagttcaggcccaaacacaaatacaagcactcatccaaacttactaccgaacgctcactatcaaccgacaccctcggctcaacagtcattctctccaccccaacatcaaccgcctcaccaagcctttcgacagtatcagtacacagactcacatccagacgcatatgctcaaaaccatacatatcatcattccttttcgccctcgttgagcgatcctagagcctcggttcagcctccctctcgcgccaatactgcgcccggaccatcccaaacgtatcatactccgcctggacccggacctgcttcgcttgctacaacctcagtctcgataccgcagtctcaagctcgaccgcagcctcagactcaatcagtccctatcaaagcccccattcccgatcttttgggaacactcgatgaccctcttccagcatcccgaactcctaccactcagcctacagatcagccggctcctcctcctccaccgcctaatccagagatcctccatctgcagactcatcttcaatcttcgctcacttccactctggacgccactctatccgcgctcgacactcaacggactcatcttcagacaatcaacgatgatctgcgagcggcaaagcctgcgattgaagatgaaatggccagattgaaggcagtgagggatgtatgcatgtctgtaggcgatcggatgagaagtttggtggctttgggcgaggacagagtcagatgggtcgccggaagagaaggaggcgtggacgaggtcatctgtggagtcgatctcgttggaaatcagtgggtcctgtacttcctttgttgcttctctatcttttatacacttaccgaattcttcttcgcttttgactatagattgatcgacctggtggccgaagacgcagcaatttcggatacgatctatcagctcaatcgagcgctcactgcggaaaagatcgatctcgaacggttcttgaagatggttcggatactcgctagggaacagttcatgaaaaggtttgctttgatttccttctcttgttctctctcttgttcttttctctcttctaactgctcgtgagagatatagatgctgatgtgctggtctctttgtgttggctgggagtagagcattgattgaaaaaattcttaaaggctgatcgatgcatggcgatacaccttgagctcctttgaccttaattaaatgtggttgtatcaatgtgctttttctctccatggacttgtttatctttgataggaaggtggagaaagtagttaagcaagcaaggtttacattagaaaatacaagctcacacatttgccctcgaagatggttacgcatcggtaaagtggatggttacatcgtttcggctcttccctcgtttagtttcttcgtcttgctccgttctccatccggctaggactctctttcttttgtactccttcctcccttctctttctttctctattcttttttcgtttccgttcgattctccttccaaaatggtctctccaacgatcaacgtacgttctgggcacctcctgcatgattcaccatcaaacatactcggtcgtctttttctggcactgacttttttcttctcctcttttttttttctccgcgggtttttcctttcccacctctccctctttggcatccatcttcacctgatttccttctctttgcttattgtctaccacttgtctcgctcttcgatctcgcaaaataggttctccgacataccgccctcttcaccggtcttttctacggaattgtccaccgacagacccttcagaagcagcacgacatcgcgcacgagcttcagaaggagcacgaccaaaagtcgcttctcgagaaggcccaggaggcttggaaggttcagcagtccggcaagggcaagaagcaggatggtgcgttctctttctaggtcttttcctcttaagaaacttctttttttcctattagatctcgtatgtgtgtgttgtgcgtgttgctgggacaacttaggaaagatgctcagtttggtgatctcgccatcacgtctcgagaggtagaaggaaagaacagggttggacgagcttagaaatcgttggcgtcgttccaatgacaaaatctggaattgggttgatctttggttaaaaatcgttacttgggtcaagatgccttcgccgtctatgcctcaagattgtccttgttgtcttctttctcatacaatatttcctacgttccggaaacccataaactgatctctgtatcttctatatcttctgatattcctcatacggggcgaatcaacattctcatatttctccttacccattctcttcgtctctcgcatgatgacgttttcactctagatggacccatccgagacccggaagatcccaagtatgttctctctcttctcaactccttatgcttatccactggctaaaaagactgaacatacttatttttcttctaacctcctacgtgtgcatatcgtatctttctcttcacaggttcgacttagaagccctcatcaactgggctgccggggagaccgccaaggcctaaacgttctattcgcactgtttcttcatctctgtcttcctctttttatctctgtttcttgtctgttgagaacctttgggaaacatggaggaagaggggctgtgaaactgggaacaaggggggcggtgaatggtgagagtacgaggtcgaagaggcagaggaggagggtcgtgtgtcttgtttttattctcaatggatcgcagatcgatgtgttccttttttttctcgtttccttttcctctttcctgagttaaggttcaaccaacctttgtctactgtgactctgccaaatcctggttccttgtctttgtccgaatccagcatcagaaacagagaaaacaccccgaagaatcgactgagagtttacgcaaagaaactgacaagctgtgggaggaaacattcttcatagacgcacaacgcggtcgaagagaaatgtagacaagcatatgatcaggaagatccaatcgtgtgttctgtgttgtctgaaagtcattggatagactaaaaatacatcaacggaggtatgcggcaaaaggaaacgtgggatgtgacagattaccaggattcaaggaatggaactatctgtaatcttggacgggtctgtaggtctgtgtagaagttgctcatttatagttggtgctctttcgatcaaatagatcgatgatgttccatacagaaatacatcatctaatcaaactttgtctggttttggtgtaagccaaaaattcagaagaaatctttcgtatgtgattgagtcaatcccagcatacgtttggtccgcgatattctcaggtagagagttgaagtcctggacgtaggtttctcgagctgacgaacgggttagaaagatgattatgtagggacaatctgcaggaagctgtacgcaaatcttttttggtagatctagtgatggtagcggtgtcgaatcagatgacgaggaggaagaggaagatggtggtgacgggttgtcggttgaatctacaatcggaggctctgatccaagactccattgaaaacccggtgaaccagactgagtaaggataagaaccggttgaagctctttcacatcagatattgaggcaatccgtgtagcgatagctggatcgattcctgttgaaactttccccccgtagatgatgatgctcctttgtctcaacagctctaacagtttgagattcttcttctggtctggtgcagagtctaaatatattgcattcaagcaatctcgaaacatcttgttcagatccttgtagtttggatgctgagctggactgttgcatttgttggcaagttcagtgagatccctcttgaagtctttgaatatccgaagggcgcgtgtattggaaagcttgtcgttgagtatagatacactctcgagagcgtctgttggagactttttgggaggtaccttctttttcttaggaagacctgtagactttgaaagatcgatatcatatttctatcaagcgatgtaccaggagttttccttgatttctgaaataaccggatatgaacgagagactaacagatatacttctcccatcaatactgatagatgctagggagtcgaggtctttcaaattcaagacaggtatattcaatttaatgctcgaggttctctttttcagccgatcttgtcctccttgaatctgcagttccgagatgataactccttccgcagacgaaggcttagtcgtagacgtcgaggtcgaaccttggttggatgaacacagagacgggtgatacgatcgttttgagatcgaagagagagtaagaatccgtgttgagcatacttgagaagagttttgaatcgtcaaacgaggtacaagccggaaagtgtattgcatgcgccgagtgaatgtctaggttgaggtcgaggtcgaggttgaggtcggaggtcagacaaacagttcttattggtctggacgtgcccgacgcgtcatatcgccatttatcttcgatgatgattcctcaatcacgcggcgtgataggcgtgtcagatccgcgtgatttggaaggatcttagcagaatgcaaagtgagaacaaacctcctgatggctatgaagaattatgaagaagagacgttttgagaaagatagggagccaagcgaactacctgaacatatgatgcatacatttatcgagagacaaatcatatatcacagcgcgacacaaacagaagtatatagagctcatgagataaaaaggattagtttgttgagatgaaaaaaagaaaagactttctacaattcaaaggctcctccccagccaaacttttgctgtggcttcccagactcgagatcttctagttctttcttgaggatatcgatctgaaaccctcggtaggcggctttgactcgttcaacgttggcttcctggataacgactttcttggcggagctagtcccggttagaagggcaacatttgtgccgaccaaaagctgcatagccaagtcaaacagtcttggtcaggacacccatacataaatagcttgttcagaggtcaaagaaagatagtccgataacaaaaggatgactcacgccaaaggttgagacgatgaacgtagaaaggaaggtggtcaagggtcccggttccgaaaattgtcgtttgtaaacttccttagacacttgaactatatattatccaagacaaaggttcatgagcttctgtctgtcttataatgtgcaggtatatcatagaaaaagacggaccatgctcgccagattccatgatgatctccacgggcttgggagcttgtctaagggttacgagcgctcggtgaatcccgactcgacctctccaggcaagggccagaccaacggcggatccaacaagacctccgacgaatacatggctgtaggtaagggaatggagggattaatttcggagataaaattgataacatgtcagagcctgtaagaaagcctagggaaagaagacacatactttctgactttgccagccgccttcttcaaggcttcccgatctgatggctcgagatctttagagtaatgtgattctgcgaggtccaaataggcctgttagatgaaggagtgagactaagggtggtaagcatagcgaagattgagcagatcagaaacatgcagagctaacttgttgcttagcattcagtcgagatcggacgtccatggctgattgatcgataactagtcagacaggcagatgaatggatgaagagatgtatgtaagaagagtctttgaattcttttagatgggttgcttatgattttcctaaagaaagaaagaaaagaaggaaggagaaaggcaaagagacacaagatggccttgtgcttttaacgcataccattgagaatctcgagcgggtgatgtcgtcagccttttcctcaccgggttgcgtcggcaagagttgagggtaaggaggatgatgacatgagcggataaccctaactgatacgtgtgatggtgattcaatgactaagcagcagttgttgcatggtctgtgttcaggaccaatgacgttgcgtggtttgttgaattcagatgctgactaagccttaaaatgcacgtgtaacctgaacccaggtctagcgaccgagtaaatccgagcaggaccgtgagtcaaccgctcctgttcctagatccgccggtccctttttcctctcattttttggtccgtttcctttacgtctctgttgaacagttctctttcctcaacaccatcgctgtgtatcctttcttccaccgttccctccattcttaacgctctgttcttcgttcttccacctcctttcctcttccacctccaaaacttcggaagccatgcttcgacgattccaaccttcgtcactcagggctctcaggcccacagtctcgtcggtctcatcaagacctgctctcgctctcaaggccaggtatgcgaccgcaccatccccatcccctcatgacaactttgcgaccagcaacaactcatattacacctcagagtgagtccataatgtttctgttgttctgcctggtcgttttatcgccctttcttcggtcattttcgatctatggtcggaagtggagtttttttttcctattcctctatattgttgagatcgcattccttgaaagtatgatggactgcgactctggttccattccatcatcgctgcctcgccagagtgctcctttcgttttgattttgtgatccgtataacgatcaacaccctccacttggagggggtttttaacgaaccagaaggaccggaaaaacccgggtctcagtgagagatccataggcattcctttcgtcactcggagcatcaccattggaccaaatcatgattcgaataccatcaaatgattctcgtctcctttgtcatacagacattctaactcatcctcgttttgctttccgtgtctgatgatagaatgtaccgagcctggaaagaggttagtctcactgttctcgcttttccatcttgaaaaaaataataacaacatttctctctctttttatcttgtactgacaaactctttaatcttcactgcccttctttaggatccctcctccgtacacaaatcatgggctgtctactttgctggcctcgacggaggccttccttccgcccaggctttcaaccctcctcctggatctggaggacctgcctcacttgataactctcaccccgctaccctcgccccaagtcttcagaacggagatgcctcgcagctttcggaccatcttaaggtccagcttcttgttcgagcttaccaggtccgaggtcaccacactgccaccctagaccccctcggcatcatggatgctgatttgagcactgtccgaccggccgagctcgaccttagctattacggctggtccgaagccgatctaaacaaagaggttcgattgtatttgatctctcgggtcgaatggatatctaatgttgacaaacctctttggcaatctgactgccactacaacagttcactcttggtcccggtattcttcctagttttgctgccgccggaaagaccaagatgactctcggagaaatcatcaaggttatgaaccgaatctactgtacgtatccatattctattttcaatacaattcttatcaactacagtgttctgataaccttttacattcttggtcacaggcaaggacattggtatccaatacgtccatattcccgacaagaagcagtgtgactggatccgatctcgagtcgagcttccccagccgtggaactacactgttgaagagaagcgaatgattcttgaccgtctgatgtggtctgactcgttcgagtccttcattgcttccaaattccccaatgagaagcgattcggtcttgagggttgtgagagtttgattcctggtatgaaagccatgatcgacaccagtgtcgaccagggcgtcaaatctgtcgtcatgggcatgcctcaccgagggcgattgaatgtgctcgccaatgtcatcaggaaacctatcgaggctattttgaacgaattgtaagccagaattctcagttctgtttactaaaacaccgaccaatgcacgccctgaaccgagctgattcggtgctcttctcttactttgccttcttgataatttccttcatctcttcagcaagggagctgctagtgacgacgactctggaggaggagatgtcaaatatcacttgggagccaactacgtccgacctacgccatccggaaagaaggtctcactgtcactcgttgccaacccttcgcatctcgaggccgaagaccccgtcgtgcttggtaagacccgagctatccagcacttcgagggtgacgacaagcacgataccgccataggtattcttcttcacggagatgccgctttcgccggtcagggtgttgtctacgagtcgatgggtatgcactcgcttcctaactacggtaccggaggaactatccacatcgtcgtgaacaaccagattggtttcaccaccgacccccgattctctaggtctactccttactgttccgatatcgccaaatcgatcgatgctcctatcttccacgtcaacggagacaacgccgaggctgttaccttcgtctgtcagctcgctgctgactggcgagcggagttcaagaaggatgtcgtggttgatatcgtctgctaccgaaagtacggtcataatgagaccgaccagccttctttcacccaaccaagaatgtacaagaagattggagagcagaagccgatccttcaaaagtacatcgaccagctcgttgaggagggtaccttcaccgccaaggaggtcgccgatcacaaggagtgggtgtggtccatgcttgagaaggctcacgagggttccaaggattacaagccttctcccaaggagtggctctcgtcctcctgggacggattcccgaccccgaaagccctcgctgaggttgtccttcccgttcgacctaccggaaaggacgaggagaccttgaagaacatcggaaaggtaatctccacgtttcccaaggacttcgttcctcacaagaacctcgcccgaatcttagctggtcgaggaaagaccgttgatgagggtaagaacatcgattggtcgaccgccgaagctctcgcttttggatcgctcgctctcgagaagatccatgtccgagtttccggtcaggatgttgagcgaggaaccttctcccagcgacacgcggttgttcatgatcaggagaacgagacccagtacatcccgttgaaccacttgggaagtgatcaggctaaattcaccgtttgcaactcgcatctttccgagttcggagttcttggtttcgagttgggttactctctcgtctcacctgattcattgaccatgtgggaggctcagttcggagatttcgctaacggttgccaggtcatcattgatcagttcatcgcttccggtgagcgaaagtgggttcagcgaaccggcatggttatgtcccttccccacggatacgacggtcagggtccggaacactcctccggtcgaatcgagcgattccttcagttgtgtgatgatcacccgaacgtcttcccggatgccaacatggtggagagacagcaccaggactgcaaccttcaggttgtctacccaactaccccctccaattatttccacgtccttcgacgacaggttcaccgagatttccgaaagcccctaatcttgttcttctcgaaaaaccttctccgacatcccaacgcgcgatcgaacctggaagacttcactggtgactcgctcttccagcgattcattcccgaggtctcgaccgagattgcccccaaggaggaagttaagcgagttatcctctgttccggacaggtttaccagaccttgctcaaggagcgagacgagcgaaagatcaacaatgtcgtactttgccgagtcgagcagatctcgcccttcccttacgatttggtgacgccttaccttgacgagttccctaacgctgatattctttggtgtcaggaggagcctctgaacgccggagcttggtcgtacgtccagcctcgattgttcaccgctttcaagaacaccgagcaccacaagcaccgaacgccgttgtacgccggtcgaaacccaagcagttcgcctgcaaccggaaagaagtcgatccatttggccgagatcaaggccttcttggatcaggcgtacgacttgtctttgactgattaagcgagactcataccagttgttacccatgtcttcacttcctcctccgtttcgtctgtctgggcccgttatgggttctttctaatcgtgtaataatattcgagcaatgtgagggaggtggagggatgaatgatgggaaagatgagctgtgtttatcctcatttcttcctttttctctcttctcggcatcattactctactttatttcttctttctcccttcctctcaatccatattgcctcaaatatcagcatggtcattgttcttcttctttatatctacgcttctcgaacgaataagtttccaaatatgtcagccgtactttccatgcaaacgtgggaagaacgattaatcgactcggttttcgttcgatgacgttatatggtcaaatgagctttgtcattgcgcaactaaccatcttataaaacctccacccgataccttttgacctttcgaccttttcttctttcatcttcatctcgtccatcttacacatcccatcaacttaccatatctttcccacaacctaataatgacatccaccgactctgccaagcctgcgttttacttgtacgtccgtcggctttctgttctccttctttgttgcaccatctttataggcttcaatttcgttctctttcgtccgctaccacatggtacctaatctcctatatctacatcatcatttacgaacagctttgagggatccgcatggtcgactgcgcctcgattggcgattgaggaactcggatacgatctcaagaaagacctcgacctccacagtcttcctctcggagaaggagcgaattttgatccatcttacttgaagctcgcaaaggagggaaccgttcctgcgctggttgacctccagggagaagtcctcgattcgacatttgtgagtctctgtcttcgatctctgttgcttatcttgctgctatgatctcttagcaagaagaagctacaagttcgaaaattctgatatcgttattgagggtttattctgcgctggggacggatacatttcttgttcgtgtttttggagggatagaaagttgttaaatacctagtggccaattcaccaaagcgaattacccttgaaccatcctcacctaatgtgatcgaagccgtgcattccgatcaaatagacccgaatgatgctctacttgggtatgcggtagacgatgagtctcgaaaggcgaaggggagtgatctgcctggtcaattctggaatggtcgacaacgttagtagttcttgcatttatttccctatcattctcttcgattgtcctctaacaaagtttcctgatgctaactatatatactaacttggcatgaaacagaggctttggagaaatacgccaagtcctctcctcccgagttcaaaaacttttacgaggagaagatcaagtacaactcgtactttgtcaagttagtttgtcctttctcaaaaatgcatatcaacgtgtgttttctaaccgattcggagaatcatttcctctgatcaatccctaaagaatttactctggtgaagcctcggacgaggaactcaaagagtactatgctaaagggaagaagctctggagcaacattggatccttcttgagtggtgatcttgtcaaattcctccagaacgataggaaaggaacatttttcgctgggaacactcctggcgaagttgactgttcgtcttcctcgttctctctataccttctcttaaataccatatagagcgtgtatcaggtttgataatcgaaatgtcgaattgacatgtatgtttcttcacttttcaatacagtccatgtgatcgcttggttggctcgaatcataacctctggcggaggagttgaaggtgttgagaagcttactggcaagcctctggacaagtctgtcaagggctactacgagtcctggactagccgggagagcttcaagaagctcgaaatcgtctgagcatcttcttctctcttttcgtttcctttcaacttctctactccatctgtatgtaagaacatgccatctatgctgtcttctcatttttgaaggatggttcttaggtattggatgatcatatgtaattcatctgaacgttgtcttgttacccgaggatcagaaagagcatctcccaaagattgatgcagaagaacacccccaaaagaatcagggcaagaccattaggaagggaatcaatcataacgataaaatacaggagagagagaaaagagaagcttatcaggtagagtatgaagaaacgaagagaagggtatctgcaaaaaccagacaaaaacgtgtctacgaataaatgaatcagaagaaacaaccgcaaggaaggaaaagaagaatgatgaacaacaaaggatagatcagagatatcggcagagaggaaaaagagatgtgcagatcagtcggcgttgatcttcttgatgaaccgacgttctcgctcgcctgttactttcaaaatgccttcgtgctgtttgtatccccccaaagtacaaatacacatacacacagaaaataacaagaggccggtcaacttctacaatggatggaagaaatcgaaacggaggacagacaaacctccaatgtcttgacgacctccgagaactctgcgctatcaacggcgacactactttgttcctctagctttttgaccacatccgaccatctcatccctttacttccggaagattcgacgagctgggcaatagctcgtttcaagtcagtcacgactcggcgctgttgttgaccggctccggtgttgatcaaatcgactattcattaggtttacagagaggaagaatagtcaggattgaggtcgaaaagaggaaaagaaagaagacgagacatacgatcgatctgaccagtgacagggtcggtcttttgagtggattcaagtatcagttttcagatctcgagagcaaagcaccaacgggaattaggtacaaaaagagaaaaaagtactcacagcactctctctgatagcttctctgatcagccgtcctccctccttcacatcttccaactcaaccgtctctgaaaacctcattcttgcatgagcttctcccaatcggatcatactttccaactgtctcgtcgtagcagtgattcttctctctgcacttcttggatcaattccgactttacgcatgtcgacataggcttggacgagcgcctgggaggcttcttcggtaaggaccggatggattttggatcgggcgtaagtgatatacgccgtaaggacatcgatcggctggatccgtgggggaagaggaggggattaatttagaaaagaagttatagacacacaagaaggtaagctcaagagcagaatgtctcccgtagggggaaaagaaggtgggaataacaagacatacaatgatatcggtcgagccagagtctggacaatcttcaaggtagagtccaacaaggtgcttagcaagccgtcgatccatgctctcatcaattttgtcgagcacgaggtagagcaaatcaaatctagaaatcaatgtgggtgggagatctgaagaggaatagaagaaaggaagagtaagctctaccgaggttacaaagtcgggatagataaaaagaacaagacatcacggaccaatgttcttcgtgatgggccaattgggatctgatgatcatggatcatagtggatagagtcgaaagttgaatcagccaaaacatcgttaggaacagtagacagatacgcatttggaacaagatagaagaagaaactgactatatttagatcctaccggattagcagccgctagaatggatgttctcgcattcaaagtagtgataattcctgccttagcgatcgataccgtttgttgttcctgtacgaggtccgtttatactattagttggtctatgatcccatgatgccagaaaagcgcaaggagggaagaaaggacaaaccatgacttcgtgaagaacactccgagtagcatccgacatcttatcaaactcatcgatacagcaaacacctccatcactcaacacaagcgcaccactacgttcaatagttaaacggtaaaaacacgagttgtcaaaccacgtcagctgaaattcgtgtagttaagatgatacaatgcagtttaaaacagacatacgattcgagaacaagctgtttcgaatcaggatctcgggtcacataagccgtaagaccgacagcggatgatcctttacccgaagtgtagactcctcggggagcaattttgttgacgtactgtgttgagcataagggcaagttttgtttcttagcaagttgatctaaaattgaagaacaaagtatacaaatttccgggcggaatgaaaccgaaaacgacgaacctgcaggatctgagatttggcagtaccaggatctccgaccagcaacacattgatgtctcccctatatctcggtccaccggctcctcctccgcgagcgatactcttgttcgttccaccaaacatctgaagaaggatgcccttctttacgtcatccatctcccaaatactaggggctagactcctcgccagcagatcgtaaacatcctccctctgactcaattccaacaacctgcgctccatctcctgatttgcgctcaatgcgtcgctcccatgttgcattgatctttcgtgagagcccaaaacctcttcatcgtcctcttcacctccaataccaactcctgggggtttcccctcaccttgccttgtagtaggatcgtaacccatgcgtgtggcgttcgttcgcttgacatgaacaacatcaagatatgttttgaagagtgctttgatggttcgctgccgagggtttgctcggacaggaatagatcggaagataccagtgatcatgacccgatctccaggcttggtcaagtctacaagctcatcataaacgcaaagggagaccgtgtgaggtgtttgtccgtccggcacggcatctatcgttgggtcgaagaagatgatgatgatagcgatagaacatgtcaacatggggtggagcaaggaaagcgccgaataaaggtagatacaaacctggcgtctcttgcaatcgaacaacttgcttatccgagaatgtgcacctgttgtgaatcaagctcatggttcccatggaccgacaggcatccctaggacattgactaggctcggcgatctttcctcggtcgatttctgcttgagttgtatgagaacagacaagacatctgaagaaggctgcgaagaagaaacatggtataacaggcttagcattcagaggaagtgaagtagaaagcatgtcaatatactaaccagtttgcatatcgggaatgataggcgtagctcggatgacaaggcccttgacgcagaccaatttatcggtgtctgaaggaacattccgggaatcaacgagacgcctcccttggttccaattcattgtagaagaagaacgggacaaaaacacaagaactgaccatttgggtttaaatctctcatgttgacggtcttttctgcaccaaatggtcgaaccttgtacaatgatgcgccaatggctcgaagttcctcatctcctaacgcgccctgcatgccctgcatgccttcatcctggtcctgctcagccactttcaacatacagtccttgagcacttggtccatcaacgggaccatctcctgaggatagttgcacaattgatagtagagtttcttagtcggtgggtatgccagcaagttgagggtgtctaagttcaagttgttttgtccggtctgtctcatcaatcggaggtaagcaacatatgtcaagacttctccctgtcgagagttcgagagaggaacgtaatgagcgcctggtgttcgcctatcgtattcctttcgatacttgagtttgaattctcgaaggaaagtatcgaacaaatccatcgattcctggatgacgatgttggttccccagatatacttgaccatacctcctacctggctagcctgagcatctgatgagtgagttgactgggcagagaagactggattgggatctgatgatggaggctcggaaccttggaataaagagggtcggtcgtttgaaggaagagggacctgacgacgagctaaggcagcgggagtaccggaggtcgagggaagggaagagtgaatatcacctctgtgggatcgatgaggtgtggaaccattagatctattgatataaacagcgaatagctgatcagctggctttcaaaacatgtggaaagacgataattagatgaaagcgttctgtacccagggaagaagagaggttcagatccgtcgcttcgagttgatgacatcggaacattcagccgatcgaagtttcttctgggtgtcccagctgatagagaaacaaaagcgaaatggattagtacttgacctgtacctagcaggtttcaatcatgagagcgaagtaatgcagtaaaaccacccgctggacattgcaccaatctagttgatcttctagcgctataaatcaataatcaccattgttgacgccgagcccccttaagggagaactcatcccagtgagcactctgcgggaggccggggtagctctaggtgtagtgtcttggtcaggcgcatccgaggacgggaagtgaagtggggacgaggccatgatgtaacgtgggttgtgggttgtaatgagtggtgtttggaaagaatgatcaaacaactcaagcctggacgcgtcgcatagatggttggttactatccttaaacgcgtcgaaatgtgacttatgtgaatgattcgacgcgttagtatttgaatgttgcacgcgatagatgaattattttgacaatgacgtgtctgtttgctgtcttttgctttgctgcattaaccttcatccttgcctgttgtgtgaccccgcttgccatccttttggaggaacagctactcatacactgatgaattacaaacgatcttcgatggcaccaggccatacaaatgcccctatggcctccatacctcctggaggaggaggccataatggaatcacgtaccctatcctccgaccacatgagatatctgcctgcctccaagaccttcacgttcagttgtctgaggaagaaatcacgaagcccacggcctcatccatccagaatgcttgggcgcttctacttcagacatttacaggtgtaggatttcattcatttgaaaatccgagaacggttctactcggcatggtcgcgtacggcgtacgtcggtgtcccgttttgttgcgcaatcacctcttaggatggagttcactcattttggctttgctctctcttcaactgacatcaaccgcttcgcatgttgattgttatgacaggatcttttgaccgaagccaccacgtttcatatgtttttcttgcatgtcaaacggctggccaaaattgctggggtcgagacattcaccatccaagacttgacaagaccggagccagcgagagtgagagactccctatcgggcgtgattaatttcgccaaattcaagtgggtcttctcttgtgtgttcacacatcttgttgaattcatatgctgatgatattgaactcgccggcatcgtctagacacacctcaatggatctgtttgaggagagaatgatagaaggagagcgaatagaagaacggtgcgttcattctcttccaacaacgaattgtacaacattccggatcgttaatttatatcgattatcggcgcatctcttgcgtctgtgtatatcaaactgtgggattttgttgccagccttcaaatgctgcaaaatgagcatcaaaatgtggagcatgagattcaatccgtcaagtctgttgatttattcctcttcctctttcgaaggcgccatcattcctgactttgtgttcccgtttgatctttctattgtttcttcctccttctagacaacgaaaccaggcggatgagtctcttgttgctcaagctgaacaacgtgttgaaaccatcaacgcggagcttactctactcgctagggaagagaaagcgttgaagcagagcgtatttgctgtgacagaagaacgaaagaaactcaaagaacaacatgttcgtccctttttttttctttgttaactgttccaaaaatcagtgacttgtgtctgaaaagaattttgtctacattccgtgttctcatgttttaggaaacacatcaagcagagatcacagcgctctcgaacgatatagaagctgccaacagccgactagttcgatcacctgaacgtgtccgacgaaacattcttgacctggctgagaggacgaataacgagaaacagcttctgggaaattatcttcggaagggcagagagcttgggatgaaacttgaggtgatcggttcccttgagcaagtatgttctcaaccaggtctttttcttttgtttttctatactgttttcctcaacgccagctcttactttttgatgctttctttatcctttatcttgtat

SEQ ID NO: 2950 - DNA, 12247 bp, Xanthophyllomyces dendrorhous
atattaatacatcgcctttttcttccttgttcatttatagcaactgcaaattcaattaacaaacgcgacagataaactcaatcgggctcgagagtcttgggccgagaagaaggacaggttcagacagagcatcggttcgcttagagaacagctcaaaattgttctccaagaaaaagatgaagatgagaaagcactggaggcaaaagagaaggagtacatgattcttaaggccgaggtccgttctcttttttgacttttagatcaaaatcttaagtacaatcttgcaaaaactaacgatcagatggattggcgaactcaacagagcgacgagtatctcgctcggaaccaagcagaggcaaacgcgttgatcaatgaatactggaaactccgggaccacgtccgtcagtctaaatccatcttctcatcctctcacactctcatactctcaattatatccactttgtctaacgtcatgtatatgtctgaactggtctgtctgaatggggtgaaatacgacaggagcgtacatggacgagatgaatactaaacttggactcggattagaccattcataaggcactctttctttactcttacttaacttgattcttcaccttctatgctgcttgtccatctgagagacacatgttcttcttctgagtttctgtctttattcgatttccttctgttctgtcatctttatttttgaacctagttttccgggccttattctttcttcctgttaattgtatctgtacactagatatcaacaaacaaatcttaccaaactaaatctcagatcttcgggtcgatttgcctgtttatcgcctgttgatgcaagcctttacctattcttgacagcaccttccttcattcataataagtttgtacgatctaattgacccagagctctgttgctttttttaaaaggaagtgttggcatcttgttctctttcctttgatctcatctcgcccacctggctaatagtcaagagcttccaagaaaggaaaaaaataattggttaaaagaacattgtaaaagaggaagaacaacaacagctaagagtgcatacaaaaaagaaacaaaaatggtgcagtagaaaagaagatatagatcgtgaaaggatagtcttgagacagattggaaatcggtgaaagatttgaggtacacagaaggaggaaatcctcttctttggaccaacacactctcctccattttcgatctatgttgatgatcttgtggacgagatcaatagaagatcagagatccttgtactgcttgataacctgcaaagaccggagctcgtccaagtcttccagccttcggtcaactcttcgaagcggaacctcgtacgtcgcaccagcgaggtcgaatccttggttctatgttagggtagaagttagtaaggcagttagaggatgcagaattcctttttccaaaaagatgaaaagcaaacacgaacagtctcccaaacagcgacgtagtagacgccaagtgggaaggcgacggcgaaaccaaggatgggcaagatgtttcgtctactgattcggaaacccttgtaaagatcctctctcatagcagaccatcgctcgaccgctgggtctttctgttgtttcaatcgatcaaaaggtatgcagatgaatagatcgaatggttggcatctcgaacaaatggcggggctccttttgaggagaagaggaaagactaaccaagacaggctctttatgaaccaaagtagaagggaaaagtatgagcaaggatgtcaatctgggaatggaactatgacacgggaggagacctacggtagccatggtcacttgctctgaacacacgagtgggaatcatgatggatgggtcaagttgaggtgagtgatgggtatgaaacgcgaactctgggcacagtcttcgagatgggggtgagatctagaggagatcaacatatttcatagtcgacgtcctaatgcggctcgaagtatttctctattgaaccccaaacccttcataatacaaatttatctctcgcaagactacgaaacgttcgccaaaagactacacagagcgatctactactcgacagtactcatctccttccttcctttccctcatctccattctacactgtcccatccttttttaatcatggtacgcatcccgctcacccgtctgtttgtctcaactattactaatcacttgtccgatataaatttttcagcttctcttctcgtgagtttattttatgcttctgaacgtgtgtctcgtcgcttgtcaacatcgttgatttattcgtcttcctcgattctatcattccctagtgtcttcaaaacattgaccgaccaaggtttgtcgtctcgttctcttccttgcgtatccccgccctgactgatccaccagatattctccaaacttgattccacagaggtcaccgtagaactcaagaacgatctctgcatctcgggtacgctcaagtcggtcgaccagttcttgaacatccggctggacaacatcaaagttctcgacaccgaaagacacccgcatatggtccgtctatctatccctttcatgcttatgtaaatgactgctctcatattgaatcaactggttgtacaaattaggctaccgtcaagaactgcttcatcagaggatctgtcgtgagatacgttcagctgcctggtcaggcaatagatacccagcttctagaagacgctactagaagaggtcagcgtttttactttgcagcttcttctaccatcacctcttctctgctattcgacgcgcagagggctgaccgagaatgttctctttcgtattttgtgcttgttttgatcatgttgcctcgatgactcgtctctctttccctccatacgatcttgaacgtgtaacatattgcagaggcccaatcatcgagcaaaccgaaataaaggtccctacttcccgacaaaaataatcaaaaacactctcttgcgacttttttcatccggtctactctagatcacgatctcgattcaaaaccagagcaggatgtacatcttcttgtcttttcctagctgtccattgtgcatatatctatcaatcattcttaacagagataacattcttgctgaacgttaaataagaacactgttcatgactctcctgtacacgtcataagtttcgccgactcccttgtttctacagtcaagatccatggattcgagtcttacgagagcggacagggtcaactcgagaaggataaaatgagtgaagagcagtgtgtgtcacgaaacgagaagtaaatggaaatgagaatgcaacgatgaagaaagatagaggacgtaaaagatgaagagggtgagggaatatatgtgtagcacaacaatataggccgagagaggcgagacaacggttctcgaagaaggttgagccaaactgggtggaaggtgacgatccaaggtatgatgacttttgtatgaagggaagggacaaagaatagagcctgataaagatgtgaatagagaaaggaagaggatgcgaagagaatgcgttacacgaggatacactttgtggtccttactgattttattgactcgattctattttcccgacaacttactcaacaaacttcccttttcccacaaactctttccctgcccaactgttcctgctccagaaggaccgacggaagtttgtgcagatgatgccaaagcggaagaactaactagtgcaagtgccggcgaacttggtctatggtgtgagccttgcccttgcctgtgagtgtgagcgtgggggttaggatatgtagaggtgggcacagttgcagagggggatggcgcgccgggtgaacctgaggtcgaccgggtagaaaagagtgctgggtttgatactgttaatgcttgggactgcaacatagaaccagatggacgatcaagcaaacaacgtaggtcagataactttgtttgatgaagattgaagagcagtcgacgtactctggcagaaaatgttcgtcgatggattgagtcgaacgctcgttcgtcgcatacgaataagtgcatatagtccgcagggtcttcaaagaatgccgccttgtcctctgaacggtgagtaaacacagatcgaggatacatcagcgtatcgctcttcaacaaattgatgtcagtgccatgaaacatttggacgaacgactcttgagacaccaaattcgaccggacggagctttcgggatcggcttggtcaaagtatagatatcaaacgcagagagtgcgcagaggtactgttcgtctttgccctgatatttatcgttggaatgcacaaactcgattgatcagtttcgctatacaaatatctacacaacgaatccatgtcgccgaaaatgtcagaggaggctgaaagtatactaactcggtcattcttgcacacccagacgacaccatctctgatctccacaaatcgttttgaccatttgttcttcttacactgccacaacttgcacgatccaatgatgttaggacgttgaccaggaatattctgtcgtacgaatattaaaaacaatatcagagctatgaacagttatatgactggttgtaaatgaatgacagaacgagcgtacattgatattcaattgaccagacataaggcatcttttgatgacgaacgcgttcagcttagtgatctcattccacgaagaggctatcgaaagaagctgttcatattctcgaataggccgctctgttggtcataagagacaggagaaaattcatcgtgtcaacaatccatgttgtgaactgatgactgagaagcatcagctaatatttaccgataccccaatcctttccgctctcccagactgcccaaccacctttgagcaactcttctccttttcgcccaacatccaggtctccactttttctcaaagagttcaacactacacctgccgtggtggtctctgtcaaatccacatcgaccgactttcctccgatttgctcaaagtggaatcgcatccgtttgatcacgatcggactgggcaaagtcctagcatgatcaggaactgtagatgggctgatgtttgtcgagattgtcggtcgacgcgatcttactctaggagacaccttatctgagaaggatccgttgacaggtgaggacatcgtaacagcatgtgggggcggggtatggacattgtacgtcgagaaattgacgctggcgccgggaagatagggcaaaggcgggacactcggtggtttcatctcgccattcatcgctcgctgaccttcgcttgagtgtagttgaggctcggagggtcttcgacggatgacgggggcaacaggttgagaaggtgatgccaagccggtatgccgattttgacggattgtccccgatcgttcagccctagacggttctttagtagattttgctcgaccaagaggatgcgtgccagccggaggatttgattgatgagccgtcgtgatactagttgcagcggcagtcgtggttgaggtggtcgagaacggatctcgagatgaagaagagtctcctctggagtagcctgtggctacaggcaacgaacgggtggcttccattggaaccggtccaaggtttaagacccccatttcgctcaatggaagcatggaagacccagagcccgcgggttgcacagctgattctgatgctaatccagaagacgagggtccgctcgcgctggactttcttgatctgaccgctgagtgagaacctcctgttaacagagactctcctgcccaagcttgcgtctgagtcgccgagagattcaatgccaacagacgcttctccaactcttctgcaatcagcacgccgtccatgccgataactccgtgagcagaggataaatccttttctacttgttctcgaattttatgccgagcatccgctacgcgacgctctcgtcgcttgcgagttggaggagaaatcactcctctacgttccttcccgttaaagttccctttgtcaagttcggcttcgtggacttctcctctacctacgttcacatcattgccaccagcagcggaagcggcagcttttttctcccgaatcctcctgtccaacttctccttcttccttctcaacctgagactcttctgagccttgagagcggtggaaggatgtgcgagcgcaagcggcacgtcgtcatcctcgtcaccttctcgatctttcgatctttcgtttgggcaagccgagggattttctaaaccctctgtagcgctttcacatccgtcatcagatgatgagtctgagtcaccctcatcttcttcgttgtcttctccatcctcctcctcttcttctggagttgcttcattctcgtcacccctcatcggtctccttcctctcctatctccatcatcctcatcgccatcatcaccaccaccaccaccacctttttgtaggccttgtccagcatccgtcgtccgatttggacctaccggtatgttatttcctatgtactcctcgtgcttgccctcagtcccaacgggctcaactcgagcacggcctcttccacgttcactctctcctccatcttgagcgaattcaaagctttcccttccggtatcatccccggtgcacgacttgaaagagttgtaggaaccaaagagagtggaatatcttgcttcttcctgtaaaggagcacccagtgtgatcgttgtatgtactgccgcagtggcgggcggtgatgcatatggcggtaagacccggtctttcgagctaggagaacctgaggatggtcgatcttcagaaggatcgatgacaggtgagggagcaggtcgaagcgtccttgaagaaggcaaagaagataatgtctgttgggtttcgatctgtgtattgtaccatgaactaaaaaattggggttctccctctttttcgagccacaggccttccatgccttccatcaatgattcctgtgaagcagcggatatatttcctgatgaaggagatgccggacgtccatagacctgtttctccccttctttctggatcgattcgttacctggagcagaagaggaagaggaacaagtagatgatgctgatgatgaagggatcacttttggaaattcgtcaattaaccaaggtgctcttggcttccggaaacctccttcgtctttctgtttgtccagattcttctttgcttcttcttcgttatttttatcacgccccataggcgaactcgttcttcttgaagcgccactatggcttctacttcgaggtgggtgatggggaaacactgcgcccttcttgttctgatttgttccctcggctggagcatgaccggcaggtatgattggcctgggaggagatggtatgaaaggcgcatccgcagcgaatgggtcaagaggtggtgggagaggagatgaacatgtaggtggggttgatcgatccttgcttaatttcggaagcttagatgacgaggaagtcgaaatatgaattgtggatgtagtgaaagatgacggggacggagagatggaaggtcgatgcgaaggattgttttgaaaaggaacagagggaagatttggtccatccgttgagaatgagaaccctcttttcagctttccaatccgcttccctgttgttgatgttgttgtcgttggaggagaaagagcatgtgacgtagctcgtacgctgggaacttttggcataggttccccgtcccaggccgatttactccgcaaatctggcgttgactttcttccccgaagtttaccagaaatcttcctcgcccaaggcgtagacgtcaacgaggtcaattgggaagtcgcgcttgggctattggtgatatttgagagaggagagggggaagtagagcgcttgatagggcctacgacgtttgaagaaatactcctggatcggggtcggtttctctctcctggagagaccgaaagcattgatcggggatcttcctccttaacgaacgacacatgcaacaggccgagtccaagaccggaggtcgaagaaggtgtgagttgctcatatgattggtttggaacgttcggagggataggagacaaacgacccggtttatttcgacggttactctgagtttcgctacccaaaaaggaggaggatgaatccccggacgaagattcgtgagacggagaatattcggattcaggctgagagagagaaggttgggaggatgacgggtgaagggtcaagctcgtgagagaatatgaattgagatcaggtgtgggaggtgaagaatgaatgtcaggagaaggtgaagaggagtttgtctacgattcgagcggagagtgcgaaggattcaaagacgaaaagagatacgtgaagagagaagtctgattcttatgagcgtacgttatcgtcaaagacaaccatagagacaaatgattactgacagataacgagaggtccaatggagggggaggatcttttctgattctgatcttcatcgggctatgttctttctgagctgctctaaaatcaccttccaatatccttggcgagagctgtcatgtgttgattaccagcttatcgtcagttcgtctctgtgcttcctcactttcaagttgcaatgtccaatcttcgaaacatcctcaagatagagggtatatttgagccaggtaggcagaaatctgttgatactgacctggtattcatgcatggaaacggtctctttgagcagccggggcttcgtcggagtagtctcagtgtcgcctcctgatatagaagaggctcggatggggcttagcattccgccatccatagggagggagaccatgaaggctcaaattgtcaccaaggtggactagatatatggcggtagctgtatgcacaatgagctatctattacggtttcttgatcaattctcagaaagagacagcgatgaaggcaagagtcaaggacaagcaggagtgcgggagagtatgaaggtgagtgagagaagatgaatgagtgtttatttacgcggtggtcacaacaacgtaattgtgataatatgattatgtaagccatatagtcctctttggtctagtaaacgtatgcttgcaagcatgtttgaggaacaagcgtgtgatgcggtgtccttgacaaacacctggggaatgcactagagaagaacaacatctctaataaggacgacgcagagaaagatatcgatacacagagatcaaccacagcacaccaaacgtcgcccatctttgtttgaattataccgccgagcgcacgcccactattcgatccactatctgctctttccatttcatccacagtgcatcatcacgatcgatattgtccaaccacggcaggaaatatgacgttagtgaggtattacagattatagatttttcgggatcaccatactcgagaccacaaatttgaaacaaagaactactcacccctcggatgtatggtaatgagaggaatgttccgatcactggtagttggcgaaggaagttgagaattacagggaagaagtctctgatcgagtacaaagtcgacacggtcagcgaaaagaaccatcaggccaaagtcagctggacccggcaagagattgttaatttcgaagaaagcccaactcacccaaacaagttaagaaatccgaatccttccacacaaaccccgatgaaaggccactagagtaaacgttgttccagtacagagaggaaaggagtttttgaagaaatgacgtcaacgcaatgtactccttgtacaagacgagacgaggaagaaagaggatgcgaaccttgagaaagactaaaataaacccgagaaagaacgcgatggttcctcttattttctgtttccttgcgaagaactggaacgtcttggttggaccaatgattaacgttagtccagagaggaagaggatctaattcaatgtcgaacgagcgaatcaagcgatcaaatgtgattgacgaatctcatcagatcaataaatcaaatcagacagtgggatgaggaataagaatgtatacgaacattgccaagcgcaagtagagcgccatcaaagaacatgatgattcccaaaagcatgaacaacatgccaaacgaggtaagaccgaccccgatttctataaaatcagcaaccatgtttcagaatgagtatgagagacattctagtcaaccaacttcttttcgacaacttagccatataaaaaaaaagaatcaacaggatgaacgaatgccatactttgcatatccgtgagccacatgatgaaagacctgatgttgtgtagatgatgggtagtgctcaagacagagtgagggagaaactcggcttgtatagtttgagttcgcgccggaaagggtgatggggaacgacgtggacatgcacgtgtatgtagcgctggcagatgctgtgccgcgcgtaaacttgttacgcgtgtcactccaggttgtaagtggttatcctttctgctgttgaaggaaagacatcaaacagatcccatctacaacccatcctatcccatcgactttaacatggtgagctggtctgtatgtttgaaccatttgatgagcactcatgttgaaggaaactctcctttgctcttttgctacttttctttacacaccctaggttatcgcaactaccaaagacaagggcgtctctcgatccaacacggtcgagacccagcacgaagagatgatccacgatgctcagatcgactattatggcaaacgacttgcgacgtgttcatccgacaagaccattagagtcttcgatctcgttgatggagaggcaaagggagagccggacattctcagagggttcgttaacctggcatcttctctctttctttctttttttccatccgctcttcttctttattcctccttccgctatcggcttctattctctgttcttcctgtggtcatcaacatcacgagagtctggtcgtaaccttattcttaggataagagggctcgagtaaggaacgtgattggctcaagaacataagggtcaagatgaagacaagctcaagagggagtcggccgagaggattattcttgcctgattccttatagttaagggcatcattttgagtgattagcttttagatcctagctcaactgctttctttcaactacatatcaattcacatcctagaagttctagtgacgtgatgtcgagaatcactggataaagtttgatccttcgacgtttcaccctatcgcatccacttgtccctcattcctctccagatatcaacatgttatcttgttctacctttcgacttttatcgcttctttcctaaatttcatccatgaacactgtcctaatcttacgtttgtcttcatcttatttatcaattcgttcaggcacaccgccccaatttggcagctctcctgggcccatccttcgtttggtcctatcctcgcctcggcctcgtacgatggcaaagtctttatttggaaagagaagggtcgagccgctctcggcgcaccgtctacgtctgcttcaaaggcctctggaaaagctgctgtcgctgctgccggaggtaagggagatcgatgggaagtcatcaaagagcacgggttgcacggcgcaagcggttcgtttactatcacttcttgttatttcttgccttcctattgctgatcaaaaataccaatcatccgacgtcagtcaactcggtggcttgggctcccttcgagcttggtcccatgttggcatgcgctagttcggatagcaaagtctctgttatcactttcaacagtaggcttctttctattctcctcttgactaaacctgcgtttacttgtcatcacttctaactcttcttgttcaacaatcagacgatgggtcatcggatgctttcatctgctctgctcaccctatgggtgcgacctctgtctcttgggcaccttctatcgttcctggaagtctaaacaagccgaatgcgacctcggttcaagctcagcaatttggacaggatcgacaaaggcgattcgtgacggggggatgtgattcgaaggtcaaaatttggggatggaggtttgttcctatcccatcttatccttgaagcgaccaatatgctccagggataaagacgcgcattgatttatgctgactgtctttcgcaaatctcaaatgtcaatacagggatgaatcaaaagaatggaccgtagaggatgtaatcgacaagcacaccgattgggttcgtgatgttgcttgggcacccaacattggactcccgactgcgtacatagcttcctgctctcaggtgattgtttgactttttaatttctttcatctggatacatcaatttgctatagattctatattagc

SEQ ID NO: 2951 - DNA, 3133 bp, Xanthophyllomyces dendrorhous
ctatagattctatattagcccgaactaacgcttttttcttcgccctcgttcctggacgtgatccatccatcttttataggatcgaactgttcttattcactctcggtcgtcccccacttcgccttggcaaacgacttcgcttctgccgccgggcgaaactttccccgatgcgctctggcgggtcagctggtctctcgccggaaacgttttggctgtcagcggtggagatggaaaggtttcgctatggaaagaaaagggaggaggagaggcttgggagtgtgtgagcgagatgagcgcttgaacgcgacaggactggaatatttctgtttctataatgtgtttttttttggttctttctcttcctctttcatcttttctgacgatcttttttgaattatctcgaggctatcctccgacattctgtcgctcttcttcctcaacgctttcattgcgaaccctgtagtcatctttttgaactaatgagacagacactgcttccttccgtacagacgcaaaaacatagatttcatgtacctgtagtccatatcagatctacaaggagagaaaaccatgaataacaacctcaattcggatcgtggctgaatgaaagacattgtaccacggctgaacacgggggaagagaatcacgtgacaggtagtgttctcgcaactcactatctcggtcgaccaatcgactttcttgacctctcacaccctcctttcgtctctatatatatcatcagagagctccagatccctgattcatcaagcttatttagaaaaacctaagatgcgtccgacaattccttgtaggctcaacatcctcgttcctgtgaagcgagcgattgattacactgtgtacgcctttttctctctttgattcatttctctacttgatctcggacaatgattttttttgtctcaaatgttcatcatcatctgtcttgaatctcctttctttatttttgctttcttttattgcggtgtttagtaaagtacgaattgcggctggaggacagggggttgatcagtcggctaagcactccatggttcgtttttcaaagacctacttccctccctgtcaacatatataccacgggcgagatttctcctttctactggagagcacgttctctgagatgatgcgagacgaaaatcttatgtgatagggatcgatccaacgaggagctctcttggtactaacctattctgctctgttctttgttctctgctgaatcgtcatagaaccctttcgacgagatcggtgagattttttcttgctcgagcacaatacattgttgtactgttggtgccaatacccaatattcagtatgttgatacatgttttgcgttttctcagccgtcgaggagtcgttgcgccttcgagcaaagcatgcaaagtctactacgggttccaaggttgacaagatcactgtggtgaccatcggaccgacgaaaagtgtggaaacccttcgaacggctttggctatgggtgctgtaagttgacatcccttccatcagggtcttcatcatttctgttgtctgcttcctcagtaagcccagcctaagtcacaatactcatcgaggctcaaacatgggatcgaacaggatgatgctatccacatcaagactgagcagaccgactcaccagagccattggctgttgtaagctccatttctttattttgcaaggcttacttcttcccctccgcattcatagatggctcaatcttgtgcatttctttacccttgacctcaggccaagctactagcgagcctagtaaagtcacctcctgcggctgtagcttcccctgcgtcttacgaccttcttctcctcggaaagcaggcaatcgattccgatgcgtctcagactggatccattctcgctggtctcctcggatggggtcaggcgactttcgctagtactgtagaggtcggagaggacggaaagactgcaactgtcaccagggagattgatggtggtttggagaccgtccaaggagatttgcctatggtcgtcaccactgatttgcggtaagttggcatgttgggcccgggtgctaccaaattgaaacaacggccttcgactgatcattttgaacggcccctcatggtgattctacctattgctgctctcgtgaacgcacagattgaatggttggtgtgcatcttcttggctgtctaactagtatatatccgtcgagcgcctacttaattcaattttcttgtttctccgcattcggattttgtcagagcctcgatatgctaccctgcccaacagtacatatcatccttctttttattttcccttcaatcttatttttggcttaaatcgctaatcgcttgcttctcttgtcttgacttccatccaatttgaacagttatgaaagctaaaaagaagcctctcgttacgctctccccttctgatttcccagatgtcgatatcaagcctcgagttcaggtcgtcaacttgtcggagccggcagagaggaagggcggaggaaaggtagagagcgtggaggagcttgttaaaaagctgcaagaggctggtctggtttaaaaccaccttctccctctatcgttcccttatcagggttcttcttcttcttgctagtcgctttcctgtgtccttgattgaatgaatctatttttgaacaaaatgtcacctgcacaatgggtttaacatcaacagagagggaacaacatgatcaagcatattttatgttacttcttcaggatatgtctgacagcaactgtttctctttgctaccaagaacaaaacgacaactttgagtgtctaactctttcagaaaacgaatcgattttaatcgaccttctcaatgtccttctcgtcgtcaacgagcgtggggatgttaccctctccctcctcctcctcagcttcgtcatcagagtcaccaccggctccgaagtcgggcataccgcctggtccgccggctcctcctcccatttgagccatcaacttggcaaagtcctgcgatcggagaaacgtcagacaagggaagatatacgtcagctcgttcaagtgatttgatataaatggaggcgacaagagtcaagatcaaagagatagagaaaacgaaccattcctcctccgggtccaccagccccacca

SEQ ID NO: 2952 - DNA, 10124 bp, Xanthophyllomyces dendrorhous
ctcccataccaggcattcctccgggcattccgccggggggaccttgctgtccacccataccggagaactctgactcatcaggcggggggacctcgttctgttcgtcctcgtcaacccacttggagaagtcagtcttgagccactgaaccttaagtcggtctttcgtcagtcgaggccagaactcggccttagattcagctttgcggagaataagttggaggtatcgagacgagagagacttcttagtaagtgccgggtcgatgggagcgaacaagggaagggaaaacgcgtaggtgttttcagggattcccttgtcggcgctgttgagacaagaagtgggtgagcatggaacgtgatgaaaatgagatgataaaaagatgacatacgctccagctcgagccttgaaagagatgttgtcggcagtgatgtcaagctcaggctcgccgatgatgttaggaaggttaacagtcaagctgggatcggagaagatgtttctgatatcagctatctgcttctcttttatccttactaccttgagtgtccgtcacgttgcctatgcattgacagaaaaaaaaggcggggaacatacaaaatgatgttctgttcgacacgaagataaaagatgaataatagatgagtacgtggaccagttcctcatgacgctgatggaagacacagaacgatgaacttcggactggagaaagacggcgatctcaaacgaaccttgtcctcctcagtctcactggagcgttgggcccagagaatttcagcgttatgagtggccatgatgtagatgtttgggatgataaatatgtcgaggcaaaaggaaggtgaacgtcgaaaggcaaaagaaaagaattggaagagaacgaaaaagaagagcgagatgatctctcttctagaaccatctgttacgctcgttacacccatggttacgcaactacaagtcgatttcaggcccgaaaagctctctataagattcgagaaaagaggtgtagaacaaagaagatcccagtggatcagagaaggcgatcacagatatgtgtgtgtgtgtgattggtataaatttgagccgagatccgccaactgcctcgttaaacacgcaacagcgactgaaaagggaaaaagattcaaataaaatgggaaaggagaagaagtatgtacatggtgcctcatatcagaaccacagatgataactcttgtgcaatagtaccatccatagtttggtcttttgagttgctcagatctagggaagagcgcgaaacgggaaagatgaagctcttgtaccgtctcttgtgagaagtagcttgtctaagattacccgatgatttcatgggcgaaccaagggtgactaaccaacaacatctcattgtgatccgcctggacttgtgtctttctcaaccggtcgcccgtccctatgtactcaccatcttcacagcctcagcctcagccccaattgcagatggatccttgtcgatactctcctcctcattcgctcacaaagtatcaagtggaagcatccaacttacaacatcttccgtctcaaggcgcaagcagcagtctgagctccgagaatgggcctcgcatatcgttcactcatcatcaagctttaagtaggcaagcagaagagcatgatttgattaaagacgctgagagcagacatgacctagagtatgatgaagacactccacttgttgactgggacaaggtactctcgtggaagtcgtggatgaagatgaagtatattcgtgagtctttgaagcacagtccacatcaagagtctgtgcctagggtgaacagtttggttgagaaagagaatttaactgtgccctcgaccgacaacacggctctaacaacatgtcttttttatcgatcgtaaattccttacctcatcttctttcctcttcgggtaacagcgtggtatatcgctttcatcataatatcggtagcaggtaagcctccctctcggcagatcgtgagcctttgtttctgtttgtatgctgacccagaggtttatactgtccccttagtcgtcttgatgacgctgtaccatgaagaaattctggaatggttgaaacctgcggccacatggatgaaagagtatgtatctttcttacgaaatatcatgtgcatctcgtaggtgcgcaaacctattctgatgaacgacctgtttggtcgagcctctttcatcagtttacctggtggttggacaattccgatgttagcacacttgcgtcaattctttctttgcttctaaaaattgaacaccttattgacttattcccgtttgatgacacagaggaattttgttcgtaatctcgtttccacccctagggggacacgagatcatcattcttctctgtggtttcgtttggggcctctgggtaggttttggaattgtctctgcggggacattcttgggggaagtaggaaacttttacgctttcaggtctgtcttattcatcaagctttgcttactttattggaagaaacattgacctcataggtttcctatgcattgacagatactgctttcaatcacgcgctcgaaagattgagaagaaggacttgacgtacgcctgcctatctcatgtcattcgagagggtggttttttggtgagtctatacagatgttatagaatgagacttgaatagaactgattgcgcttcagaatttttcttcattagatcgcgctcgttgttcgattctcggcgatcccaggccattttaccactattgtcttttccacttgtggaatgaacatctggatttttgtgagaccctttcaattgtttccttttcatcaatgatccgatttggacaagattgagtattcactctcctggtttctttcctttgaattagtcattggcggccgctttgtcactaccgaaacagctcattatcgtatacctaggagtgatcctggcacaatccggcgaaaagacatcaaagagcaaatggatatctcgaatcgtcctagtgatctcgttgtaagttctgtcgagtgtgttctcaattaagaagtctgcaccaatgtaatttctcattcttttctgttctcttgaatttgaatgggggtacaatcagtttggtgacaatactagctgcttggtggatctggcgaaagatgaaacttgcccgaccggccgtgattcgtgaatggaaagagtcagtctcttctaccatgtgccctcttttgtcttcttattcggcacgactattgatcacctttctactttcttgttcaccttccacttatattgaacttttgtttccatgccgttctgcagaaaagaaagaatgaaccttgtttccatacaaccggaggcccaccctgctttcgggtcaagcgtagactctgtagacgtcatgttgagtgttgccgaggagcaggagcaggaccgatatgctagatacgcgcaagccaacagagctcaagaagcagaatctcgtatccagccgggttacaatatagttcgtgtttcggaaggagaagggcaaacagagaggcttggtaaatctgatcttggttttaattttgattacttcacattgtatttgatcaggaatatatatacccaggcgaactgggcaaggctactcaaaagccagtgccaaacaagaacctatactcaaccggtccacatgacctacctgtgaatgcttctcgcgtggaatcaaacgttccatatagcgttggatattccgatccgtttcaaacaggtgtggggcgagataataggatataagggtttaatctggctaagccagagatgcttcttccaagagtataacgagcgcatactccctcctttcgattcttgatatcatcctcttctttctatctatcttggggtcgtctgttgtataatcatattctgtttctatcaaaaccatggacatccgtttcattttttcttctcctcttctctttatttatttttatttttgttctgtgttcgacttgagcaagggaaaagagatgactcgtcgacattgtatagagaggaagcctacctccttcatgttcctactctcgcactcttccttttttactctatcttccacatcctagttcacgcgtgaagcaggctttggcaaatctggcagatccgatccgggaatgaactttggatcaagcatgtgtaaccgttgctcaagtgcttccaatctttgaactttgatttggtggaattcttcaagtttgctcacgtggtccgctcgaagtttctggaaagcctgttttggacacattttgtcacatgtagttttaggttcgttcataagatttgtcagttgtgagcaggaaagagaaagttcatagaaagaagacttgcctcatcaagttcttcatgctggattcatttccgacatagattcagatgaaggatcgaggaggaagtgaaagaatggatggatcaagaaaagccgcagattatataaggtcccgaagaaggataagaaaagataagttacgataaacgctcaaagtaggaagagagcagagaggctaaatataagaaaacgaacccagggataaagcacagtggtctgaaagacgagggcagaggtggcgatcgtgaagtttaggtacggcaaggcctagattcaatgtgtacagatgggatacaaatcagcagattcatcagttggtaccagtttgagtttgatatgagttaatgtacaacttggaggacgagttgcacttaccgttcggataaatggattgaccatcggactctacagggtattacaggagctatgtatttatatgtatgtaagcgtatgtgtttatgtatagaactcaagatgagaggtgtagcagagtggaaaagagggataaacaaaagcgtggataagaataaaacataggctgtgaattaacaaccggataaaggaaggagaagaagaacgaagatcatccgagctggtcgatcccgacaagtatcggaactttcttgtgaactcggttagcctccaatgatacctcttctctcatcctcatcattgtaactggaaacagtccggaccacagtgagcagtttcgagagtatgagtgtgcattgacgtgtatctgagcatgtacggatataaggacatggtcacccggtcgtgcaacgtggctcaaagatctacgtgggagactgcgtctgcagatcagcttcagatgcccgtctatgacgatgtgcacttcgaaaagacattcctctctttttcgttacacctccggtcgcctgcatggatacgccaaccccgttcatctgactaaccgccctttcgaaagagtgttatgtatgcatgtatgcatgtatgcatgtttctgtgaaccctcactctttgagctatctgtttgatgacaagactgtatacttacgtctagccatgcatagagaagtagaaagcaattatagagggcgactaaccattgtatgtcctgacgcaatccttgctcgtctgataacgccttctttcagctcgcttcacccttctccttctatggcgttgagtgacggttccgaagcatcggtcgcccgtctgggtgagcttctttcaggatgttacccgcttttcgattctctacgaaaatgcatacatctgcccgttcgcctgtctttctcgcccggaacctctcaatactgccgagcacttttccgttgatctatctcttgatacttactgatgacagaccaaatctgatcttctttgcacggaagggaagaaaaagacctgaaaaggatgatgctaagctaatcgtttgccctactaatccattccttttacccctcttcacccttatccctattgcgatccttcttcacactgatttcaaactcttccaaaacgcatctcactctggttcttacccatctacacagacgtcttcaggcagcgactatctacactcacaatcctgcaacgatcccctctttttacacctcgatatctctggaagatctttctgcagaataccatgctactttccaatataaaacctaggaatgattacgggacttggacgccaaaaacgacatccagagcaaagatagctggcatgtacaaacgaattatcagcacattctacccaagtgagttcgccgttctatttctaagcttgatcataagattacttaggttgatcgcgttattttctctcacatcttctcttctagctgtcatcattttcctcgtctactactttatttcaaccttatttccgactgtcgttccccagttgcgattcgatccatccaatgagatcagtcccaaggagttccagagggacaccgttgctcctgatcatactcattcttcgcccaccataccgttgcctatatcgagaaagaccagcgccattgcggccaagcctctcaaaaaagacgttcgtttatatgttgacattcgcctttctagttctttgtctgctcttgcttcttggctaaaatagaatcgaatgtctctccctcgcgcgtgctcggttacagcaccaaaacggcctgtggcaagatatggaatatgcagatgacaccagctccccgggcggcgtcgtaggctacacggtcttcaacaacctctgtcggtccttcctgtccctcgttccacttctacctctcaaatagcttcttttctattgattctcagttagtttactgatcgtgaacccctcttggtgacagatactgcgaatggtaccctctgtgagttttgcattcttttcttctgtgcaaggtgatggttgttgataataggttactgacacccccactcgtctcttgtctgcagtcgccgtcacgtctgacgccagctctcttccgcccgtctctacattccttagtcaagatctcaacggaccggctgacgaaaaactgtctgtcttttttcttttctgaaaaaaatgcatacgtgccttctatagtgagctgacgtcgacgttactgtcccagttttcgaatcataactcctggaatggctcgcgaacttttcgggaagcgagtcatcagactagacggagacagtgttggtgctatttttcaagctattccaaaatgcgtcgttcagccacctgacttgcctaatttcttgaaggtattctttgcggatgccgctcctgatagtttcttgggtcagtaaatgattacgcggactatatttttgagatcaaatgagttctactgatcttagttgttctccatgatacgcatatccccactattcacaatctactcaacagcacactactagtcagtgtgatttctttttaatacctacacgacgtctctcatttgcttcttctgtcccttccaaagctcatatactttaatcgtttcattttcttgcagccactttgtcgttgaatgtttttctggggcatggaaagcgctcatctctgtatccgacaagccgttggaagaaatgaacactccccgtcggatgataatagcacgagatcccaaatggagagacggcccgaacttgaatgcttggttcatgaacgttatcctgcctgatgccagtatgtattgtctttgacatcgaggatcgttccagctcgttttcctcatgatattcaaatttcatgtgggtgtttctcttctttcgatagttatcgaggatgaaccaatgtggttagatagggccaagagcggtcaagcctatgtgtttgaacgaggtcggtttaaagtctaatgttttctgccctctgatatcgcgttccacgatcactcaatttatctttcctttatgtctgcctcttgtacgttctgcgttatgacagtggtcattgtggacgtgagtatcttctcgccattttggtctaaatcgagcatcgtatttatccttccttcttctcgggtcgaatcagagatgggcggcgcataggcattcgtccgctgttaacaaatggaacaaaatgaatgccgagtaggttgttcctctcttcttctcttcggtttactctggattctgaaaggtttttatcaaatctgtttcaacttttgcttgataaatggttcgtccagagtttacgacttaaaagggcctttggttagtgatacttcaagtcgtcttcagtccttgtcaattggtctgtttctcctccatgctcactcgatcaaccttctatatagaattggttcgagcccctaaggcaatctttgaaacactctctgcagatctcagaagatcaggtttctgagaaacgtgaatcctctttccctctttgtttaatcttgacaggcctggtctgactgtttatgtgcaactgtaatcttttgttctgctagccgtcattacttatattaatcgacagaaaagcaaacgtcgagcgctcaagccggcatcacacgatgaattgttgatctcactaatggagatccagtctgaaggtctggctgatgtgtatgacgcccaaatggagaccatgagcaaacaagaacagtttgctcttgcaactcgaacaaacgtgagctccttttctatggttgcgatacacagtaaacccagtattttgatctcgtttcgaggatgtctcttctggtcgggtagatcatgattggaggtgagcaaatattcacgatttatagacagagcaagtacaagctgatgattaatatcatcgcccaatcaatcgatttcttcacgaagtacatggaaacggtctgaggttcgtcccttcattctttcatctcagataggaatcgagtcctaattgagcactcttcttttcctttgtgggcatctctttcctggctacaacagtcaccttatgtggatgcctcgaggctcggatgtcatcgagatattcactccacagtgagctttatctctatatgtttcctttgactcggaagaatgggcgtactgatctcgtcgcatttgtcattggtctactcagagggttcactcgagactagtgagtgtcaaccattacccgtccgtatatctaaccaactctcatgcacatactgatgctctatcttttccttcatggcgcccttcttccttttgcatgcttagtgaaattatcacccgtaagttcgctcgttgccctctttcttcccaccatgcgtctttcgtctcatcatactatgatctctcaacacaaaaacagccgctcttggacacaatcaccatgtcatcgtacgtcatcttacaaattacatacgtctgtatcgcctgagtgtactgactcgagtatttgatcttctgcagtggaacgacaccattgaggccgaagaatcctggcgggctaaaggacacactagctttcccgacgactttcagggaaccatgataccgttcgtatccctcggctctctatcaattttgatggttgttcctgcttcatcaggctcagtctttgttcaatcttccttttctccacagagtgagcggaccattgatcaagaatctcatcaaacgcatcatcgcggataagtactcccggaaatcgtcactagccgagcatgacaaactttcgatggagatccattgatgtctgcgctatatacctctctcgctccattcttttttaatcccttttcaatggttttcgacagtctgggttgtttggaaagggttcatgtgatatcttttcgtccttttcttcttgtatttctatttctttccttcatcctttccttactttggactacttctctcactgcatataaaccggtttctaaccagtaatcgataacatgatgggcacatccaatcctgatttgccctcttcataccaatcttcatttctcttaggtcatatatatccatagatatattcaaatatgtttagttgatatccccttttcagtatattttctgacggactgactaacgggccatcatgccaagactattgctgtaatgactgacatctatgtatctctaggatagaaacataatatgcaagctctccggtgattgtttcagatttccatcttctagttcatcctcaaagtatcttttgcccaggaagatgcttttcttctcttctcaattaatcctattaaacgctccaacaggccagtaggaaatcaaaggaactggcgaatatatatgtggatgagtagaagctaaatagtaaatttcacgtaatttattcagttagggttgttgagaatct

SEQ ID NO: 2953 - DNA, 7698 bp, Xanthophyllomyces dendrorhous
acattagatgagacaaacatccaataaactcggcattccatcaaatccgtcatattcatctcttccaaatttgctgctcaataagaaaaatggtttcggagaagttcacaactgatgacaagctcgacttgttgtttgacccagagttgatctcgtcagatgtcaaggaagcgttagctgatggatttcatgtttgtccgtttcttctgcttgtcgcttcctcttctcaagaatgagagttacttaatgtcttgatattctgcttcttgtatcaatatggaacgggaattcaaacgacagatccgaccgttgtcgacaactgactataaacgatcacatctggaactgctttccgttctgactgtcgctcctgtgatctcagaggaggtctatgcagatgtcgtaggagatatgaaactcagaggtcggagagggggatatttccctgttggttcgttctggtctttcttcgtatcttttgcttttcttgatcttgatgatgtacacatagaggctaaggaatctgacaagtcggcatcctttgctccgtgcagtgatcgtccagcacgagactgatcagcttgtcgcaacaggaacgcttctgatcgagaggaagtttcttagaagtcagttgtcaaactgtcctcacttttctcgattcggttcggtttctttgtccttgccggtgcttatagcttgtactttgcttgctcacagatgctggactagtgggtcatattgaggatatagccgtttcgaaagacctccagggaaagaaactcggactaaggatcattcaggcactcacaggtctggcagagagtcagggttgttataagacaatcttggattgcaataaggacaacattcgtacgtgtatccatactccggttcatttgatcgattgatatctaagggttgtgtcatctacgtacaaaagccttctatgagaaatgcggatttgagcataaagagtatgagatggtcagtctgatctttctttcgtctccatccgtcctgaactgtcaatgtacgtcaagaatttaccaagaagaatatgttatattcctgtttaccgtctctgttttcaaggtcaagtatgctcttaagccggccgctctatgatttccatgtcacttgatacccacacactgtcgatagagcctcgcgcagtttcatttcttcccttgatttgtaactaacaggctatcgtcgccgagacagtacatcgataggaatgtttgactgtgaacagatttcgtgaaagaattgaaagggtcggaaagactgataacgcttgttcattacctgtcaaccaatcaatcatctcatctaaatcctgtcacttcttaggtcatcgtgtctatttgcgcttctccactttttcctttctgcatcgatcatctcgacatctttcgtgtctatagctagggatgcaacgctctacctcattttctgtaacggtaagaagtataccttctctcctcttaagaaagcgtgtgacgactcttgtatgctcacatgcattcaaacaatgtcgcctaatcgtgttgtagaggcctattcgtcgacgacgatcctctattaaacggtcaaagtcactgcagaaatcctgtcactctgttttggaagaagatttcctcctccaacctcaagaacccttccccatggaggttcctatgcacccgggatcgtctttcttgagcggatcgaagttgactgaggctgactgtgaggttgatcttgcaacaaaagaatctgttgtgccaacagacatgtccactatggtcgccacttcaagtcaaacgcatctgaataggcctgcaactacggcatccttggatatgaaggaggagcatctgccgatcgaatgcaacagcggttcaatcgagttgacggttggcagtatcaccgaggctctgagggagaagcctcctgtcgaagtctccgtatcgacatcggcgaccggaactttgtcacctcggaaagtgcagcctgacgagcaaacgctacagccgatcattcaatcacctacttcatcttctcccaatgcaatcgattttgaagaattgacagccttggataaaggggttgcaaagacagactcggcgcatatatctgtccttccaaatgattcggagcttttcgaacacgatagaccaattcgattggccgacgatgtcctgtcaactactttcagcgatcagacttacgaattcaaacatatttcggactcaaaggtaccagctttgacagaaaacccagttgttggtagcaacaacgaggtgtctgtcaagaactctcagcatcataccgttcatgcgacaccacttgacaatcatcatgagttctcatttgttgataaaccaaaagaagatccgtctgttgagactggccaagttagtccgtcggttatcaactctcagttgtctgagcgaccagtctccatgtctggctttccttctcccatcgaaacagcccagaatgattctgatattagagaggggaaaatagacctgtcggctactcatctcgagatagatgagcaacatgaacttgtcgatcaaccgggaaacatccccggagaaacccatgttacaagtgaggaggtctttgaagaatttcttgaaggaacagaattgacaccggaggttctcatccgtgaaggacaggacttgatatgtttctctccaggggtgagtctggaggctttgtcgttcatcatgattctagtttaattgcattagttgattttatcttcaaaaatcactacaaggccaccgttctcaattcgcctcaatgcaacacgctggtcgacataggcttcgaaggtgctcaaagagatgatatcattaccctgaaggatctagatgtgagtttggtgttgaaaacacatgcatctgaagacagtttgatacacaattgtttgacgttacttctcaatctttttaatgactgacctggacttgcgatcttcaatcaatcgtctatatcaaattgttttgacccgaaggcagatcaacgtgtgataggcgagttatgctccgacgaagaagtacgtctagtctgtatttacatcgacttaatgatgacagctgtctgactagataagttcagtccgattcagatcactcggttcaagacgagatcccgactcgatcaattggaagattttccgctttgatccccacaaacatacctcttctgactgagaccgatggaagcatctctctgacttggccaaataatcaagacaaggataggccgtctgttcatgtgagtggatcgcactccgtgattacaagactgcatgactcgtcgtaagctcaccaagatattcgtttttgaccgaccgcagagtcaagaggttgagccgcatgatcagcttataacgagttcgccagtattaaagaagcgaaagatttctactcctctggttggtgaatgtcaaattgtctgcctcttatggtcagatcaaatcgctcaccgtgtgcgattatatacaaacaggatagaaatccgatggccatcaagaaactaaaacaacctttcaaatgtccattaattactgagaagacatcagataaacttacagcacccattagctcccagcctacagcgagtagcccaatctcttcttcgcctactcctctacctgagctacggccgatgctggctcagcgttcaagacccttaagcttcaaaccactcactattcggcctactgtccagtataaggcgcttcgggacaaattgggattatgttcaacatcgaacaaccaggatgtcagatcgattccggaccactcaccagcgtccaaggactctgatccggaattagaggtcagatcaagatcgatgtccaaacgaaatcctttcgtgactctgaaggcatcggcgcctttcgtgtcccctgtgacgacttcttcgtcaatacttgcggaggggacatcctcgtccattggatgcgcagggaaagtcactcaaagggaggtggctaaattggagagtaaagtccaaataatcaaacaggctatcaggttagtacaaggagagggaagaagacaggaggaaaagcaggaggagttgattttaaagtggaaggatgctggaagggaaatgtaagtactttgcctctccttgtgaacttatagaaggaccacctgttcaggcgaacggttatttactagcgttcgcaaatacatagctctcaacttttatgggacgagggaggttctgacaacccagccgataatttccaatccttggaaccgaaccccttctcatcttcgcctcctgcttcctctctcttcccttcagatgccttctcacctttccctcgccagtcattcttctccaattcgatcttctcggaccgccctctcctttctactgtcgatgactcggccaatgaccatggcgagtttttagaacgagagagatctttgagcttagactcttcgatcggatcaccttcagcctatcgaccttctcgctctggtggaagcgggcttggaatgagcgcccgacggcaggtacggggctatctagagtcattcgatagagccgtgtccgagaaagaagaattgttcgaccaatctttcatcggaagaaccgaaatgacagacggaagagacgagcagaaagaagaaaaagaaggggaggaggaagaggaagaggagaaagggtgggatattggaaagatgcttcggacagtcttccgtacggatccgacgctttgtgagttacatctatttattcatcttctgttctcttttctcttcttccaggcatagaaatagcactaattgagaggttgaaaacgtaacatacttgatggaaaatcgtgatacgattatttcagttgggtgagtttcttccagctgtttctcagaactggaccaatttgttgggtacttggctgacaaggcttatcttatcacaatgcgttgatgttgggactaatcttcctcatcccatgcatttcttagttgggatgattccattttcgattgggaagaatagatatttcttcttctctacattgtttcttttatatcatcatactcgagcacttggtttattcatgcatgtttcatcgtctctccactttgataagttcacaaaatagagaacttggaagaaagcacgatcagagaggaaaagtggtacaacgggggcatatataaagcgtctgtttacaacacaacatcgttgtcaccgccgctgacgacgacgacagccaaaaactaggatttgctattaatacctttctttagaacgtcttagcctgctcctccgaagtgaatcgaaggtaaggcttgacagtcttgaagccagggaagagctctgcggagcgcggcagagcgaggtgaaagagaatccaacagtgagcaagcttacgaagcacggtacgaatctttgagagaaggacgacggaagaactcactctgagcctcgtcattgctgacggaagggtggatgatggccgggtcacctctcttccagttaacaggggctatattcattttgagaagaaaaacatgcgcatcgttgaataatctcgtttcgctagaattaactgggaagagaccgactgactggtgattcggtgcttatcacccaattgaagagaatcgattgttcgaagaatctctccgaagtgtctaccggtagaggcagggtaagagatcaacagtctgatgattcccttgggatcgataacgaagactgttcggacggtgaacggaagtcctttggcgtcaacgttggtagcatcgagggcatcgagcatatcatactcggtggcgatctttcggtccttgtcaccgatgatagggaaggtgacgctggtgttgccaacctcgttgatatccttgatccaggcatcgtgggaggcgatgtcattggcagagagaccgatgactgcgtgagatttttgcgcgagaatcaagtcagttggggcgaggctatcttgagttttcatggaaagataacgaacccttcacgcctcgcttttcaaattcggggtaaagcttagctacctctcctagctcggtggtacacaccggggtgaagtcatccgggtgagagaaaagaactgaaaagaagaaggaagtgacagtgtatgttagggttttttttgctcgagacagaaggaaaacgcagaaaagtcaaagctgaagggtaatgttgtccgactgaccgacccaggagcccttggaccactcggagaatttgatgtttccttgagtactgtgtgcgcgcggattgttatctcaggtcagaaggcagataatctgtgcaagtggggtgaatgtaaatttctgcttacgtctcggcctcgactgtaaacgaaacgagagaaagaaattcagacaatcgagccaaccaggacgtgtaagtcgttaagttcagaggtgagaataacagccaactcttcggcgatcaagagaggagagactcacagtcgggagcggaagatccaagtcgaagggtaggcatgatatcagtagatagacgggtgattgagtgagggaaagatgggaatgacaggaaagatgaaagaaatgggaagatgatggtcgaaaagagaaagaaataggagaaatataaacgtgagaaacgacctcgaagagtttgagaaatgatcgcaagatggtgcgatcgggttcggatacaggatgggaaccacgtgagatggcgtcttacatcacgtgactttagccactgccttgctcttcaccctcacctccacctctacagtgtctgccgctcaggactggccgacacaggtcttcatgacgttggcgcggcagactctaaatgaagtccggccatctttatcgtggcccacattgatacctaccaaccaccttgaatcaacacgtcttcttctcttcaaagcaattttagattgctccttttctccctctactttctatcaacggacaggtccagctcggaaaacatgtcggaccgtccaaccaacaggttgagaaatccattcagatcctctgacggacaggcaattcttgtctctgggtttctattgagtggtaagcatcccacttttctcctctttcatagatatcaaatttcttgctaagactgacttggatctcttatgtctgtctctctcttgttttccctctgtttcttctcttcttcagctcgaacaactccacattctacacgggcgtttgacccatcgtcacttccggtgacgaatagtccgcccccgacctcgtcccccggatcccctcaacacagctcagcaaatcgagtacgaccaagatctggatcagaggatactccttcgaatctgttcacgttgaaggaagaggatgagcctacgaagacccactgtcgaaaggctcttcggtagaatggcgtcgtcgccttcaccgactcggacttgtccggcctcctaagcaatcgatcggttctgattggcagtgttcatactcttctcgatctgaagtacccgcttcaccttactatatttagctatgatagcattcacgaattcatacttaacgaacaaccctactgtctctctcattaacgaatttttttttccacttcttggacgtcgggtctgatttataattatctttgactagactcaatttagaaaataaattcatctgcacccttaaattttatgtggatcgctcagtagattacgtactttcc

SEQ ID NO: 2954 - DNA, 15617 bp, Xanthophyllomyces dendrorhous
ccttcacgtttagtcattatccttattgtgtttttcctattatcttcttccggcccagtttttatgaatacatgatatttgcgaggaactaatcttttcaagcccaggtctaatgtaggatggtgagacgcacgaaaccaaaagaaagcagaagaagaaaaaaaaataaaggaaaaaaaatatagtgccgagataggtgcaggagcaaaaggcatgaagtcaaaatggccgatagagaaaaagaaaagcaaagaagaacatgctcgacaggaggaaaaaaacacatccacgcataccaacgcccattagctgactttgggccactgcaacaactgacctctatcttctcgcaaactgaacaaccaaactcccatcggtcgacttgccatggtggtcgaaccgtcgactccacctatcattccgtccagccaagcatccctcaactcaattttgattgtattcgcatatcccggaattggaatagactccttaatctccttccagagatcactggacgcgatcgaagaatcttctccagccagaagccaagttggatccaataccatctgcgtgatcgtcaaaaaggtaacatccaacgcgtaaagaggaagactagactttgtgtaatccaaaaagttgcgagctatggtgcaaagccgatataagaggccgagtcagttatatattcatgaacagacaatctagagcccagtgaccgtacctttctcgtaatacacagtctgtataacaagaacatgcgcaaacatcagtttccattggatctcagatagtttaacaaagaatagaacactgactttggatccgtaacgatggagtttcttaccacccatctttccttccttgcccttctccccaggtagtattagtcttatgagctcgacgtaaccggaactaccatttgccttgttcgcaagttgctcggaacccatgtgagacatgctatttgatgcgacgatcataggcacggaaagcatatcgactcgacgctggtcggcaatttgctgtcggagatacggcaaaaggtcttcgcgatatactttgatagcaacagatattccaacatcaacgtcagtatagaattcaaagtgtttcataaaccggttcgaactcatatggaaaacacctaccatcttcttcatatcgccgcaggatactccgtactttcagcagtggccggcctttgcagatgaccaagaatctgttcaaagatatgaatgataaagaatggtgctcgaggagtctgttactctgcaagggagaaaagaagaaagaaagagaacttacaagaccccctgtgctaaacattcagcagagacttcttccaagcccgatcctaccgcatcctcatacataagatctgctgaaagggcagccgcccacaactccccagcgatttctactcgatctcctatcaaaccttgactgaacgagccgatgtacacgtcgcaacgcctgggcgtccaaccaaatgaccttgcctcctcattatctaggtttacgagtcgtttcaactggtcagactcgtactttcctaccaaaaagatgattcgctcgaacgcaatctgcattcccactatgttcgatgtaggggaggtagaattattcgactgaggaaggcggaagtgatcaaccaggttgtcatatcttaaaccagtataaacaatcaagacattatcagcgaacattcgctctgcaacctgagatgattatgaaccgaaacatacctccctccaacggccaaaacctctcgtttctgactcttcctaacacattcgaagaagactccagatttgaatacagttggccgacttgaagttgtaggcttgaaaataatttttcgtcgaaccccaaacttctccgcgaaagagatcacttgcttgatttcagagattgcattgtgcaatgcagataacgcttggggaaatcgttgttgtagcttttctgttccggcctccaaaaaaggttctaagcaaacgatcaaaggagaaaagataaatgattaatatgaaagtgagctcaaatctaaaaactagtgacctcaccatcaatgtaccacttttccagctcgtctactattggtcgagaaagatttagtcgagaacgcagttgcgcgaagctgactttcggtcctatgtctttgagcatatcgcagacctcaagtcgacgtttcgaaggtacatgcgacaaaaccgaactcaaaacttgagatgcagcatcatgagtatggtatgtttatacagatcagcattaacaacagtatcgaaacaagactagactatgcaacatacccgagctgtgattgatttgaaactcccactcatatcgagtagacagagcaggaaacatatccaatattctatcgagaactgctataagttcggcttcggaagccatcgaccgaactggagacaagatatcgtaagccacctctccgaacgacgtgggctgcccaccagtcaccgattctcgatatgattgtccaatatggtatctcttcaaacgagcaagcttagttctggccacatcgcgagcgaaggctgggatagaaaaacgaaggtcgaatcagctcataatggcagacatcagttttggtctatcaagactcacaaacgagacctgaattacagacatttggaagttagctcaatgttgacgctaaataaacacagagatgaaaggaacatgagagaaaatctagaaataagcgacataccatcataaggtagctcgacttgttggccttgtctatttaaaaaccgcgctccaggttccttccggaaacccaaaagctcagtgacaggcaggaggggcggtggttcccagctaaagaattatatagagatgctgtcaaaagctgaccatgagtttgatcatctttaatttacagaaacatacttactcaatagcaccatgacgtcggaacagatctatcaaccgttcttttaccatgctctcgtatactctgtggtctcgagggccaccatcagggtcatcaaatgtaaaatccgccacggcgtcaggtatttctgaatttatgcaagtttttcattgtgagtgagaaaagcgcaaagaaagattgacgttttgttcgaaagactaacgcgagaagatgtggttgaacagtaccggataacgtgtggatgttggattgcctgaatgagaacgaccagtcaacatcacatcaaaaaagcaattcttgaattgataaacttaccaaacgttcgtactgatcaaaaatgtacgagattgcaaagaatatcgtcaatgatagtaatcgagaagacttgatggagttcaataggtgtaaatactgaaacccacaggcttccaagaagtactcatcctctttgatagagggaagcatgccgttggtaagaagtgtgatagcccgaggtcgtctagtcggatcgtgttgaagcaataatgagatgacctttgtttgttgagacttttgtacgctcggccaagaagaaggaaagacgatagaaggtgttcggagacttcgaatgacgagagctctttccatgcctgtcgacagagggaagttcatctcgaagaatatgatctacaacagcaaccacaaaaaactatttgtcagtgtatgatcatagagccgacggatgtgaaaagaaaaacgcacacccaaggagtacagatcagctttgtcatcatagcggcttccatccttacgcgccgtaccactctcaacctcaggagcaatgtataacgacgttccaatgcctgtgtagtaatggaaaatgagtgtcagaaaaaacaacacgtctgaatggaaaattgtttcggctttcttaccagaggttaagtcaacggagtctgcgagagatctgttaggagtattgttcatcgaggcatcggttgatgcaagatcagtagcagcaagcccaaagtctccgatcttgatacagttctcgtgatctgtaaactcgaaggtaaggttagcattgctcgctaatctgaacttacagagtagtgtagacaatatgtacacaccgatcaacaagttcgacggttttaaatctcggtggacgatacccagattggccatgtgcgtcaaagcttccaaaatctgtcggaataatctccatgcttgttcttctgtaagacctcgagcaatagactagaaaggattgatgttggtcaggtttaattttttgatgttagacactcaaagttgcgagttctacaaacctccttaagcgtttggttctcaacatattcctgaagaaatgacgaaggagcatgacattcagatcaagaatacaaaggaggtcatgatcataaaagaaaacaaaccatttggatataaagcactcttgtattggcatgatcggaagacaccatcgagccatctgtgaatgaaggctgaccaggaacagcatgtcccgtaggcgtagacaccaacagtctagatttcgagacctcttcctctgttgatgaatcttcggaggtatcgtcgctctcatcttcttcgtcgtcgtctcttcggtcgtcgtcgtcatcatcctgctcgtcatcaccaaaatgtatgcttgggaaactatggctccgactctgagtgcctctaacagagagaaaatcgttgtcggttggtttgaaatcgaagccaccgaaggagatcgacggagtcgtggctccggatgtgtcgccaagagaagctaaggaggaggtcatggtggcgggctcgctaactgttggcactgacactggaacgatagcagcagtctcttctagccaacatgtatagtctgatgacattcatgcgagaaattaataactccacatggttttcgtataaaatccagactactcacatcgcacgataaattgatgattcagtcgactgagagcattgacctctctaaaaactttttgctcattgtcttcaggccgaagtttgactttcttaattgcatctgatctcggtcgacagtgggttagtatatgtatacaaccagagatacaacaacgagacttacagaaacgcccgtctagtttattcttcgccttgacgaccttgccaaaccctccttctccctgcgcaacgacaaatccatacttgttaaataaggtagtaaaaatagtgttgatgccaggataagactctcaccaaaaattcgacctcctcaaaatcagctcggtatcgagaagtcagtgccaactgatgctctgctcctgctccatcgaagaatggattatgtggcccactgatccctggatattttttattgtatttagataaaccaaacgtgctgctcaaacattctgatatcgccgaatttgtgaccaaaaagaggtattgcggttatcatcaaggaaacaagggtttaaataagaaccagaacgacagatcttacttctaagatcttgtttggaaacatcctttccagaaacggctactgtgagattcaaattggaaagttttgtgactgcttggtcggctgtccatctttcgcgtgctattgggttcaagagattttggaggataaccacgagagcttcagggaaatagaagtcatctaaagatcacgaatgtcatgaagttgcgtcataagaacagatacattcagaaaatgaacgcatgcctcagagattagacatatcagttctttgaaggacaaaacagacgtactagaggctatcaaagcttgtaggttcggatactgagatgtgaatcaaggcaagcatgagtcgagtatctagatgataaaaacgaatacgtatccgggaatcaccttgtagactacatcagcaccacacatcatcctcagaaatgtcactgttgcatgccacacatcccgcttatgattgaacgcgtgcccagcttcgatctcatcaggagacaacctatgtaggttattggcgaaggagttttgtcagcatcttcgcagatcgacaaagtaagacaaaaagaaggaaggaccgaccagttccagggaagatctcttccgcttccttgatctccaatctcgtaaatttcttcgtcaatcaatgatggtgcatcagagaaagggtttgaccggtccatgtcgatgatccttcgtcgatagcaaggttctgagagacgagcatctccagacctgcaagaaagtataactgtttcgagacagatgtctacccgtgaataagaagcaagagatcaaattagtaactcaggcgaatgatgagaatcgatatgctgatgtaagattgaccatcatgagtcactccttgcttcctcatagcctctaaaccagcaagaagttgaatgaaatggtcctgcaggatacaatatgattagaatacataagttttatcatcctcgaaaaaagatgagaaggatactcactttcgccagctcgatatctaatctcccacaaactcttagtatacccttcagcctctcacctcttccaatcctacctgtcaacagacataatctcttccactttttcactcccgtctgaatttcggtcaacctcacagccagtactggaacgacttgatcactcttcagcgctaacactttagtcttcatcgtttcaaacagattgttgagcttatgacttccttgagcggaagagtaataagctgttggaaagtcgaccatagtgatggaagtatcatgtagttgaccaggtgcgtcgaatatcgatggtttctctgtattaggcagagatacgatggtttggtgctttgggatggcgatataggtcgtccatagtttgtctttcacgccacccacaattgtaaacgacccttcgatcccacatgacattgagttttcatcatttgcgccaaacgtaacttctgtccattctccagggtgggagagattattagatacattgacgactgctagttctgcctgacgggtaagttgaagtcgtttgtgctcgttgacctgttgtgtaagtaagtgagcgcgctcctgagctttcctggcaagctccgtctggtggatttgatttgattcataaagtgcctatttgaaacgataatgattcatttcatcaacacagtgttatttgttcttggccaatatagaggtcttaaattaatgacgagaaggaaacataccactttctgttcctcctctcgtttgctcatcagcacagctaaactatcagctgctgggtcgaagtccttggttggagggggtgccggtggcttcacgttgtctgtcaaccaatcttcgatgaacgatgcaagctacgacgtgttttatgtatcgacatgatatgttcgaactcttgtcaatgacagctgcagtatatggccaagtggttagatattaactaacgttgaatacgacgacgtctcctatctgctctcgagcggcgtggttgacgagtttggtgagaaccgacaattgagacgcgctgacattttttgaatgagcaaaagatagattgggagatagcttcggatacatcttggtatactgtatatccaaacatccgcaatatagatttatgcgaatggttccaaagttcaatccccaactcatgacccggatagtgggtaacgaggaaaggctctcgataggcgagaccaacatggaaacaaacgaaccttcacaaccaaaacgacgctgacgactcgagcactgacatcaccattgtctccgagatcatgttttccacttagtcggattccaaactctccaccttcaacacctccgactttgccccaagctttcggttgatttggcaaagggttcgcgagaaagtcatcgccatagatacttttctaaccgatgttcaataatttgggaaggagtcgtacgaagaacagacataagtcgcaatatgatcaaagcagaaagacggtcagacctgatacatgtcccatgagaatgctgttgtgataaactatgctttcatgaagtgtgaaagagaagacgaacaaggacttcaatctctgtctgctggagttctctgattagttcgggtgtggacatcgttcgaccggagtcgagtttgctgattgaggcgataggttggatgaaagagagcgccaattgaattcgaaaaggacaagaaaaagggttgttttgaatcagaaatcggacaactaagaggctgcgagagccctgaatcagagactcatcagggatagggtgacggtcaaaaaggaatgagaaagttgaatgagatggttggaagattgaacagaaagcgctaaagaagtgtcatcatttgatgtactggttacgcgttacaaacaaatttcagaaatctattttgtgataaccgatacttcagtttggaaaagaaagagaggacagaataggtatagacaattgaaacgaagaaagcatttgaaagagatagaggaaagatacagaaagcaaagggtttcgaatgacgggagctcagatggtcaaactccagctccttcttccttaaacttgagcttagagccctataactttcataatcacgtatcctaccgtgacgacaacctaagagaacagtcatggaagctacgagtcagccagtatcttcacaaaccctcagtcaaagacgaagagaggaagaaaaaacttaccccagtggcgagcacagtagcaggaattccgtttttcaagaaatctccggcattcagatatcttctgcctaaagaatcctcctgagagatagccgataaattggggaatcctatcatagaagtaatccatacatagtctcattcgtcaataatcacaacccgagggatttgaagagtacaagagaaaagtcgaaactggacaaacctgagacaggaagacccattccggctgaacagatcaaggcagtggccatgatgagcagtctcgggtgaggagtttcaagtgattcacccactcgggaagcaatagggacgagcaagatggaagcaatcgtgtgggagatgcttcaatgatcaaaaccaattcagtcaacgaactcactcgtggtgaacgctaatttagggaacacttacaaggtagaaactaccatcgccacggtcgcaaacacacagaggatttgccaaagacccatgccctcgaccaatcgctccaacaccgaatccaaaacgtcaagtactgaatacattgatcaagtcagtttgcttgctgatttttttcgtcttctagataccgagaatgatcagtatgagccaaatacttacaaccagagctcaatacagcttttcctagagcaatacctcccatagccaggaacactacaagaaacgactttgagttcacatcctgacgttaatcaacaggaagaagcgtatgagtctcactaaccgatcgaccagtgaaagctgtcaagatcagaggaacaagaagattagccttgccctttcttaatttaaaaataaatcatagttcgaagaagagacgcactgatggaaatcctcctgcgaattgataagaaaaacatcacatcagcaaggccacagtcttaccccgaagaaaacgaatgatgagcaaacctttgacaagatacctgttccgaagaacgccaagagaggcaggatactgatgcaacccatatctccaaacacattttccagactcttttctacacaccaaagtccaatagtgataagagtgacaaagaggacgaagtagtgagttcggttgaaagtatcgccgtgcggccggacaggttgaatcaagagatcagactcccagcgatagccgagatggaggaatgcccagatctgaatattgtccaatggtttggtagagattagctatgagagcttaagatcgccttgggcgcaaacaagacacttactatgatcaacgaaacagacgcgacaggcagagactgttttgaagttcaaatttgttcgtcagcctgatataagaataacaagtgaagaaaaggcacaagatcaacgaacaatcgcaaaccactggagccaatctaatgccggctccatagcctgaagagcgatcagattttgaggactcgagataggagacgcttgtcctccaatgttgcttgccagcgcgattgcaagctttatcgccagcatatctatcagtatacaatgaaaatactgctcagtggatcatgaccagagtttcgtgaagtgcttacgatcagacatcgagtgaaaggcgaattaggaggaagtttctcggtgatcggctgaatgagataagatgcttcagatcgtgaccaatagagacgtccgactcaaacacatagagaggacccaccttgatcaaagcaaagcataaagtaggcgccgcgacattactgatgagagaatcggtatactggagtcagccatattgaactcttcaattgaggcgcgtcattagcataatttaaaacgcacctgatccacatggacgcaaacgtagcaagaaacatttgactgagaagaaccatactaggtttctgaccagctagagtcatcaccttcttcgccatgatcacatccatgtgagttttcgacagggcagcagcgatagtgaatcctccgataagaagcatgatggctagatgtcaaaccaatgttaagagaaatacttcagatacttcgaactgtgaaaacaagattaggggagaggaagataagtaaggcgtactaggagaaaacatttgggaaaatatatatttcgtagcatcaggagcagacattcgagtatcctgcccatcagtagatcggagcactcgaagaactgggattcagggaagaatggattgtgaggttaagattcgattactgtagcccttcattaagaaagaaacaattatggcattttcaacataccgacaacaaagaaggggaccgagatcgaggtaacaaagagaggaatagcctgcatggtgtgttgcaaccacaagaaaagttggtcagaaagtggcagatgcaacgcaaggggtgcaacgctgatgaacatacttcggaggcccaaaggatagtgcaaaacaccaagattgccagacagttctgttcctcgactctctcaaacgtagaaattgttcctgttgctagaaggatgagaatcaagaaagcaccggcgaatatgacgcctccctgagacaaccaagtcacgccaccgagccccttctcagctagatgtccggaagcagcgcgtggatcggggacagctcgaatgtaacctcccgccagatcaccgcttctttgagaagacaccatctgtctccagactgatccatcgaagtattagatgatgtaagttgtgagattgactggatttcatccagatgaaagaaagatcttaccggtgtctctctcgataataactttctctcgaagctgagaaccaagttgacgaccagccaaggctttatctccgcctacgacgacacgtgcgctgtcaatattcaatccaaaatctgtgtcagaggttatttgctagatattgagctagaactttggttattggacaacacatactatgtagagataagcaggtggtcaaagtactctaatttggcctgaacatctccgtgccatggatagtgagtttgaagtatgctcgttagatagaaatccttggtctgttgtcaaagttgtgagaaaagacaagatctatttgagtactggcagaaaatgttatttaagcagatcatacagaacagagaacgcaccgaagacgaagtgattttgtcgaatctaacgcaagttttagaggaacgaccaggcgtgaacttctcaaaatgattacaagtcgcacacccctgaacacaaggtagaagctgttgtgactcacttcttcaatgccttcttagctccctcttggttcaattctctgaagtttcttagcgcaacccaatctagccagagcgtggtaattttcctcttgaatagaatctttaacattgacgcttgctgagagtttgatgtccatacgttcaccgttccctccatgtgagcacctgcagaggccctggagtctaagtttggcacaaatgcttcggatgtaaccgaattcaacatgagcccgtgattggatgacgaaccggaagcaaacgtgttagcgtctacagggactagaccgagttgacctggtctcgtatgtgagactgctcctcctgaggaagacacagtcgagttcttcctgcctcttcgtttgatattggcagtgggtgacagattgttggacggatgtttagccaatgttgcgttaggaagcgaagaggccgggatgaccggtgaattctcaggtgaagagtcgtcttcttggtcagtggaggtatgaccatgagcattgtacctgagacggttcgcgaatgaagaatgttgggcttcaaagaggtcagaagtatcatgagaaggggacctagagagctcggacgccccttgcgtataggtagcatataggtgagaacgacgactaacagagcgaattttatgaaccgagaaagtgccaagacatacctctgcttcttgatctggatctagctggctttcctgtgtgcactcctccatgtaggaacttgttcaaactaccgacagtctccccagcctcatcatcatacccgtcgttcccttcttcctcgctcaaatgatctctcctctcccaatcgtctcgaccatcgagatctcttttctcctcgtcgagaatactctctttgagttcttcgacctcttctgctagtcgcttctcagtctcttgatagaacttagcaaccttggtgagttccttgttgagaagtttgaagaacggcttgtgcaagggttcaatttgatcgtctcttgaggaaacaatggtctccgagtcaagcaacggagccgactcaagatcgtcgttgttggtgaatggggccggttgagtgactataggaggttcgggtatagcctttttgagtgcttcatagctgttgttcaagaagagacggaaagacgtaacgagatgtcagcccaccacggatcaggtatgttcggtttcggactcgtcccgagttctaacatcaagaatgaaattcaagaagaacgaagactacagggcaacatgtaaaaagacctactcgatgtagttcggcagccagtctgaccgactattaaaaaggagtgcagttctattcgagacgaaattaaacaagaatcctcagatgatgagcaacatgtatacgatgtatcggtttgaggtccatacctatagggcaaggccgaaaacccaatgcgacttacccaaacttcatagcccactgatattcggttcgtgctcctctatttgaaagtgtagtaaaggatgtatgtacaaaagtttctagagggatatcctcggtctgtggatgagctggtgtgggaagtatcgtggtaggcaatttagactttcgccctctttcttgaaacggaaggtcaacgcgtgtgacgggatgggaaggaaaaattggggcggaggtgatagaagcaggaggccgacacgttggtcatctccgagattgcgaatttgattttatcacagtcttcgattaggaatctttcacaaactttgtattgataacttctttctcctcatgtagataggagttcgattcttttgacttctctcttcttgtctttccgctcatttcctgaggaactcttttatcgagacaaatgttataatcatcatacgatacagcagatatttgcaagaaaagaactagctgcatctacttcagaaactgggaagccaagcctagcaaagatagaaaaggatatacaaataggtcagatcctgacccttggaagccggtcactgaaggtctaaaacttactgaagagagagctggcggacgatcctccgccactagcggcagtggcagagcttcccatgagaccagacatcttgctttggaggacgagctatacagaaaaaaggtaatagggatattagtttacacacaatgagataggttatgcattaaatggccggcaaatccccaaaaccaaccttcatcaccatcccagccgcgacattcatgacatctggatcgagggcagaaggaagaaggaagaatgcttggaatcagtaatcatagaagagataacatataggaagggcagcgacctaccctgcttggatcctccatcagcagcaccacccgtctctaaaaatggcaagcaaatgaagatgaaccggatgagattaagtcgcggatgacaagaataatagacaacaggactaaaatacgaactggaaaacaacttgctagcctcgctgatagccattccaatctatccgaatgtttaaaatgccattcagtctgggaactccattaaggttgcatcccacccgatgacgcaaacactcaccatctgagaagacccttgagcattctgggaagaagaaccggactggctacctccggtgaacgctttcatggcctgcatagctgcagccataccaagggagttggtgtccatgttggcgccctggccctgtcggtaagcctgtgcgtgggcttcttgagctctggtctaagatgattgttttatttcgtcgtttcattcagttccgaaacaataaatcagtctaaagagcattagacctaaacaacaaaattgagatgttagaacgaacctcgtcgattggctcgctagccttttcagcggttccgaaccgacttttggcaaaagcgagagcgtttccaaaccttcagaagagaaaaaatatcttttcagtcttctatgttctgatgcatgtcttcaacgtgtcaaaacactcacattgaatcctcgccgtcatcgtcgtcatctcgatcggattgctttcgagcagacttgatcacctgatcctcatcaactgaacatctcaaaccaaattgtttaaaccttgtacttttatagaagagaacgtttgatgttcagactaaatcaacttggggcataccatcagcttcgacccccccatgagacgatccatagttctcggatccataggactggttagaagaagtctgtcggtagtcatcctgttggctctgggcatgggatcgctcttgagaagcagaattctggtactggttactacctgaattgttgttgttgttggcgtcttcatacgcctggtagcccttcttggcgagctgcagtaaagtatatgcgcatgtgtgaatacatgatactcagaccaatgcagaggcaggtaagtatgatatggaccggactaacattgatgaagttgtcctgagtgagagaggagtgcggagaacgagatactaggtaagctcaattttgaaaactttgatcggacgacgataaggttttatgacaaaccatgtttctgatagatgtagaaagattgaatggaaaagtcgaaaaggaagagatgaagatggagatcgaatggaagaagagatataaatgggaccatcttccttttccttttttgtgtaaagagggtggctgtgattacctcatgatcgaccggatcaactgcttatgtgacttaggtgttggaaattcaagatttcacatataattcgaaagttcttctgggctgatgaggattttagatgatagtctcctatcaataggtcagaaaataaaagactggatgaaatctagagaaacaagaggatggaagatgtagtactttatatataattgaaaaatgataagaagaaacaaactgtatcgtaatgcaa

SEQ ID NO: 2955 - DNA, 1122 bp, Xanthophyllomyces dendrorhous
tttgtatgtgtcttgaccatcggaaaagctatctccggccgtccgaaatatccgttccgacaagagcgccgttgtttatcaaccaaagaggagctcaaagaaaacagatatagcgacagcttggcattgcactcattctctctgtcccgtggtgtcatcgcagaaacgtcacgcaagtagcaatgtagccgggttatttcagaacacactctactcaagagtaaacatgaaaactttcattcaattcttcttttagcatgaaaaagcccttttcatctatgtccagtccaacttctgctctctcgagattcatcgtaactcgatggacgtctcggatgatcagaccgatatgagctttcttgttccagatcagtggatgatattccgacaggtgtaggatactgatggctctgtagacctggttgatgaaaaggagaacgcgaaagaggggctggtatcggggataccgagtgagttagattgatgggtgcaggatatcgatcggagtaagacacttggctggaagaacgtccaagagaatacagcgaatgcccagaatcagacggaagcagatactcagatgatgaccgttccggcccccatctgtttcttttccttctgtcactctcgccctctctttttctttctctttccctctccctttctctttccgaagttgtctcagaattcgtcctttgagttcgtttctcagagatggacacgccgatcgaagacagacgcgtctgagtttctacaggcttctgatccaattttttggatccaatgaacatgggtggtggtttgtttgagccgaatgccttaggcgggaatgtttctagagaagaaacagatgtatcctgattagatatgtacaaatcagatgagatgggatcttcgtgacgcgttttaaatgtgtgcttgagttctgacgaggatgagatattgggcatatacggatacgtgttgactgatgatctgaagcttgacgattcaaagaactgagcagatggtggtggtggcggcggtggcaatgacggtggcggcaatggtggcggtgatgaggccggttgctgagctgagaaggaatgcgacagtgaaggaggtggaggtggaggtgaaggt

SEQ ID NO: 2956 - DNA, 6337 bp, Xanthophyllomyces dendrorhous
aggtggaggtgaaggtggaggaggaggaaagtctgaggggggaggaggaggagctagtgcactcgaggaagacgcagaggatggtctgacatgataggctgacggaggaggtaatgacggtgggccaggttgtgaagttgactttttgccttttatacctccagctttgaatgcaccccaccctcctatcgaaccgccagcaccgttcccaccttctaccacaacctttggcttttttgccttaggcactttgacacccattgctctcatcaattctttctcctccctttttcgttctttctcccgtctttcatcagctgttccagaggtcgatgctcggtgagctgcctgaagacctttcagtctctattatggtggataggattgaaagcggattgataagataagtatgtttacaaggacagagagaaagagaagggcatgacacgaactacagtgtgatgatggtcgtaactgttgagatgttcactcaactgagggaatgttatgtactgttttgcacaatcctcgcagctataaatacagccaaggcggttagcggccattaacattaacacctcgaactgaagagacgtagtgatattatatgcgtactagaaagccctcagggtatcagcaatttctctcttaacctctgtctttttcgcctcgacctcctgatgtatagaacatagacatccgtaaagtcagaacagctcatatgtggtgaggcaagaacaaaacgagagaaacttacagcgccccgagctctctcctctacactcatcccggcccatcgttcgctttccatatccctccgacctttgagcatgacctcatccatcactctagtgtcttgtttgagttttccaataccgagaccaggagcagcagtcttgattggaatcggctccgtcctgcctgttttggtgccagcgggattaagaacaagtcccttttcggatcgttgagcttctgatgctataccagatatcagtagcaaagggacgaacctttcccatctatccccaagccgactccagaccctttccagcccatcttgatcaagagcccatagtctaaattatccattcctagctctgtattcaacgtgacgatctttcttggttcgtaccccaacctccgttcttcgtcatcttgaatcgaagtttcatttcgagacgatgatccgttcgcctcgttttcggactctaactcagactcggatgttaaaggtgtttcatcctctgattcatccgctggtcggctttcaacagatggatagaggaaacccattagtgatcttatcaaagggtttttgtcttcgttcaaaggattggtctctacgtgtggagacagaatcaggacagatcgctcgagatcgcttacgtcgtatcgtgcatttaagctaaggctatatatgaatttatttgattgattttacctcgctttcatttcttcgaccgccctcactttgaaacgctgtacttctcctagggactcagagtacatttgtaataagaaaaaatcggcgtacgggtcataaaatatcgggactggcgagttcaagtgataaaggagaaaataaatatgaaagaaagttgaattccatggtaagaaaaccgcaagtggtcaggataaaatgcgacagaatacagtctgataggataaagtatgaggatgattatatagaagacaagggggtttgactatacacagaatatctaagagactaataaagaagaaacatatgaggtgaaaagtgttgagcttctctgagatccgctccctacgatttctgcatctgtcctgcagattcgggatccagtgcgataatctcacccatggcggatgtatcccagccattagcctcgaggtatgccttaaactcgatattatccctctccatataatcagcatcgatgtttggaatgaaaaagtatgtgataccagccgaaaaaatcgctagagcagaagcaatgtagaacggccctgttgcaccggcgtaagttccacttcctccgagatcggcgatgatgggtttaaagcaataacttccagcaaaagctccaacctttccaaccgcagcggccacgccatacagggtaccacggactgcagttgggccaatagccttggaggcaagaagaccaaggttgtttccgggcccaagttctccaaatgagaggaaaagtccgtaaagaaccgcaaaggcggcaatgttctcgtgtttagttagggcgttgtacgctccggagagaacaaatccaaagatagcctgtgcgaggaggccaaagatcatagtgtttcgcgggcctagtcgatcagaaacaaagattgctccaaggaacgttccaggtagataaaacgcgttcacaagacacccccaacccaaagaggtatacagagtgctctccgaatctgcgacctgacaggtttgttgaaagtagtcttcaatcaataaaaggaacatctatgggaaaggcagaaaaagaaagagtagaggagcctacagagataatgacggatgaatagaggccaaatggatagacgactggaacgtaaatataaaaagtagtctttagaacaagtaggctcactcggacacatgaggtcaaaatgagtaaagaggaagcagatgagatagctcactccaatcatagatgaaccagttcaaagagaccgctgcgatcttaacccagtatctcctgatgataagcatccaaggaaccttgcactttcgcatgctacagtcatcatccgttcatcgttaggatgttgtgaatgtggatcagatttagcgtaagaagaaacgaacttgtgcatcctgtattgctccggttcacgcatcttgactcggaagtacctgtgaacgaacgttggatttataaataacagacctatttccggttgtcaaaggggttatttctttttacccacaacaaaagcagaggggggacaacacccaagccgacagaaatcctccaaacagcacgtagatggttcattccgcactaagatcaatgaaccgacaaagtcatctgaagtattttgagctaggaaactctagatgttgaagtagtgcgatataagatagagaagcaaacggacaatccagagaagcacaaggggcacaaatgcagcgatgacgaatccaagatcaatcatcgaggatgtagcgagctggaacatcatctgtcgtctcatcttgggcacgccttttgcttcagaattctcggatgctgccacagactgttgaggaatttaagtatattgactattgttaggcacaaacattttaactggggcttactccagagggatattctgctccaattcctataccggtcaggaatcggtatgcaatcaacgccttgagcatgcctggaacggaccctcctgctcctttagcgccggcagtaagtgcagtgaaaacaaagatgatgaccgtagcgacaagcatgcccgcttttcgtccgattcgatcgctaatgactccaaagacaagcatgcctagatagatatatagatgagcaagaggttcagaaagcgcaattataaatgaggaagaagcaacgaaccgatgacagtgccagcgaaagccattgatgatagtaactgagaatctgataaattcgatcagaaattcgttagtgagcaaggtaattcagcatacattcgcacggacggttttctaaaacaagacttacaattggtgttagccatttcctcggcatacaggaccccgaggatggtgttcacaggcccgataacctgtagagaaatgatgggacgttagcacctgagtactgagatgcgttctcagtagtttgtttctggtgggtatacttacagcattgacgtatccgtccgactgtggagcagatatcatgtatccacttctcgtgtatcagcttatctgacgacaaggctgaaaacggcaggatgatcatacttacgaacaaagcagacccacaggctaatgcaagaacgatgatgtggatcaaggccataggaacaagatttagtgatgacaaaaaacgacagagaacgagaagaaacccaagagaaagaaaagaccaaagcgagcactcaccgaagattaaaccatacttgcccaagcctagagttgtcgattcttgatcatccaatatagagccttctgagttgaccttccccgccggaggtgcctctacatgtttttttgagagtggccacatagagcgtgatttatcgggatgtaacttttatggccaaacactgtttcctcgttggacgggatggaagttggatagtaaagagaagggaagaaagttctcttggtatttcttttgacagtgaggctaaaacaagagattgaagaatgatctcaaaagcaacggagcagctccgaaaggctatatttagaacagatacacgacgtcgcgcgcttcgatgactattcacctcccgtcctctccagctccatctggatctgtttgcctctataaaagtaaacgtgtttgatcctagcaccataggccttcaaacagcaatatggaaagacgagtattcctacttgtcgacggcatgttgggtctgagacaagaagtaaatgatgaaagaaatttaagtaggacaaagaaaactaaggagggcgaaaaacagtgcggggagaagtcaaattgagcaaattgttggattcgggtccgtacagtttgaaaaacacaatgacagccagaccaattcaatcatgttctctgcttcgaaccatggacgacgctctgaaggatactgtcgcttcggccgacaatgagtcctgattgaacttttcaaaggataaaaaaattcactctcagaaatgctaggatgtgtacttgtcgcgtcgtatcctaatgatttcctaacatcatgtcacctatgagatgctacatgttcagcatcaaaagggtcgtgtacatcacacatattccagatcagatacaaaacagtcctgtagtgtaaacaatcttcctttcgactgggtaaacacgtcgtttgaagatttccatcctttttactccttctacttgatcacccgatacaggtattgtagggaagcggccaaaatgaagaccatcagatgaagactattgtctggctatccagtctgataagagataggctaatgttgagtgttatctaccttcaggttatgcgcgatgcttgacttgatggcaggtattgtgatttagtaaacgtggtgtaataaaatgatatcaaataagttatggccctgctgtggctctcagctcaggccgttaaccctaactacgtgttgaataaacatcatctctcgggccgtcagagctaacctttcaccatctttagaaacgatagcctcctctcagtaattgggaagactcgttttgtagaccatgataccgcttcaaaccctcccttgcttcattctcctcgtggcctcatctatttctcagactgctctttctgcaattgttcctgcgttgtcctcatcatctttccttgaagctggtgcctaccctcccatccgactcgtccaggcttggaaccctgaagtaggcgagaatggaagttggctcatcagggctttagaaatagataggtgtgtgctaacagactggaggtttatcgttcaggaatattacatagctgatgtttattccacctcaatcgaactacttgaaaatgggtgcttttgactctaatagcccggcttctgatacatgcaaacctgtcagctcaatctcatccgaaaagattatttcgctcatatcctccaactccgcattccagtcgggtgaacttgagaaagccgagggagaatgggttgaacgagaggctggcgaaggtatcgaagaaacttgggctcgagctgtacgtgtctcccaagatagctttcgagcttctcgcacagcttgaagtgcacaggcctgatatcttgtatcgaacatcacctgcttctgtccgtacatcctatagtgggcaaaaatgggcagctgcctgttaggatcggaatcgactaacccggatgatgtatgttcttcgtcttctttctgcgattattgtatgctaagagattgattcctataaattgttccggatataggttcccgttttctttgatctcgcccatcgaattcaccaaaagctccctacattctccattttagacgattccgatgtaagcagtcagttcgataggtgtatcacatcaaaagatttgacctatactgatttcataatcacttgggaaattgtatctctagatatcgcctgccgaggacacgtcctatgaactttccgagattttatcggtcatcaagacctccacaggtta

SEQ ID NO: 2957 - DNA, 12222 bp, Xanthophyllomyces dendrorhous
tctttctcttcataccattggatgttgttcatgttgcgtcaatctagcgtgctcatatgctgatagtttgactcgctcaactgaattcttacagcttacctgtgccgatgatctctcaatccaatcaatttcatatcccatatcgctttctggctctcgtgaatcaccagatttttcgcctcgagaaccggcctttcacgatgcatcttctggttgcccttcttctggtatcatgtgtgtcatatctcctcatatcagtcgcatcaaaaagaaaacttgttcaggtagacttatttcgaccttaaactttcaaaagataccacccgtcgttactttcgctcttgcccaagaaaaaccctcagccgacgcacacgtgggatccaatcttccgaccatctcctcgaccgatcaaaaatattccaacgcctcagatagaaccgactaagaagttggacttcgtgtttggtaagatggagcgcagggagaaggacaaggagacacaaaaggcagactcacctgtctggggcaagcgagaccgtgatgaattgtagtttcgaagcgaaccccattttaatgttgaagagccatcaattcttttggattcttgcccgtttgttgatgtcactatacattttctatacgcaatgaagatgctgtgttcagtctgtcttgccatctctatatccgactacaagatgcatgattgactcgccaaggattcacttggctgggcaaagtcttatgtgctcagttgttgatccatttccttgccgcgtcagacttgtcctataaaacttgcggtgccttctctcctctcttgtacgtttcacctctcaccgccctgaacgttgtttctagccttttccttgaggttcctcaggggagcgcaaccaagagagattgattaccaagcccttatttcctctatattctcaagccctttcttcatctctgacttcttggtcatctcctgttttgtttttgtttttctcacccttctcaatcgaaagctgatcactgatgtttacttactccggctttgctcggatgtctatgactgaccaaaaccgaaaacaggaacttcattccgttcttggaccttgaccacgtctctatcctgtccttcttcctactcttttcccttcttctaatcctttcttcttattttcatctcttgtctggctcactttatccgtttaatcttcgggtaggtcggtaagaaggaataacagaagaacagaagggtctactcagtttcgaaatctgaaaggagacatcaagatctctcgtattcgcatctaccacgttcaaagaaaagccactctcatactttctttagacacatacccactcaaccgtcactttctcttagaaattcttcccttcttctccaaaatcttctgtccttcctttgtgtattcgtagatggtatcaaacaacaacccatgttggctagagtgagtcatatagttgttttcctgatcgctttgatcacagagtagcataagtctgactgatggttcggcgtgcttttttcgaacatccaaatgacagcggagatagtccatgtttgttcgcaattctcttctcgtcattcatttttgacagatatcttgcccttcaatcggaggaggttctgctaacagttatgtttaatgtctggcgtgaattttgtgtagggtcgcggagtattgcatatcatggcgaactgtgcatcaattatggaacgacagacttgattgtaggtcgaccgctgcttattctgtcagttacctgtcttcaatttgacagattgtttcttcttcgaacggtatgacgtagactgcatgtgtcatgtttggattctgtgagtgttatatcacgaggtacataactgtctgaagctgagcttgaactgacctgggaaagccttcctggattatagtaggacttcttctaatcgtggtcgggctgatctggttaatccgacactctcggcaagtgtgggtgtcaattatccttgaccatcttctccccatgtccatttagctggagtgcatatgttgacgctcagcattttttccccatatccttctctaaggaaccggtttcaagcgttctggaatcagagcgcaagtcttcccctgggtccagcagatgaaccgggcgcatacgagatgaaggttaatctatcggacgtgtcgctctacgatcagccatcggcttcttcctacacttctccaaccggagggaacagaactagccgaataggagttcgtcctaagtacagcgtgcctcaatctacatctaggccagcctcactttatacgccgtcccgaagaacctctatacatatctcgccgaacccgtcaatgaccgctctgcccctgaacacactaggaggagaaggagaaggcggaggagcaccaaatgcgggaagatcaacattcgctccagtctctccgagatacaaagtgccgaagagtcctttgagcctaccgagtgcgggatcaaggccaggtgagccctacaatgatcctgttccaccgatgcctctgatgtcgagggataataggatgatgctaccaccaccgttggccatgcctgctgctcacgagggttatagttctgggggactgggtagtccgacgggagatggaccacactttgtaaagtaccacggtcctcataatcaccaaggttggttccaatcatgctttcctttgtctgtaatgtgaaagatgaagaactgacgtattgaaggcgtataaattggctgaaggtccatataccgcaccctggatgccccagacgtttcctcggatgccaatcgtccaacctcgggttctatctgggcctaacggtaacgggcaagcgtacggtcctggaaacggaccagaccttggccaatctcgttcaccgctagatcaaattcagtatggggtagcgaacataggctcacctcgttctttaacgacccaagatagatcgtgagaaccatgaatagatcgcccgctagtttcgtctcatcgtatcaacgtggcatcatatggttcatcattctttcacacgcattaggtttcgtatctctctttctttcgtatcagatgcctctcttctatatccggacactttccttttttaattttgattgcttgtgtcctttctttttgtcgtttcgttgtcagttgtaacactctctggtcttatcatatataatgttgcgaaagaatgatttccagcattctatcgtcccagatcgctgtgatcataaacttggcggaaagtagaaacgtgggcggagacgagaaataagatcttgggaaaacttggaaaatacttcccataatggatctggttggttgacgtgtgtgtgtgtgtgtaagcaagcctcaagaaagcggaactggttccctttgctctggcccagggccgaattgactttgcatcgtcttgcagcgggttcagtcttatttttacacgtgccatggttactgggtgctgcgagaaagcaagaaaaggtttattataacttatctctcggcgagattctcgcttggccttggcggcgtattccgctcgctgtatttttcctatgctgacctcttttttctctctcttggaacgggtctgactcaagagtgagggcatctgaggttatagggtgattgactggaacgtttctcaactagaactggggcttgaactaggcgaacgacatcgagtggcccttctgctggatcctgagtagccctgatgataagcaaaaaatcccaattcagaaagagaataagagcgtcgtgctaggcaggcatcaaggccgcgtctatacagatcgggcttgacacagcctgaactgaatagatatatacagggccatccaaaattaatattttcttggcaaaatctcaccttctatttcctttttttctctctaaagcttggctatttgccttgccgtcgttcaaagctgggcagtcgaataggttataagatccatgggggaggaatgatcttcttgttcaatttaccccttttgcccttcttgctcatactcaaagaaacagagagatatcgacacatatacgttgacgcacatacaagataagcccgatcatgttctgcccacccccccaacgacatcactttcccgaaccggcatccggtcccgcgtctgcttccgaacaccctctcgctcacactccaacgcagcatcagcaacaacatcatgctaatgttgctctccctcctacccttcgagagatcctcgatgccttctctaaagatggaaatggagatcgagagctcttgctagctatcctaggcgcaaaaaaagctgaggaagacgtgagtttttccctgtctccacaaactttctctcattgtgcttcccaagttattcttagccattttcaacactcgagcgctgaccctggttctttgttttccccttggcatcattgttggcctttaatccttcctgcgacctcctttgtcttgtctgctttgtttcgacagcgactggcatctcaactagcctgccagtctcaactatttattctctcccaacaatacgcgcaagctcaagcccaggctcaagcgcaagctttatattaccaccagtatcaacaactttgtgtggccgagtcttcggcacagcagatgcattcatatgcccgaccgaatggcgaagctcgacaagttacttcccccactgattcttctgcactttcattcccatctccatcatcgtcatctccatcatcgtcatcgattgagctggcagactcgacgagattcaatccataccgaaggccttcttcactttcggactcaggttgctcttctcaacccgctcctttcgccttcgcttcagcctcggccggaccgatctcattccgaacaaacaaattagccagaatacattctaccctccgaagtcgtcgccggtcctcgtcgtctgtttctgctatgtcattatcgactgagatccctgctgtctcgaccacggtcaccgctccttctccctctccatcgactcgtgtgaccccaccgcctacgaatccaaggacgccaccagcgatgtcttcatctgttagcaaacgagtctcgcttaccgatctcttatcgtcttcttcagagtcgaaaaagccggcgacgagggagagtttcgtcaggggcacacccaccgacggagagccgatggaggatgatgacgacgatgacgacgacgagtgatctttctcgtttttttttctccggagcttcttctatatttgtttgggttgcatttcttttgagttgttgctttttttttgccctgtgttgtacaagaaccttctttcgccaaatgtgttcttggttgtatgcctattcagcttatctagcctttctatcgaatctattactgctatgtttgtatcaatgctatacccctgctccaccgaatcttgtgtctcttttttctttttttttgtggaaaaaaagaaagatgagagatgcacacaaggatatcgaaagaacacactgagaacgatgatttccgatcgtgagggggactcgagggggtggtcccagagatatcagttcgattggcagactgtgcgtccattcgtagatatgaacgttcttgtctatacgaagtcttcaggtcaacctcacagccattcattcattcatatatcataccataatatttgtacacgtttctccccaaatttccaagtgagtccgggatggagatgtgatcgaagtctagtctaggtcgaatcgagatctatcctcgtctgtttggtatcgtcagccggggatagacaaaatgaatcgagggtcaagtatcaaaattaaaccaggtcagcgtccatcacaacaagatatcacatataggtgatgtaaataggtggattgtgagaagtgtcaacgaacctcgaaaaagagactgtccatctcaccctcgtccttatcagctaatgctacgctccctttgagttgaaagccgctcgtatctagtgcgagtcatggtggaaaagacatcgttgagagagggcttgatcagatctagacaacaggtgtatttggaacacactctaacgcaggaaagatagtgggagggaacgtacagacggcacgtaagagatgaagatggagtagcctactagagatctgatgagacccagagcccgaaaccccttgataagaatgacatgttcaacgcttaatagtcagttcgttcaccgttatatctatacagtaaagaacacgagcaagatagaacgaggcaataaaacaccaacagggtgatcctttaagcttgagctcatgacaacctggttctttcgccaatgtgtgtgaatgcttgattccttgcggccaagcatactgtcagtctcgccacgagtggcagagaaaaaaagttagaagatcggtccctattgagataaacaggaagtgaatgtgacacacgttcacgtgctcctcaacagaatttatgactgcctgaggagcgtcaatcagccagatctttgagtcttcctgaaaggccatcgaaaagaaccgtgtgggaatctggaaagagagaacgatagaaagaacacaggagtatgagtaatcattcgctcccagaaaaagtttgaccgagaagaccgaggaagacagagatgacaaacttcagatgctggacttttgctgtatttaagatacaaggtatccttgctatacgaatcgatcccggcgtcgatcgcggcacaaagtatatatccctctttggatagagcagaaagcagctctgacattagtcgtctcactctgaaagtatcgattatatgatcagaggaagagagcagaagtacacggaaggggtttgcttaatcagccctcgaggataaccgattacgcaacggtcaacgctcacttacgccacactgtcccgtactcctctagatccccaaaccatacccttcatttcgacctcccagacgtcggtctttgtttcacctccgtcagtcttgatggttcccgattcatgattcttggggtaaccgtaccgactgatgccatgaggccaactgtcctgaacagcgtgcagaactggcttgtgagtcgagtgtttgatgttgatgaactggaggacgttggtcttggttagcgcactggaagagaaggacacaagtgtataccaagttagatgagtgattgataatatgcgggcgattagtgtacatccctaggttggtttcgaaagaactagatacataacacagaacttgacccacaggatagcgtagcagcaggacccctgtaggtcccttcactccatcttcttgagttgatcggatgagctgttgctcagagagaacgacgatcgttgttcgctctgagaggcaccttgagagcttgtgatcagagcagagaacccattattgaggtctgcaagcgagctcgaggaagagaacgtcccgttggatggtcgaaggatggatttcggttcgccggacacagatgagccaggtgaagtgactggcagatttggaggcgggctcagcgacaaggtttccgaaggaggagactctcttccagatccagtcttccgagtgtgtctatgaagaaacgaaggcatcagataaacgatatctaccaggttattgctcttgggtgggatggacgaacgaataaccagaagatgagcgcgatgtcccaaagatgaggtcagcaatagacacgcgcagcagcttacataatcacaaagtccagaacccccgtcagtacacctaaccaccagcataaatccccaaccttttacatccaacagatctatcgatttttgttctcttgcctgcctctgtcttttcttgagcttctcttcttcaagcttcttcggctcaatggcttcttcaacatattctgcaaagttcttttggtgcgtcgttatttttttttcgtcatccgtgtgtgttgtggctctctggcttcagaggcctggcttctctatccccattctatctcttgtctctcgaccgcacttagttattcgccgcttttgccgcccctttcacatcatcgatctgtagcttacaaggtgtcgttttctttgcatcgttgaccatcgatcaggccggatgttcatcctcattctgtcattgtgacaggcagcttcgacaacgtaagtcttgacaagcgtacctgtcctcttcgcttatcacgatcaagagatggatgcgacggagcggactcagtaccgggtgctaaggtttcaaattcgcggctctctttcttttgtcggttcgaaattcgccctctttctttctttttctttcgggtcccttcctgcgacgcggccttgaaacaccgggtcacagtggtcaggtaacacacatcatctccagaaacacgaaaccgggttcgaggccgtcgtggaactcgaatacaacaaggcctacgagttcaaatatggtgagcgttccttttgatctcgcaggaatttgcccaatcgttgacagtttgcgccattctttctcgggctggggatgtcggccacagtcgtggatggaagtaagtgatcatcttggtatgaccacctatctattgatttgttctaatctgatcttatctactccaaccccgttttccatcgctagattggcaggctcgggaggatcaagataaggagtggggtacgtttctctcatctcaactccaagaaggaaaaacagaaacagataaacaaacataaacaacatagatggcttgactaataccacatttcggaactgtccctgccatgtctgctggttgctcttcctcctcttgtagattcacagggtaatatgaacaacgtataccgaacgccggaagcgcctgcgacgacagaagagccagtgcattcacctatcgttgcgtcgaacgctgttgacagctctgctattgatcagtccagtatgtacatattcatagctcaatcaatggttctcttctcccaatacatgtgcttagatcttctgaaacatgtttgttgcatatgttgattccattgctgcctccctcagatcgagagctcggcaccaaccaccaaaccattcccagccaaaagcctgcttccatcacctcggccaagtcagtcaaggatgcagagttgacaaactcggctcccctacatgcgaatgagcaagtaattccggagactaccgtgacgtcgttgtctaccgagacagaggtcacgcctgctcaagatatcaagaagtccacattgtctgatgaaatctcggacattacaaaatcaacttcgactgtcggcacgacttcttccccggttgctcctcccgctccattcgatcgatctgacaaggatactgtcatcgttcctaccccggctcaggcgttcgcccattccgcttccaacacaccgtacgatccgaatgccgtcaccgggatcggagcgcactctgcaaccggatcttctgccgtgcaagagacgactcccaagcttgagcaaagagagttgtcgccttctgagcatacatcctatcctccaggcctcggagcaatcatgggtggagccaagggcactaactcgattgctgataagaatttcgagtcagagactgtcagtgactttttttaatgtgtcattgttgattatcgttttttgacaagaaactcacgacaacggaaacgctatacacccttgaatttcattcgcacagaggacggtggagtatattgacgatcataagcttgcgggagttagtggctttagcgaagccgatacggactattcgagtaagggtgaagactttgcttattctgtcgcgtttactttctttatattagcgttctttccttaaaatttgcttgtccaaccgtcatcggatacaatgagggctgacgcctttttattctcgccttccttttcctccccgaatgtttcagtgcttgatgataatctctcatctaccgcgagtgagcaaaattttgagcatatcgcgtctcctaggatcgaggaagagcctttggttgtcgtccctcatcctgtgaagaccgcaagttctgccaatattgttccttcgtccactggcgatcagactacaactcgagcctcttttgaagatcctgcgcatcagtcctcagcctctgcggctgaactcgacatcccccctcaagatgaagatgatcttccttctcatgctaaagctgctgccgaggcaatcaactctgccaatgctgctcacccttctgctgaagatcctaccaatgttcctaccaatatctccgagagaaacactgatgagattctcatccctgccggttcaggtgatcccaaggctatggagcccagcaccactgtgttggagaagcaaggaaaagatgcggaggatcaggatgacaagaggaagcagggtatcggggctaacagctctaatgctgattggagcaaggccccgactacttcaagtgctaccactactatcgataccaattcgtcctctcaccagcatgatcagaagaggtctaccaacgagttggattcgaacaaggcctcagcttccaccaagatccctgctaccgctgtcgctgctcccagtgctgtcccgatccctgttgtcgttgcctctggcccttctcctacattgaagtcaactggcctgcccacttctgcatccggcacactctccatccctgagactcagaacattcatgcaatctcacagcctgcagggacaactagtgagttgtccacctcgagttctcatctgaaatctcctaagccgatgaatagatcggtctcagctgcctcgtccatccgagatgtccctgggcaataccctaatgtaggaagtgggtttaccactcagtcttcagagagcactcccgccagctcgccggccaagccgcaaaggactgcgtcagagcgagatgaggctgtcaaaaagcgcaagagcggcttatttggaaggattggaaagttattcggatcaaagtaaaaccgtgtctccacagaatggaaagaggaagcttgaacagatctttctgatatgataatttgggatcatctctttcatctttgggtcctttgctttgccaagtttggtttctctttcatctatcgtagccgttatttacactttcttttctttttctgcgttctttgttatcgtacaatctttcatctcatcctaatccctatctatggtatgtcttgctctatcgttctttattagtactattctctctaaattcttaacgttctcctttctcttccttctatctacttttccctcttttgttccttctgatttctcctcgtcgggtccttgaccggaagcgtcacttgcagcctccttttaaaagggttcaagacgatgtctgtctttgtcaatgtattttgatctatcctagcctaattctgtgtgtataaacctctccctatgatgcatgatccttgccgaatactgcgtgctcgtgtgcggagagcaggattaatgtgtcttggcctggccgcgcgtgtaattcctcggttgacctagagatctactacttcgcgtccttgctcggcttcgcttgaacatctacttttcaaaagataaaaatgatgattcgtattgaccaccgtacttctctcatatctctctttatctttgacatcgtgacacctcttgcctctcatcgaaaatatcttttcgtatatcagccatcgcccttcccaatctctctgcgctcaacaatatccattcatcttcgatatccgatcggaagcaatcgcctttcgatcttctcggctcgcttcccgctttgatcacaattacatcctatccctctcctatcaactctcacaaatttccagccgcttttttcttataaacgtaaacgcattgaagctcgaaacgaatggttgaaggtcgtatagttccggaacgaacacgccggccatggacagcgactgaacggtcgattctacactccttagcttctacttttcctagaggtaagcctgattatgccacacatttatctctatttagatagacaacgttgacattgcttccctctttctttcatatgcggtgtctcttatgtttctgtgaccacctataactcaaggctcaagacgatggtatgacgaaaagttcgtcgatgtattcatgatgggtcggcttagaggaataggaagaagcgtctcagaagtcatggcttggggtatgaagactgggggagaagacagcgaggatgaaggcgagagtggccatgcag

SEQ ID NO: 2958 - DNA, 6577 bp, Xanthophyllomyces dendrorhous
gcagataggtgagttccggtttgaacactgtgtttcttatcctctcccatggctggtataaaaaatccctgccaaagaactttcgaacgatatgtcgggtatgcaaagctaaaatctccatgtccgcactgcgcttgtgacctgtttgaaatctcagatttcatccatccaattttcccctagtccaatcaagtatcgagccaggcgcttcccgcgtcattgcccgtcgggctccatcgatctcttcccagacgtctcgaacattcgagctagctatcaacgctattccctcctcttctgctcttgattctcatcctatctcttccggtccttctggctcttccaatcgtcgccgaagagttgatgcggctgaatcaaatgctgggtcacgtcggacaacatcgctcgctcctttaggaccttcggcgtctacgttgtatccagaaccaaggcgaccagctcgtcaaccttccggtcgattcgtcgcgccagatgtccgttttccaccttcggtttcgtcctcgtctcttgctgtttcacccacccaaataggatctccagctagccgcaatccatcttgggcttcatctagctctcgaccttccccacctcagacaccccgtcccgtgtcgccgagcaggccatcatctccaacacagtcagcactctcttatctgaatgcgccgtcgttggtgtcatttccgtcaagaccggagagcgttcatggggagccagtagaaagttttggagcgctgccaggagggaatcatcgagccattttgctgcaacgcttgggagacgcagaggaggcagcagaggaggatcctaggttagcacaagctttaggagtcttgctggaaatgggttatgtaggcagtataggaagtgcagggtgagtagctctgatcgcttctatgctttgtaaaaaagcgcgcgagatcttttcagttgattggtgtgatgctggcgttgttgtcatttcatttttttttaaatctagaaacacgagaccaaatggagaatccgatcgatttgttttcgttcagagtgccccagttcatcatcttccaagtctttcttcgcctgcccgatcggctaccccagacgatcggccaacctcaaatcgacggacttcttccaacctgacatccacgactgcatccggatctggatctagtcctgcttctcgtggacgtcctcgaagacgtgctgcaggcgcaacaagacgatccactcggtccaacagggaacctgttgctctcgcccaggctaatccctctcctgcgtcaagtactcgatctagaaatagcgcggttcgctcatcaatatcagagctagtcacaggacatggccgggatcattcttcaccaacaaccgaagaacgtcaaacagaaaataggcaggagaaagaaggcgaagaagcagttgaagagccaattgatgagtctgacggtagaaatcgagtcgtctcgaaccctcgtcctagaagacgtcgaagacccgatggtcctagtcccctcgaatcggctgagagcgtgagcgtttcttcgttagccgaaacgacatcgtcctactcaaccgcgcgatcaaatacctctcttccgacaccatcacctgaaatagactcaagagtatcatcgcgaagctctctcctagccttggatacggtacaaccttctcaacattcacttattcagactgttcaggacgatgaagatattccaatcgctctcagaaggactcctaggagttctacggcaccattcgcgcccacatcggcgcgcatcggaagaacacgaaactcatcgaacgcttccagttcaactagtctctcgcagcctccaaacaacaggctttcgtctggattacccacgcctatcacaactgcatcagaacgactctctcccatgcctctcacaacttcttttccacccgtagaaatcccgaatgttgatcccgaagctcatcccgtttctgactgcttgagaacgtctcaagtttcacaacttattcctccagatgtttttcaatcctcctcggtgatcacagacccaatctctagcctatcgacatcaggaatgagcggtactcatgagagcagggccggagaagatcctctcagaaatgttccagggttatttgagcttgggagaggattgtttgaagggttcatagcagccccttcgtctgcttccactttgcctgttgtcaatggagagtttgttggtgaaggaaggggaatgaccttgactcgaagtcggtccaatcggtctaggagaaggctgagtacttctggaggtacgacggatcaaacgaacaacccggtgatgagagggactcgatgttcaaccgttcctcctctttcaactccatcagaatctgaaaccttgcctacgacgacgacggctactaccatgtctgaatacgtcgcgcatggaattcaaccccgcctgagaacatttttgcgttcagatcgtcctttgtcgactctatccacttcggctcgtgctatcgattcaacccccttccttcgcaatatccgacctcctactactcgatctagatcttccctccctagtataagaacgtctcatcctccaggacccacgacagtttcgaattttacttggactccgacgcagcgttcaacagtttcctcttcagtgacaacgacaatgacggcatctgcctctcaaatacctgcatctccaacacacactctgctctcgttgacatcaactatgtcgtccgaaaacgatctacctttggatcgaaatcctccaccagcttacgagcgttcgctaggcgagcgtgcagagtacgtcgcgcctcctccaagaccgaggcgaggagtgagacaaagagaggaggcgacggaaggaaatagtatgagtggtctagctgggagactacttggtggaggcacacttcgagatcctgacatgagacctaggaacagcatctcaagaggagagggtgaaggggaaaacagattgatggccagaggaaggagtctgagaggccttcgttgagagacgccctatactataccataccataccaaatatcttgttttctccttgcttcgttcttcattcttttcttgaggaccttcctccctctcttctcaattgcatctggactttactgcttctggcttcttttccttgtttactgttgctttctttataattcacctctctcttggtagtccatagcctcttctttctgtttgttttcatatgtccttcccatcctgttccaactctgctgcatcattatctcaactcgactctttttcacatgttgcttgttacactcattccatcattcacactcctttcatttccccttcagtccaagtcggatcgtctgcatacacaagatttacatctaacttgtatctttgttctgtcttatccatcattgtcttgcctgttattttctctatatatgaatgtcctcactttgcgttattctatttttcgtacggcccacaaggggtcgtttgatgttcaaaacatcatactttgactatatctctttaatacggtctcttatttttcttaatactttttccacacaatttccgcctaaacgcttcctccaatcttttaccctttccaccactccccccatcgcatcgaaagcaacgctctctggatccatctactttcgaaccatccagacaagtagatagtcatctcaaacaatcgcctccgaactcaaacgtccgcttgaaccatcactaaaactgaacaaacaacccagttgaggtcttcaactttcatagacccatcatctgtttaaagaaaaaaaatccccatctcgtcgccttcgttcttcagccaaatcagcttcttgactaaatctgcaacgctcatcttctgaataaactctcacaaacaatcagccgttgatcaatctctaccgagacttgactatcttttctacacaaacttctgtttctatctacaactatcgacaatggcatcatcatcgtcaacaaggttcgtctcgtttccttctagattcgtctctttttcttatccttctctctcctctagccacttattcatccggagactcgaatgtttttaaatggctgatttgtttttcatctatctgttgtgtaccatcaacaagccaatcctccgagtggaagtcgaagcttaacttgcctcagcgagacgctcgtcctcagactgaggtaattttcctctttttttcaacgcccctttccatcattctctcatatgtcttccttttctaaatcttcgttatcctcatcttacatgcgctcttctgacacactaccgctcttgatttgatcgtacaggatgttcttaacactaaaggtggtgattttgaagactacaatctcaaacgcgagcttctcatgggtattttcgaagccggatttgagaagcctagtcctatccaggaagaggccatccctgttgctctcactggacgagacattcttgcaagggtaagttttgcattctagttcacattttgtgatgatagaggaaaccttctaaccccgaatcctcattctaggccaaaaacggaacaggaaaaactgctgcttttaccattccttcccttcaaagggtgaatccgaaacgacccaagattcaggccctgctgcttgtgcccacccgagagcttgccctgcagacgtctcaagtgtgcaaaactctaggcaagcaccttggaatcaacgtaatggtgactactggaggtacaaccctcaaggatgatatcatgcgactcgccgagcccgttcacgtcctcgttggtacgccaggcaggatattggatctagctggtaagggtatcgccgacctgagcgaatgcccaacgtttgttatggacgaggccgacaaattgctcagtccagagtttcagcccgtcatggagcagctactaagcttctgtcctccagagagacaggtcatgcttttctctgctaccttccctctcatcgtcaaggactttaaggttagtctttgacctcgtttgctgcgctaatgtgcgatagttacacgtcgaaatctgtctcgatggcggtttgctcaaaccccttcttttcgtgtcatatcaccaactatacataggacaagcatatggtgcagcctcatgagatcaatttgatggaagagcttactcttcgtggagtgacccaatactacgcctttgtcgaggaacgacaaaaggttcactgtcttaacacgctcttctcaaaggtttgttcttgatctcatcactatgtctatgtcctggataggtctaattaccgtggtttggtcactcttattgtatcccacacagcttcaaatcaaccagtctatcatcttctgtaattctacgaaccgagtggagctgcttgccaaaaagatcactgagcttggctattcgtgcttctactcacatgccaagatgcttcaggctcaccgaaacagagtgttccatgacttcagacagggtgtctgtcgaaatttggtctgctctgatcttttgaccagaggtatcgatatccaagctgtcaacgtggtgatcaactttgacttccccaaaacggctgagacatacctccatcgaattggtcgatctggccggtttggtcatctcggtctagctatcaacttgctcacatatgaggatagattcaatctatatcgaattgagcaggaacttggtacagagatccagcctgtgccaagcgtgatcgatgccaggctctatgttgcgccttcagccattcaaatggatgtgcctccccaacagcagcagcagcagcagccgccgccgcagcagcagcgccagatcaaagagcagagccaggagcaggatagacatcggcaacaaggtcaacaaaatcagcagcggggaaacagcaatggaccgaggggtccatcgaacggatcgcggcaacttcctcctcctccaagtcagtagaaaaccggtagagaagttcacttttaactattctgctacctttgcgtctactgcaatctttccatagtagacctatcatctattctctcttatccttttgaaattctcatatttccctcaacatctttggattatcctttctcagcttcaccgcttcgaccccttaactcctttccaccatgcgtgttcctattttttgtcttccttctttctactcttctgtctgctttgggtctcgtattctacctcaagtgtatctgtctcttgctccctccatcaacttcccttcacttccccggccatccttccacctcttttgccttatccaaactatgatcgacagacaattttgtcgttgcgttcgtcatctacaatctctccacggtcgcctgccatcaagcctagattttccttaatttcttttggctctactctatcccggttctgtacgtactcatcgttattgtaggcttactcttcgatttctttttgaggtccggctgtctaccttttccttcttccctttgcgtactttcttcaccctcgctctccccatacctctacacatcttcctctcgccctttcctttcccttcccttcccctcctcccttc

SEQ ID NO: 2959 - DNA, 5624 bp, Xanthophyllomyces dendrorhous
gcttttccatcttagctaagcttccgattcccgagattagcctgcttggaaatagctatctgagatcgcgcatcctgtatctgatgtttatgatcttaatctctccgcttcatccggcacgtgatatgtctagatctttgttgactgattgacaattagaagtgattaggctcagaaagggaaaatcgtaaccagcaaatgctgtcctcaacgccacatcgtaaccaaaccccggcccctgccaccacaccggtcttcttcttccctcttccgtttctctgcgttcacttcctaactttgcgcctctctccctctttctccaccttcacgccttccctctatcacatacagataacgacatacacactctcgctttcagacagacttatcatttgaccgcttgcctcaaagtccttcaaagaagaaatcctcgttgaactctataggcccctactgtcagtgttctttattgtcttcctttcaatctttgtttccccaacccttctgcctttcatttcccttccacttccgaaggattatttcatcatacatcatcagccagagaggagagaaaggaaggcttttgatcgatgagaagatccgacggacaatggatgagaagagatggccaaggagagtaggacaggtgcactttccgggtcgtgtgttcagatgggggattccgtccggcctaggctgttgtcagcttggatcgcctgaacacgtaccagaggagggagaaagaagggatgagatatgccgttctcacagcttgaagtagcggaaacgtcctcctcaacaactgttcttcttccttctcggaaaggattatgtgcttcatagaaaaggataccaggagtctgtagatgttgtttggggaagaccaggggctgtgaggacggtgcacaagattggtatatgggtagagaaagaaagagaagcaaaacgctaacattcctgacctcgggggtttcgttctcgatcaacaggtccctctttttcgttcccctctcttctctagccagccaatcattcttgaacatcgaatttcttctccttcacatcaaaaatggcagagaaccagactcctgaaatcgatcttgattcagtcatcgaccgactaatcgaaggtccgtcgtctcatctcgtgcttgccttttttgtcatactctgttctcgactccttccttccaaactcctatccgatggcttgtgatgctgagattttcgttgttacactgttcctcctctccttatgtctcggctttgaattcgcaatccgggtgacgaacttcccattctcaactgattcgaaaataaacatagtccgaggacatcgaccaggaaaacccgttcagctacaggaatacgagatccgatatctctgcactcgggccagagagatttttttgagccaacctatcttgctggagttgttcgttcctcccgttcctttctctccatatgactttaagccactcgaacgaggaagatctgttgatcactagatgcacttgaggggtcttcgacttatatataaacctttgttctctttcgtgtggattggatatattccctatttctgcgtacagagaggcaccgataaagatctgcggagatatccacggacagtactacgatcttcttcggctgtttgagtatggtggcttcgtacgtctccggtcatctattttccttgtctttttggcgacgagcaagcggatgaggaagcttactggtgatgccgtttttttctcccaaattcacacctgggcgttctttctctctgggtttgcttcgtatctgcaccttcctctcatcaaacactctgcccatatgttgtttcacgtggtcaaacaccctcctgtctgtctgcctgtctgcttttgctcgtgcagcccccggagtcaaactacctcttcctgggcgactacgtcgaccgagggaagcagtcgctcgagacgatctgtctgctgttggcgtacaagatcaagtaccctgagaacttctttatcctgcggggcaaccatgagtgtgcgagcatcaaccggatctatggcttctatgacgagtgtacgtgctctcactcttctttttgttgtttttgcgagactggagcggaagatggcccgaagatgatgtttgaaacgatctaggaaagtgagatgtctgaggtgtcggtgaggggtgaattgtggcaatatacttcagaagaggaagggaactgcaatccttgctcatcaacatctagccaagctaaagaaacttatatactcacgttgcaaactcccatcatggcttttctctggactaataggcaaacgacgatacaacatcaagctttggaagacgttcaccgattgcttcaactgtgtacgtgcttgatttttcttgtttttgattatgcaccctacctctaaataagcaaacctaccattcgactactgtttctttgtcaacctgaatttttggctcactcgttcccgctacccattgtttcatccaatttttggtcgcttcaaattgcgttctctcaacataagctccctgttgcagctatcatcgatgagcacatcttctgtatgcatggtggactctcgccagatttgcagagcatggatcagatcagacgagttatgaggccgacggatgtgcctgagactggttcgtcacctctataactttttcaaatgaagcgtcagctgttgtgacaagtggactaactctttttcacctatgtactgtcaaatgcgcggtggactctctggcatatacaggtctgttgtgtgatttgctttggtctgatccggacaaggacatcactggctggagtgagaacgatcgaggagtgtcgttcacgtttggtccggatgtcgtttctcgattcttgcagagacatgatatggtttgtttccttactttgtagattcttgtgcatctagctcaacgcgttggattagtgtactgatgtgggataacccactttgaaacataggatttgatatgccgggcgcatcaagttgtggaagatggatttgagttctttgccaaacgacagctcgtcacgttgttttcagcccccaattagtctgtccttcttagtccccaaccgttcttgttgaaattaccctcactgacgcgtgtctcacatcccgtttatactatcagctgtggagaattcgataacgccggagcgatgatgtcagttgacgagactttgctttgctcgttccaggtgttaaagccggcggagaagaagaccaagtatgggtattcgtcgagtaagcgcaaggtaatgtaattttttttggtctgtgatatgtggcgtgagtatagagagatttcgtcactgatctgttcctttacatattgcttttcttccagtagtaatgtgattcacagaacagacgttcattcaggaaacttgagccgtcccttccttcttataacccgcctgcacacactgtctcttctcgcgttctttcatcacttttggttttgttttccttcgatctctaccctatttctgattgcctctagagtggttcgacgatatcttcctcttctttcctcctactttcaattgtctttctttgattgtttacatactgttttcttctgcgaagactgagtcatggaggagccctttcttctacatcttgcgttggtatccctctatgaggtttctcctacaacttctttctgcaatcacaaaacctagttccaaatctctcaggtcttgaatttcttctgttcttcatctcttctcccttccaatttttcttttcactctctttacttttgcttctctaccctcattctccgtgatctcgaaagcctggtgtacaagtatggaaagaggaagaaacccctgtttgctcaatttttgatacactgagaacaagattgtgcacgaggaaatctttgtcttcttggctttgtgtccctagccatttgcctttgaagacttgcacgtagacgtgagctatcaacctacactgttacgagtcttgatagaggctgtaccatgtgagacgataataaattacttttcatcagattttcgtcctttatcaacacgagatggatgtgtaagtagcggcacacacaatatccatcggtgtatttgtttcgtaggaaattgagattgttagaagccaacgtttgagcaagcgttgtatatgctcatcgtgatatatagccaatgtaacacaacgatgctcaagcctggcatcctctctgaccagcttttccaactgaacctcggagttgagctggttgggacttcttccgatattatcaacctagcttgatcgtctcgttgttcgactttcgtattgagtaacgatgacatgggggttcggagctgaatgataaaagatcgggagtaaatttcaatgtgattatctgtaatctaatctctccgtcatcgatcgatctatctccctgcatcgcccatcgaagaagcaccttccatcttttccttttcctttcttgatatccatctttctttgtgactaccacacactcatattcagacctatacaccatgaccaaaagcgatgcaagagcatgggtgactttgttgactaaggcatcatacctgcccggagtagttcgttcttcctttcgtgcttgtcttcaatctcgtcgtttccattcaagctcatcagtcttgccacctttcaaaaacagttgattctacacaaatcgctgctcaaatataactcaaagtatcctcttctcgtgattatcacaccaacggtctccagtgaggttcgggaagtcctctccaaagctgaaatcgctgtaaaggagatagagtacctggagccaaaaggcgaggtcaacgttcttaccgaacgattcaaggatacgtggtgcaagctgagggtatttgagttaacagagtatgaggtacgttacttgtcttctcattccagttttgtaagcatgtcttttttattgagcctgttgaaacaacgcaacccagaacagaaggttattctgcttgatagtgacatgatgcttcgaaagccaatggactctctattcgatctgccgttgcctcccacctggattgccgccaaccatgcctgtacatgtaatccaactaagatggatatctatcttcctgattggtgattctctatcatttaaactttcgcatatacattagaccgactcatctaatcctttcctcacaatcatcagtattccggaactctgtccgtacactccgctcactcacccatcctgtctggagaacccgacgccggtgaatgcagattcaccgagaacccacacgttactcaactcgggcttagtcattctatacccttccgacaaactcttcgacgagatcaaggaatttctgtatacaagcccgttaatcaaggtgagagacatctcttcttgtcttcatcgcgtttctgttttctcacatcaattattcgagggctgtttcacgtaggaaatggcctttcccgaccaagatcttctggccgaattctttaaagggaaatggaagccaatcggttggcaatggaatgcgatcaagacgctcggatggtacgcctaaggctcttgtcaaccttctcttggcatccacataaaacgtcatc

SEQ ID NO: 2960 - DNA, 11175 bp, Xanthophyllomyces dendrorhous
cataaaacgtcatcagctctaaattccatcattctaaatctcatcttcttttcttcatttcaacaggcttcacccagagatttaccgagaggaggaggttgttaacgtaagggtcttggtggtctttgctgtcttccattttggagtgatactgatttgtttcttctctgtactgaatctatgaattctcggggattcagcttcactacatcgtagataaaccatgggaagggagacccggtccagactcgcctgatctcgtcactcatgggtggtggtgggtggagtgggacgatttgatggcagagtggacaaaggatgagaacaaacaaggcgttaagcacgtcgtagaagggttgattggagaatagaggggcgtattcgggcgtaaaagaaaagagaaatacttgtttcgagtgttacttgtacacgtatagaggatgtgttttgaagtttcatgctgaacaagcaactcatctattcttatgtacagagatgtttatcttaattgccaaaatcgcaagacgatcccagcagctttccaacctgctccaagccaactctatcttcatctccgaatgttcccaacctgacggaatccaaatctaacacgccaaccgtccttcctttgctatcgatcaaaggcaagacgatctctgatttcgtttcgccatcacaagcaatatgacctggataggcgtcaacatctttgacaatcataggggatgattgaacgaaagcatcagcgcagacacctttgcctgcttgaggattgatttgctggcaagctggtcggccggcaaaggggccaaggagaagtaaatcgggcgaacccgaaagcagaggaaagaaccgagcgtgaatataaaatcctgtaaagaaatattaggtggaaatttattttcccttgcgttagacagactcatatgaagaagcaagagagaatggagattaatgaataagcagaaaacgaaccacaccagttgacgattgggtcgccttcctccgtccgtccgaatgcacggtcaccaccgaaagccatgaaatggtgatacatcagcgcacttgcgttgcttaggttagagatccagtttgagtgggcctgatcttctaagagtggttgtaatgattcgagcaagttggcgtagaacgtcggcttgctgttttctcaagaccgaggaagtgatcgtgtgagcggagaaagctcgagatgactgccccgagaaaaaacatccaactcaaaataacaaaaaaaaaaaaagggactaactcgaccacttcttccggaatatagatgtcaccgtgaggcatgttggatgaatatatacaatctcaaagatggttggatgatggtgatcaacggtgaggttgatgggataatgggctaacgggctgatgggaaaaatcaaggctcctgaccacgtgattttgaggctgtgctcaacctccggccaagctgtgacgagccgcctcccttgttatctcggccgcctttaaagatctccatcatcatcagcagcagcagcggcatcatcatccaaccacaaacaccatcttggccatctctatatcctgttgagtcgtcttccagagttctcctcctaatctgatgcactacttatagagatactcctcgcgcagacatatattgctgttccgtttgtatctacacaactaggaaaacaccatagattgaacccaagtccagttctcctccttcgctcagactcgaacggcctccaaatcgcccgcctcttcattcatctcgttcgtcgagattttgcgatatatataccaacttgatccatccgcacgtctaatctctagaacaacagctcccgaccagcgatagcttgcactatcttgatctatacttgtctcccttgcgttgattctcgcatctgccccttttagtcctcatctacctctcttcaatcaagacctttctctcgatgtctcatactgaggaaccagatcttgattcaattatcgaccgactcctcgaaggtatgctcttgatcattctttctctatttgtgcggctctcgtatgaataggccatcatacgaagtttgttcccaaacttctcgcgagcactggctcgcgaactaaccaatttagccaaatctgatctatgagtcccacaaaattttccatgcaaccgcgctgtgcccaagtccgaggggccaagccggacaagattgttcaacttcaagaattcgaaaccaagtacttgtgcacaaaatcgagggagattttccttgcgttcgtagagtttcctcgatttacttggctcttattatgtttgcgcactcacccttcgagtggctcttcttcattacaaaccgtgttgacactatttacacgtagtcaaccgatgttgatagaattgtaaatgacccctctctgtcaatctttggttttaattctcttgaaaaagcctcgacgtcaagtccgcacgcttaaacgggcgatatcattttgatctcttaatcttttgttagagaggcacctattaaagtttgcggagatattcatggacagtactacgatctccttcgactattcgagtacggaggatttgtaagtagatcttcttagtatttcactgacttttctgattgcaagtattcgacagaaatgcagactccgccttttgctcatcctgcatccatctgcctgtctgcttttgctcgtgcagcccccggagtcaaactacctcttcctgggcgactacgtcgaccgagggaagcagtcgctcgagacgatctgtctgctgttggcgtacaagatcaagtaccctgagaacttctttatcctgcggggcaaccatgagtgtgcgagcatcaaccggatctatggcttctatgacgagtgtacgtgctagtcttctctacgctttctttcatttggaccttcataaactgtatacgagagtgaatcgcacacgcatcgcatgtagtagtgtgtataacaccaattctctaggtttaacagcggttgactgattgggtattggcttgtcccttcctgtgtctgtcaatctttcgttttagacaagtaggtaaacgaagatacaatatcaagctctggaaaatgttcacagactgcttcaattgtgtacgtacctctgagttctctattatttcgatattcgtcaacgccatgacaccgatcctgaacatctggttgttttctatacatatctattgtttctgggtgcgcgctgagtcgttcagcttccagtggcagccctgatcgacgaaaagatattttgcatgcatggtggtctctctcctggcctgcaaaacatggaacagatcaggcggatgatgagaccaacagatgtaccggatacgggtttgttctgtccttgtatcatcaggcatccttacccgttctttctttccttataaaatctatgatgctctcttttatttctttcgatatgtcatatgtaaattcaggactattgtgtgatttactatggtccgaccccgataaggagatcaccgggtggggggaaaatgaccgaggagtgtcgttcacatttggcccagacgttgtggctcggtttttgcatagacatgatttggtaagcttatccctcttcccatacttctttcaggatctggtgacttaaacagcgattttgatgacggttgacgtgattttactttctttcttgcgggcggtgatgatgacttcttaggacctgatttgtagagctcatcaggtggtggaggcgagtcaacctgattatcgttatatatatattttcaatctggtcagcaacatactaattcaagctatttcttgtcatgacctataggatggatacgaattttttgcgaagcggtttcttgttactctgttctctgcgcccaactagtttgtcctctgcctcctgattttcatgattagttcacttacaaaagtttgctgatggtatcacacatttttcttcggaacaatattgccttcccaatcggtgtatcatctctgtatagctgtggcgagtttgataatgcaggcgcaatgatgtccgtggacgagactttactttgttcctttcaaatcctgaaaccagctgagaaaaaaacaaaaggtccgtatccttctgatcgatccttttcattttgaatgttactctctggagccttacgttctctcaatttcatggatgtatgatcaggtattgcgtccaaaccggtgacgcctccacgatcgaagaagaatctgtccgtcagataattcctcttgcatgaggcttgaactttgcttgctcaatttccaactcgtcggtcgactgcctccagtgtcgtgttctctcctcccctcctctcctccctcaccctcatactctcgagacggagtgttacatataatcaattctagtctctcattatcagccgaaatcgactataccagtttatcacctttattcaaacatggactcttctcgctatctactcctaaaattgctccataaaacatttcttcaaccgcatgtcttgtctgaccttgtggctttctcagatcgttcggttaagttctgctactgatgggtgattggattacgtttcttttcttttcatttctttccttttcttttcatttctttgctttctcctttcttttctcgtttatttcttccttcggtgattgctcgatgatcgcaatgaacgctttcagatcttgtctggtcgtccaagattcctctgtcaactaatttatgacgaaaaagtcaaagagcacggacactgaacaactaaaacatatatgtgtatatagggacccaattaaaattccttctggttaaccaatatatctctcacgtatcatttaaaagggatttcttcgtcctttttgagtctctacgtctatccttgataccaagagaatagagggactgaaatatgaattgtaaaggaaaagaaagagaatgtgatggatcaagtcgttgtgagagagggtgttggaatagaggaatccgtggagattggatgagacccgagtcgagattttcggtatgcccaatatctaaccgcatcacaaaacccgcctcaagaagaaatatgagatactgaacaaattatccagataaggagatagaaggaacagatcatagatactaaccgactccgaacaggatcttcgagactcaatctatccagtaattggcctgcctcttcccattcctcgttctccactgctacatcgaccaaccattcagtcgcgagtggacaggggtatcctttaagggcgcatgcttcgatcacggactgtgctaagccagactcagatgtgaatgaaagtccgaacttggagtgtactcttcaattgtgatttattatatatatttaaagggaactgcaagtcagtctttttcttcttacgcttatatgagatctggcggaaagaaaaagaacgaagaggatttaccctcggagataggcccaggaggaagtgttgttgggaaccttgcggatctgatccgtagtataactgaataagtacgttattgcccgaaggaaaggaatggtgaaggcaaggatgagtataagatgcaacatcttgtctcttaggttagaaggacataatgagagaattgaagattgacgaactcgatctctcgcgccaaaccatcctttcctttggctccctctcgtccgaagaccagaaaccatctatgagtccatgcgctattatttctcacatcaccagcacctctcttattttcctcgatccattcatcgtcttcctcttcgtccgaaccatgattctccattatgacctcgctctcctcactctctcttcctgactgaacaaccaataagctctcacaccacgcgagttcatttgtccagtcttcttcggtcaaaatcggtccgaaatgggtaaggacgtattgtctgtaggcccatgtgtggtaattctttgcatcgggttctagggatgtagcgataaagtcgagctctcgatggatcgtcgaaggggagatcggagaaggtagatgggtcaaaagaaggagccgatgatgcctgtaagttgaagagatgtcaaggtatctcgggtgagctgtcaccgagaacgatcttcagcaatgtaaaattggagagaaacgaaccagacttggtaagacttcatgttatcctcggccagctcggtcatcagtcgtaactcgtcttctagcgagcgctgaagcttcatcaaggttgagaatcggtactgcctacgggcatcaagatacatcaaagttatgtttgaacagaataggaaaaggtgtttctgttttgtaagctggcatctgatacgaacgaatgaaagatgaaacaagaaaatgatccaatacggaaacccgtaccagacagtatagtgagcagggttcatcctgatgactctcaatgtcacctccaacgctctgtccgagtattcttctaaagcagacagcgctctaaagtatcccattgcatcttgatctatgtgtgtataacggatgagttccaaatgttctcaacatcaaaatgacaaaaggatgaggcatcggacaagggcgaagagaagagacgtacattcaagagagtacatgatcggcactaaagaattctctggctcgatctgaggaatcgggttcaaatccgcccatctgggatcttgggagaacatactggatgccatcgatgtgtgtttgcacgactgtgatacgagatatctggaatgacaaagagcgaatgcgagagcaagagcagcagaagatccaaaaagaaagcagatctcgaagtttgtcttttgccttggtggttatctggttacggtgacgattgtaggttattagcgtgactaaccaatagtgaatgtaactatccctccattcgcatagaacgctcactcaacatctcgtacttacattctagaaggatgattgatcttgtttgacggtactcactcatccagatcgacactcccagcttggttgaactcaatattgtagaagcaagaagagataacaactctccctttggtcggttgcttcttttctctttcttcagtcctggcgcgctcctttccgcctcttcagcagctatgttggcccttccctcccttcctctatttcttcttctcttgtcttctgtgctcggtatagcgcacgctaccgtgtctcctagatggggccactcagttgctcttctgtcctcctcatcgacgcttatcatctcttcgggtaggacaacatctgttgatggtcaaacatatacttcatccccgctggttaccacctacctgtccatcccactttcctcttcatttgacttgacatcctcggcagaactctcagcttctaccacgcctgctttgacagagaaccaagcgccaggagaagcttggggaagcgctgaagccctcgataacggaaatgttctaatcttcggaggacagctatcgagtgacgctagtgtcgtagcaggtcaagattctgcttggatcatgaccacctcgaacggagggccgtttgtccaacagacaagtggctggggaggggaacccactcgaaggatgggaggcgcgtcatgtagtgagcaaacttttcggtttctgtgcatggatgattcatatgatatgctgatatatcatcaacgtgattagcgctcggaaccgacacttacttcactgcaggtgtccaaccggacggctcgaacaacccaacattgactacctacgtcttttcttcagaatcatcaacttttaccattctctccggagcatctattccaactgcgctcatctcgccttcgctacattgcctctcaaacggaactcttcttctatttggaggttactccccttcgctctcttcgctacctccattgtccacagcatacaccttggatacctcagatacgaacccagcctggaaaacgattaccctaggtaaagctcagaatactgttccgacaggtaggagaggtcatttgggcgtcacattcggcagcagaaacgcgatatttgtccatggaggtggaaccggatcgaatgggttagaacaagtggtcgatgatgcttggattttggacgtcaacgaaggaacgtggaccgaaatccagccgacgggaacagcaccagggaaaaggatggaccacgaaggcgtgccgatcggaaattctcagatcttgttctttggaggtaggtcgatctgattttttctctctctctctcgcgcgcgctctcgaacgtctactgcttttctagaactcccatcatcaactcaggcatgctgacatttcttgatgaattaccacatattctcaggctacttgacaacttctgcagcggatgcaaggctttacgtttacgatctagtcacaaacagctacctctcaactttcacccctccttctacatgggcctctacctctgtcacttcttcttctaccgacctggtcgctgcgacctcttcaggcagctcgacaccttcatctatctctgctgcagtgatcttatcgaatgctgtcgcgaccgctaccctcacttcagtttacaccttacctaccacctttgttgtcaacacccttgtcactagaacctcaactctcacctcggcagggacaacctacatagaatttgagaccacatcatccatagcaactgccacgtctgttcaaacagaaacacaaaccctatatgccctttcattgaccaacggccaagcatctactttaacagtcgacaaagccatttccacagttcagactgcagctacccaaaccgactcgataaatcctgctacctacactggtgctgtagctggtatcgggacgatgtctgacgtctctacaacaggccaagcaacctctaccgattctgcctcatccgcgacaaataccactacaaacgggccgaatcgctcaggctctcttagttctaaagcaaagacagctatcggcgtaggtgtcgcgttgacattgttatcgattgctgccggatcaggcgcctacttcatcttggttcgtcgtcgaaaacgatccaacatcgatgacgatgatgatgacgacgaccttggaaacggaccggacaagcgacgcggaagataccataaccttgaaagccacgagaagccgggatggctcagaggagcgctcacattcggcggtttttcgggaaaaaaggaatctgagctcgacggtgcggttcgagagaaaggttttgggttttggacatcgcatcagaatgggcatggaggaaaaggacatgttggatcgttgatagctggttccgagaaaggaagagccttgccagtaatatggaatcggcatccaaatgaccgacgggagagtatgctttatgacgaagactctagtcgatttggatcatggccaccgtacttccaacgaacggaagaagtagcagacgatgtattgaccgtcggtagccgcgctgctcaacggggggatggagaaaatccgtttgaagttgagcggatcgatgcagaggaggttgaggcgcacggcgactatggatcgattggtcggcatgtttcaaaccaaaacctaggtcccgctttagcaggcctcagtagacagaaggaagaaatggatataggaggggggcgatcaccgtttggagatgataacgagagagagaatagagacatgtccgaggatggagaaggaaaaggactactcctttcgtctgcctctcaaaatcctagagaaatacatccaagcacgcgtactggaggtcgttctatggacaatccttttccgataattgacccggaccctctctctccttcgtctacatcatatatatacggaagctatcaaccgtatatgtatgaggacccattcgatctctctgcttctctcattccaacctcttcctcccctgatgtaatgacggatagagaaattccacgatctcagagaatgaaatttggccatggaaaggaagctctttatggagcggtcgataccgctgaacatttatcggtcgccgatgacctttcctccaatgcgacaacttctcagtcgctccatccgtatacaggttatatccatcacaaccctacagccgcgtatgatcgaatgatcaaaccttcccggtcgacctctacaacgggttggcgaagagctctcggcctacgtcaaaaatcaccctcgtcggttgaagagagtctcaacagactttccccttcgttcacaggtataaacgctggagggcttggtagattccaggagattattagagatccggcaacaccacctgtactgcctgatctcagcgatgaccatcgcaaagaaagatcgttggcggaatcgggtgttgggagagtagggaaacgacagcaggagttaagcttgaagagtatgcaaagtggtcgtaagtctgttctcattcattgcttgtgatttggtacggtaaaaatctgactgtgggtaacgatatatatcgtatggttcgaatcgcccacaggaacggccacttcggagcaaatggagcaatacgcgcatatgaacatcgttcagcgcaatcgagctacatctggttcgacaactatgacctccagtaccacaccgatctcatccccgcaattcgaacctattgagttctcaccgataccgccaaatcgatcgccgtcctctgcatctacgccaacacaaaaaacttccgtagatccattcgcggataaatctgactcgtctgatatcgatactcctcctatacataaaacacaacgaccaagcattgtatcgacaacatcttcttgcgcgcgtcctgcagggggccgacctaaaccatcaggtagtcctttcaagtctttacccgtccggccagccccatctgcatcgaaagaacaaaggcacttcccaggtgcttctgctccgactactgcttccgctcctgttgtccctcaaacgagaagatccgttcgtgagacggtggctgcgtttgaaacacgaaccaacggaccagtaggagggagatcgagacacaaggtcaactatgtgtctgtgcctagaccgaaattgacgatcgccaatccggacggaagtctcaaaagatagtggattgatatgctttatctctgatgttcgatttttagcttctccgcctctcccaaatggattcctctgtttaattttatctggttatctttatagaacttacttatta

SEQ ID NO: 2961 - DNA, 26067 bp, Xanthophyllomyces dendrorhous
atatcatatcatatcgtatcacgaaaagaaacggacattttcctatctgactttaacgtttcacgccattctcaatatttctaaactttctgggcatgtttatcccatgctcatcatctttcaatctttcgattttctaagaacttctttcgtctttgttccttcatcttttatcttattctcctgaatcactctgcagttcttgtcttatctttgttgtacgttcatcgagaaaccctctccaaaagctgatccgcaaatctacacatgttcaacgatcttgatgagcatcacaccatagccattctgttgtttagcactgtgttccctccaaacttagttttgcgtgctgaaaggatttgtggaggcagagcagtattatatcaattaatgagtgaacagtgaacgagaaaagggggtcacagaagaacgaaactgtgagatgcatgagtttcgagggagagaaggatgtgatttctacaggaatgcggttgatgataaagaaacagaaagagaagtttagatgaaacaagaaaaaaggagaaagaaataagacactgaacaagagaaaagaaacagaagacatgagaggtaaagaaaagtcgttataggtgtgaaaaagagaaggttttgtgataacgagagagaaaagggaagctcagaaagacgactcttgatcaagagaacaaacacaagaatctagatcgaactcgggtagataagaaacatcgtttgaaacagaaggaaagaaagatcccgaaattaagcggtcccttccttgcgacgactcgaggtctgcactgagtggagaagatcttggacggatcgataggcttttcgctgggccgttgatgtagaagaggtggagggaagaggtctatcggcaaatgtcaagagcgagtacagtgaagcgatttgatcgccctttcgtttcggaaagcaaaccaggaagaaaaggggaaaggaccatataagtaagggttcacggaaggagaggagaggatgtctgaaggaattcgaaagggagtggctaaccttttgttccaagttgtcgataacttctttcaggtgttcagccaagatgtttctcttggcaacattagaagccggatccatctgtttgtattggtcggcaagttcagtgtagatcctgaaattgaagcaaagaaaacgaaatgatataaacaaattaagtacaaagagcataggttgacgacgggaaaaggaaggaaaagaaaagaagaatgaacgtacaccttgtagtgctcgtattctacctcaagctctctcaaaacacgacagagcactgtctgaggaggcaatctaacctcttgtccgtcagctctcttttgttgcgatgaagagctggtggttggttccctggatcgaatcttaggagacaaagctcccttctcgaccgggacttcttcctggtcttcatcgatgacaagttcttcttgttcaaacgagcttgcccatgcggtttccagaacgatcggttcaagtacctttttctgcgccttctctctctcttctgccatcgctcgacgtctcgattgtcttcgaggggacgaagcgatcgaggatgaatctagatctggagaacgagggagggggatagccgcaggatacacggcatcgagctgttgggaggcgaatctggggctggaggagagcagtggaggtgatcgggtaggagaagagacggctgcgactcggaggccttcggatagacgggagcccggtctttcagaataagtggcggtggagagaggagcgggcgaggctcgcttattggtttgatgggaggagatggtagttcggagccgggcgagttcgtcggcctgatagaggatggaaagaaaaggaagaaagaatgtatttgatgagtttccctctgttaatgagagaaaagaaggaagaagcacttactccgactttgtttcttccaactcgaggagaaataggccttattgtcctgtcctgatcctgatcaatcacagtttccctctgctgttcctgctgctgctggaactgtcgttggagttgatcttggtaccgttccctctcctgagcctgggtctgttccctctcctgctcccaagcccttcgatcgccgacggtgtcctcgactactctccttagggaaccaacttctgtggcgagtgttctgacctcctctctgagtgagtcgatctcgtttcctctcctctgcagttcggcttggtcaagcgcgcgctgttctcggagttgctcgatcaacgccgtctgttcctgcaacgactttgttaacctggaaacttctgatcgaagttcggcgaccaagctttcgagagctttcttttcctgaacgacctcccagtatctggtctcccaagcgctggtggtttcttcgacctctcggcgacctcgttcgagtccggtttgttctctgctggagagttctcgtcggagatattctcgctcgagagcccattcttgcttggcagcggtctctctttcgcgagtagtctggagttcgagttcgagttcagatacccgctgaagggtttctttgttttctgatgtcaggctcgagagcttttgggagagtgttgcgagggattctatagaataagctgatggaaaaggataagagagacacaacaggtaaataacagaagaagaagacaaacatccagaaaagacgtctccaaaagaacgcctcgggggaaacaaagagatgaacagcgtaaagagaccaaagactcaccatgtgaatcttcacgatgatcaccttccttgacggtcttctttcctcgcctagctggcgactcgaccagtccgtccgtcaatccggtgacatccggtaagaacaacacactcttgccgtccccaagcccagcggcaaagcttgattggcctcggctggtggacttcttttttgtcaacccaggcttattagcgttccgtctggcgacagattgtccattggagtttccacgcttgagcgaggaaatcgagttgaattctctcgactcattgaatgagagctccgacatgggttgtctatcgatcggaccagattgacgacgaggaaggttggactcgatccctcgagcgagcatttcgaatttgctctcctgcaaaggaggctgaatcttggttggaaacagagatcctgtacgtgcggcagcggcggtgttagcagagtaccggttgccgttggatcgagaagatggtcttcgaggcgagaaatcttgggcaatcgcgtcgacaagtttgggccgaccgatcgggtttgcgttcgagttagccatggagagtgggagtccgctggttccgattaaaggactctcaccggctgaatcacccaatccgaaggagagccctttgtcgtctttgatgattggagcgagctctcgatcactgtcgaatccagactgctggttatggtgatgatgacctccgcctcttccattatgttgtccaccggtgagaccggttcggagggtgatagcactagcatgatggccggcagtagagaccggactgggaaacccggtcacggttgagaatgactcgggttgggcaaaagaggcgagtccgtggccgtggtgcaggtgatcgatggctgacaagttgccgttctcatgggccgctcgaccgacttcgatagaacttccgtcttcgtcctcgtcttcgtacgcgtcgtcgtcctcatcgcgttcggtagcgaacgacgtgcctgttctggtactagtcgcgacggaagaggaagcacgggaggaagacatcaacgatattccgcctagctgttcttcgagtctgatcctatctaaatcatcatgtgaatgaggtattaacagggatgaagctgaagaagacgcgtgccgatgagcggccgccgacggaggcggaaacgagtttgagagggaaggggactgtcggagggagaacgggccggctgtcaagccgttacgagaagaaggggttggatagttgagtaatgagtaggatctactgtttccagagacagagaacgggtggtcaccttggttgctcttccgacgcatcgacctgggcgaaggtgagggggatggctggtgggtagtcgaggaagacgaagacgacgagaacgaatggtctgatatcatcacagaacggagagagaaagagaaagagaaagagaaagagagagaggggggagaaggagaagaggtatcgcgagggtagcacgcgtgagagtgtatgtatgatacgaacgagtgggtctggatggatgtgggagggtgaatgtgagaggatggtatgcaactgaggatggaaagtaaggatgtatgggtgaatgaatgagtgagaggacgcgaagaagaaaaaggcgggtagaaaaaaagaacaacaaaggaaaagaaaaagaaaagagaagaacagaaaggacgcgactgattttctacatacatctactttgatacgtgtttctgttcgttcctcaaacactctcactcttcgttctttgcttgcgttgttctctcagtgttgaagcacgatatcacacgtatacctagtcatccgttcactagctaagagtcttttataggtaacaccgactgagcgatcgctttcgagcaaccctagtcttctcagtatggatactctctctactcggatatcgtctctccaactggagcagcaccagcaccagcaacaacaagcgtaccatcataaccaacagcaacaggaaaacatccatcctgataaacgaatccatacaaagtactctacgtcctcttctttcaacccatcctccaccagctcgttctatccgtctcaaagtcagcctccgtcccagtcgcaatcgcagtcttacggtcaaccgatatctggccagaatcaaggacaagttcaacaaacggcgagggtaccacttatgaaactggcgatgggagctcctggatcggcataccgaatgaacccatccaatccaggctcacccaaccgggcccaagtcgaatcaggtcagagtagacggcctgaatctgtgtctggttcgaatgccgggggtgccggaagtgggatgaccagctctgggtcaagagtggaccctcagtttggtccaaagggctctgtaaagcccggagctgtcagaggagcgccaacaggaacggcatcggcgtcggtaccggcaacgacgatggggtactcgaacggatcggtagcctctagtgttggcacggtcgctggaaagatcgatatcggtcgatacgacggtgggttcgaggccgacgagcgagaacgaggccagcgagagatagaactcggccatccggttggttctacagagagtccagatggagcatctctggcgcctacgactcgatcgtaccatgcgtggtcgcttcctcaattcgagatcggccgtccattgggaaaaggaaagttcggaagggtctacctggcgaggacaaaagcaccgcctcagtttatcgtcgctcttaagtgtatgtacaaagcagagttggtctctagcaagacggagaaacaggtccgacgggagatcgagatccagagtaacctgaggtatgattgagttttcaggagtatacattcgcgagtctttttgttggcttgctaaaataaatcacattggggcttgttttcttctcttttcttcttgtgtatgtgtaaacgcacccacccgttaacggactctgaaaagacatccaaacatcctaaggctgtacggatactttcacgacgaaaaacgaatcttcctcatgattgagttcgccggtaaaggcgagctctacaagcagctccacaaggccggtcatttctccgagaagcgctctgcccgcgtgagtgaaatttctcgtttcgagagacatagaaaaggacaagagaagaatatgaagaaaggagagcaggacggaaaggaaggaactgaaggaaatttggaagagcgcttccaagaaagaaatacaagcaggaactgaaacggctcttttcatttggcaactctagtacatcgctcagatggcagatgctctaggataccttcataggaagcatgtgatccatcgggatatcaaaccagaaaatctccttctcggtgtcaacggagagctcaagattggagactttggatggagcgttcatgcgcctggaaatcggtgagtttcgaggaaggctgattggatggatgggcaggtggatttgagtaagggagaaccctgtttcgagctgagggctaaaacacgtcatccttgttcacctgctcgcttgatacatctcttagacggacgacgctgtgcggaactctggactacttaccaccagagatggtggagggaaagtctcataatgagaaggtagactactgggcgttgggcgtgttggcgtacgagtttctctgtggagtccctccattcgaggaggttagtggtcacaaggagacttatcgaaggatcgccaatgtcgatttcacgttacccaacggtatgtcagtcgaggccggggatctgatcacttctgtaggttttctttcatgttgttattgtgttcgaacagagcgactgatggacaaggtgactgatccgagatgtttggatgaccgttctagctgttgaaaaaagatccggaacagagactcgcgttagatctggtggcaatccacccgtgggtgttgaagcatcgaaaaaagccggcgacgtcttctcaaggtgttcccaactgagtgtgtgtcagcagccgtatgccttgttctttctctccatgcgctgtgctctgtgttctccgtcttctttattccctgagaaccggccacatctgcggtcaacctggtattctgcaagctctttctatatgtttatttatctgcgtgcttgtctgccagatttcttctgtcctcttcttgtttcattctcctctcttgtcacttaacaacagatcttccctcctcttgacgaatatatatgctcagaccttcatatatgccgaccaggccgaatgtattccgaaaagatgcgagttcggcaaccttaattgggatctcgtctgaatttgtttgtctgtgtgataatctccaaaataaaccagagaggtgtattgctagagaacagatcgagggaaagcgaaagagatttctatctacagcacggacgagcaagtccgtctgggtattatcacatgttactcgtcgggatatatctggccacaatatctggctttcaattggttgtatcggttgtgattcaaccatggccaggacggggatgagaaagggagaataggaaatagaaaaaaaatggggaaataaaaaataaaattgattatgataaaaacaaggagacgcttgcgccgaggacaaggagaaacgtactaaacagatcgtattccagccgttggacatccggggacgacggggaacccaacttcacgcacgttctatttttaaaactcgattctagttccgtaggtgcctgatggtgcctaagtaatgaggctgatctgactgtttgtgcctgcccagacttctgtgcctgtttgcggttacgtgcttgtgaggccaatggcccactcgacttggcaccagcggccctggtcgacgtcatttcaagcaaaggcctacccctccgtcgcaggccgaagctaaagcttaagaccccaggtttttaatcagattgacgtgcctgtcggaattttatctgatctctcgtctgtttactttctctctatccgatcagcttcgtcttgtctgattggatcgtttcttaaaccgactcacaaacagtccacgaaaagagtatggtctctttggcagcctgagtctgtggccttctttcgcaatgttcacacagtgttctcctctctttgctctccttgttctccttcgaagttctctcttgcctctcttgcctctcctgcctctcctgcctttctcgctctctgcgtccttcggcgttccctttcgttctctgtttatcagctccctcttttttcattctcttttttagcctccacactttgcttcctttatcctctgtcatttggagatcgccctagacgtcagatcgccacggttgcactttttttttttacttctctccctctccctcgctcttatcatcgtttcaccccgcctctgctgtgtttgttctcattgaaaggagatgtgaagttctctctcctctgcctgaatccatcgttcccagaaatgttaaatagaaatgaaaatgcagaaatcctcgcttgttctttttactctctctctcctcatttccactcttcctgttcgctacccaatattcgtcctatcgccagtgttctaaagaagaaagtcttgcaggctaccactcagctttttcctctttctttgttttcctcctcccatcatgactttaagtaaagctcagcgaaagtaagtacacccatccttatcagtgtaggtgtgggtgctgaagtgattgtggcagtggcagtggcagtggcagtggcagtggcagtgacagtgatagtggcagtgatagtgagacgctgatcgcattatagttgtcgcactaacccacccttcgttgtctttcttcactctttccctcgccatccgcaggtggggccaaaggaactttccaatcttttgttggtacgccatcaccggtgttgtcggcttgttcttcatcagacatgtcaccctcaccttcgctcggtacatccgacggaaacgatcgatccggctcatgagtcagcagagcgcatcaactgaacatggctcccatcccgggtctccctcgatcgcaggcagggcgtacaataccacactcgccgtaggtaaaaaatctttcggctggcggacattcgctgttggactttggtacgacgtgcctctgctcgaattattctggagtgtcatgtacaccatgaccgtcctcattataggctggatttacagtcagtccctcgagcttgagcttgatcccttctggtgtttaaattagctcttcacttccagacctaatctcgtggtctctttccttcttggctcactatgctctcagtcgatccggcggatcctacggcgacacaggcagtcaatatcgggaacttgtgtggcttgttggcgttcatacaggtgaatggttttgtttgatgctttcagcccgcctacttgtacaagttctcggcttaatgataaaaccttgtctgtcgtatgaccaacgtttctcgacgtcataaccctcctcaaagttcccgctcgtggtcggtctcgcctccaagaacaacgttctgtcttggttcaccggaatatcttatgagcgagtatgtctctgtctctctctttggcgtcatctcttgtctatttttcgtttttaggttttagtcttgtttagaccgttcggttttctcatcactatctctgtcttaattcttcgatcaacgctgccgcaatactcatgcccgttatctaatctctccttcaacctcgccgcagcttaactttcttcacagagcatccggtcgagccctcctcatcttatcgtggactcatgtggtgagcagaggaatgatcattgggttcgtcgttctttagcctttccctttgagcatctccgttgctcgaatgtctctccctctctgtcttgttgaaccttttctaatgatggggcgcaaactctttcctctgcgaacttaactatagcttgtccggaaagacttcgctcaagctggtaaagatgagaatgggtgtcgtcgccttccgttcgtctcttctttttcttaaaatagatgaacgagtaattaaatcaaacctattcatcacccttgtaatgcaaacatgactgatgtttcttccttcttacgggggatcagtcgcatacaatttgcttttcctcctctctttgaagcctttcctccgatcgatggcctatgaggtcttcctcatcagtcatatggttctcgctttgctcctcctcgtaggttgctacatgcattggactgaatttggatcggtacgtttttcttgttcgctttgttacaaacgcgttctaatccacaatctggctggctgacacgtcccgcgcttttatttcttccctcccattctagtacatctggccggcgatactcatctggggtctcgacagatttgtcagggttgccaacatcattttcctcaacaagctctggctgtcgttccgacctagctcggccaacgtagcttctaccgctgtcgtgaagtatgtccccgcttgctctgttctcccatctctctctctctcttcatttcctcctctgcgcgcgtcgtgggactgacatcatgttcacttcccttggcacaggattctccctgatgccgcacttgaggtcacaatggagcgatccatgcgatgggttcctggacagcacgtatacctgacctgtccacaaatttcccgattccgttcgtcctttcgttttcttttaccttttgctctctgttcttacccagatgtaagtctgaaaattgactttgtatcgcatacgtctctcccacagcgttcgaggcacacccattcacggtggcttctatccagtcgaacgactcgtctggcccatcgacagtccggttgatcatcagagtccgagatggcttcactggcagactcgccaacgctacccaaaaagccggcggacagaccgaggtcaaagcttggttggacggccctcacggattagtcaaagggcttactagctaccactcggtcgtcttgatctctggtggttcgggtgtcacttacaccttgcctcaattgcttagcttggtcgaacaggccaagcagggtaagtcggccgttagacatctaacgtttgtctggatcgttcgaaatcttggtgggtcatcttctccttctccttctccttctcctctcgcgcgctctcatcgtggtcagagactgatttgttcttcggcctgtcccgctcaatttgttttttccccttctctttgcttcttattattctccttagaatctgtttcgtggatcggttcgactctggcctcaatccaagcatcatgccccgcgtctttgatactcgaaatcaagatctttatcactcagaccaactctgtccacccgtccggaaccggcagccctgtgtcttcgtcccagacgcttcctgccatccacccccacgcgatccctgtcggtctgtctgagcagagcaatgagaagcccctgaagttggactctgcagagagctccgagtctggtagttcagacggacacgagaatgagaaacgttcgaccgaatactcaatcgaggacagcatcggacggtgcgtctcgatgggtcgaccggacctagacatcatcttgagggatgtggtggatggtgccaggagtggtgccgtcaatgtttctggtttgtccttcgctttcctttctgtcttttgtggcctttgcgctgtgtgctgacctggtaaaccaatcaaactctcaaaccgaattttaaaaacaaaaacaaaaacagtctgcggaccgaccagtttatcgaacgcggtcagggaatctctcgcgtcaggaaacgcctacaggctggccgatgtcgccaagggaaaggtcggcgctgtcgatctccatgtcgagagctttggctggtagatagacagctggcttgcttgctagctatcaagtcatgatagccggttgatatttagtgtctatctacccttcttctctccctttgctcctttcgcatcttctatctttttttttatcaagatttcaagccctctcttccttcgtcttcgtatatgtacaaacgcgtataaagatttctcgattagattagccagattcttctctttccctatttcttctacatatctttgcccacgtccacatagtcattctcctcccttcatgaatcacataactccaatctgtccaactccctcgtccctcgtcttcttacgaattggtttcctcgtctcttttttttcggataaattaatgattgtctctgagtgcttggttaaattcgcagcgatgaatgaacacaatacatcaggacggcccagagccaatagatcatagatcataacgaattatgaggtttctaaaggaaaaaagatgcatacggagaatttttaacaccggcgtataatgccgtgaggcatgaaaatccctcgatgagaagaggtatttgagaaacaaaaggaaacgagaaaagagagagagaatatatatatatatacatcaagaccaaacaagacgatgaaaaagagactatcaattcacttcgttccgtgaggcttgtcctactcatcatgttactcgtcccgcactcgcttgtgcacaggacactcgaatgccaacctacttggtttgaaacggctccgctctctcaaatacccattctgctcgtccaacccaacgatcagagatctctccgaatccactgaaaacaaaattaagccctgaaagagaggagagaaaagattatagaaagaggccgaatctcgtttagctggtactcattggtgattttcgaagacaagctgtttttggaaaatttgtatccttttcgattgaactagtttcggtttcagagataagtattgagttcgttaatgactgatagaacgagacagataaaagaagggtaaactcaccggtcgatcacagggtacgtctcaccaatcttctttccagactcctgtctaggagaaacggcggcttgatctgaatccccctcggtcgctgtcgtcacttccaatcgattggacccgtccgttgacgtcatcagtcctggggactgtccgccattctcccaatcaactagacctcccaatcgatttgctctgataccctccacaccgagctctccgagtccgttctgcatgagctcgagctcggcgtctcgaatcctatcccagacctgatatcaagatcaagggagattgtacatatacacagagcaaaggtcagatcaggttacagtcgacgatcagagataggaacaagttcgtagcgatgatcacccacctcatcacacatgcatccgacacatgtttgaacgtcccatttgattcgcttgttaaccgggaaatcagccgagtatgaaggcaaggccagatagggcagcatgcaacaacacgaggctagcgagatctcctgtttgtagagggtggcgattctaacgaccgggtcagatgaatcgtttaagacgacttcaaatgtgagtgtagatgaaaaccggaggccagtgtctgtcgccggcagcgtggtcgatcgaatgtgatcgtccgtgggctagccagaagtaaaagcataaggaaaagattgagggcaatgtgttttcttttagttcaagtactgataaaaggagagtgcgtgagaaatactcaccagacgtcccatccttttccactcccaaaagctacccttgtctttctcggcatcaatcaagacattgccttcatctctggccttggcaacaaatcctttgagaccatagccggacttcgcgccttcctgaaagatatatcgtttggggccgatgatctcttggacctggcttggattctttctggaggtgaccgtggtggtctgttgaatgtagcaattgatcgcatacacactcacttgattcgaaccgaacgtcagtgagagtgtaagaggaccgcctatgataaattgctgtcaagaaagggaacgagagaagagattcaggtagcaggtcagacaagaaacgttcaagagggaagtgtgcgcgtgaaacatcaatgaggggtgcacatacactggctgtgaggccaatcttgtaagggccaagagtgggggagatatcctcttggtggtgctggaactgatagactgtaacgggaaaaggcgagcgacaagcaaggatttagagtgtgaagggccgaaatgcttgtagagagaaacgcactgtttccgtccgcctgagagggactagagacgatgatgacctctcgactgtcggacagatctttggtgaacatgccgccagagcctacgaccgttccctcgacgctgctcgttcaaaatagtggaccgagacgttaggcacgaaatacaagaggatgatcagagagacaaacgaattgattcgtacaagtactgaattcgaccatgggccgatcgctctgtgactggactagtgctcgggatatgaaagttgtactcgatcctgtgtgcgcgcgcaagaggatgtggacatgtgtgtgagtacaacacaaaagatagagacgagagagcaaaagaaagaatacctcaggtctactcacgtgttgacacccttctcgagccatataccctgtccgtcgccgtctagaaggagaactcggtcaaagattttttcgtcttcccaacctgacttttcgatccggagacgctgcattccaacgagctcaactttgattgccttgacgagctttcgttgaggggcgacgatgttgagaaagccattgaccttaccgtcccttccaggcaccgagtcgtctgaattaacctgggcaagggcgttggcccagcctctgccgggcggtcgaataaagacaagtgtttcggcaaggcagagcgatgcctttggttttgtcaggttcatgctcaaagcggacgagattagatgaggcaagtgtctagagtcttgtccgcatgggttcctgagaggatctccaaggggaaatatcggtgcgatagcgtccggaagagactgattcgaagtggatcctaacgaagtttccaagatagacgacacaggggatgatgagagagaaggtgatgatgggagcacttgagagcttgtgctgggagagtagctgggcggatcatccctgggagtcaaggaggatgaagcggtgagtgtcctggagttgttcatgacgagttttcaggaattgaacaaggaaacaaggacaggaacaggaacggttgctagatcaagccaacgggagaagggcgcagaagaaggagattgactttctgagatcttctgacgggtctttataagggaaaccaatggaagagaaaaggcgaggaagaaagaatcgaacagagaaaagagacgaaaacaagacagacagaggtgacaacgacgaaagattatgcacgatttgattgatggaactcggaagaacaggatggaaagaaagatggccgaggcaagagtgaggggatgagtcagtaatcaggacgggcgcatgtgtgggcgagcatggttcggtcagtgttcaattaacctgcggggaatgctcatgcgtcccgttccttggcaacacggcttgctatggattgagcacatctgttcatatatgtgtacgggtgtgtttgtacgtagggtgtccttctatctatttgtccttctacccttctgtctacccttctatccttctacccttttaaccatctgcccatattcatgaatatgtctgctcgcacccgtttcgcgctcatatgattggcttgcatctccatgatctcaccaatatacgttcataattaatcgtgtgagtgtatgtgtcctctctacgtgcttggctcggaacgggcgatttcggagaagtccgatgatagtgaggagaaatccccggcgagtagaaccgagagccaggtgccagtcggtcggcgatgtgagccgacggtgaatttttaccttcttgactcgacgaactatgtttttctttgttatcttctggtagagccttctagtttctctttgtagtactcttactgttactatgattttcttgttccttggtcgtcaatctattcacaatattcatgatgttcatagtatctagattacacccctttctaattcttccgttcttatttctcctttcttatttcttgtttcttcttctacctcgtagttttcagctcatatcttcgtcgttaacgctattcacttttctttgactatcttacttctcatctgtgcgcttctcggccgagatgacagaaagctgtcctacttggtcggatcgggcacaccgcatgttatacttcatgtaatcgaattagtacgccataggaaactctgggtttaccccggctgtaccccaacaaagccccgaacgtgtttgccccaaatgtaccccctgtcaataccccataaacccccagatggaccttctaaccctaactggaaccactgtgtatgatccctggccagaactgagatctctcaacaagcaacccggtcgtttggtgatctcgtattacaaccactccgagacccacaaccatacatcagttggctccatagtcctatggtcgccccgttcgacctgtcgggctctgataagacgaccgtatcgtcttattcagacaccgaagacaacgacagggaggtcgaagagtcagtcaccacctattcttctttttctcttgtgttttcctttagactgatacatccctcgatgccctatttaccctatctctctatctgtttatctctcttcctctacctatagtttctcgtccgcagaggtcgaggccgcacacttcagatcacgctacctcgagatctaccggacacttcaagatacaaaggccgagctcggtacgtccattctgtgtttctcctcagcgaacctgtcaaacgacgatgcgacaattgaccctctctgtctcctgtcttttgtgtcttgtgttgcgcttttcttctctcattctcatccatcgacattcaatcttcataagacgagttccagacatcatccaaagaactagaagaagaactcgagcgagaacttgcagcgaccgaggctgctcaggaagatctcaaaaaccggatcacccgactggaggccgaaaaggaagaatggaaggcaagtggatcctatgcattccaacccattctctctactacttcaatatcgggcgcggatatcagactcggccggcttactatgctcccatgcccacaactttgggaattttcatcgttgcgctggctcttttttctttctaggcaaaacatttgtctacacagaaggcacataaccttgcgctcggatctctccagcgagagctcgacgcgattgtatgttgattactctatccttctccttgagaccgagcttcccctccagaccagctgatttctctccttccttctcggcacgccttcctcatgaacatcagaaagcagaacgcgatcgttacaaggtctcgttacgggatctagagatgggcgtcgacgacctggagcgaaacgaacgcatggtctcatcttcccttcaggacatggagtcgaggtataaccgagcgatcgaggaaaagacgctgctcgagcaagagttaattgataagcaagagttagaggaagagactcagcgtctaaaggatgagatgagaggtgtgttttatatcctcttctttcacttccttctttatcttttcttttcctcttccttttgtttctctcgtcttttctcattttgtgaatacaatgactgacattgcgaatggtctcatcgaccaaatagatcttttgtctgaactttcggtactcaaacaacagcaacaatgtaccaaagcaccttctcttccacctgcctcgcctacgttatccgaagaaacctcggtcggctctcgacccacgtcgctcgtccgaaaatcttcccaagaactctccatggcagatttgatgatgtctcctccatcctcctcctcagcatcaacatccttcctggaacccgtgcttgcatctccgtcatcaccctcgttgagggctactcggacgagctcgggtctaccgaaaagccatacatcaccctcgatctcacatatcgtccgttccccgtccagactacccattccgggatcctcacccaatcgatcttcccgctcaggtattacctctagcacgacaagtagaaacctttcgttgggaagcaccatcacttccaggacggtggtgtcgtctcctctgaactcgaccctcaagccggtcggcagcaatcaaacgacgactcaaccggccatcgtctcaaaccgaccgacaaaagtcgactcgaaatcaagaggagttcggatggtatctgatcttggggaacgcgtccgaacgttacagagtaggattcagacacataatcttccacggatgaggaaggtgacacctggaaatgtttcctctcgcgccaacccaggaaaccccttgtcgccttcttccagaagacagggttcaattcctcctctgccaacattgccaacgtcgccgccgataaacagcctgcccagttcggcccatccgaggatgaaagcgttggcagataggtcagctccgccgagacttggtaacggccaatacagcactcccggaacaccaggctcaggcgattgggtacttgttagtgagaatgaagaatcacctacggctctcaaacttggagcacgggctccatcagtctctagaccgtctgctcgatcgtccgctcgtccagtttctcgacaagccctaccttcttctcctctgagagccggatcatccttagcgttccctccttcttcacctttatcgtcaacatcgtccccgcctgcattatcggcagcggcgacaaggatgaaccgattgtcgatgtcgagtcaactcggacatagacctgcttccaggttgtcgaccttggcgcctgctgggatctcagtcagagcaaccaccccgacgccctcgacacttgtcgaaccttcagattcagaacctaatcgcccgcactccagaggtccgagctctggttcagacatggagtcgcaaacaggtagagggctccctccgagattgtcagagtcaaattcatcgacaacatctctgaatgatctagcagatgaacccgatcaaccgtatccgttctctactttgaatactcagcctcagcctcgtcctcactcacgtacacaatcacattcaaattccatttcgcattctagatccagatccagatccacatctgcatccacatctacatcgtcccggccaacaatctctcaccctcgacctatccaaccggctggttctaccaacccgaccgaacaaacggtctctcaaccacaatcaaagattcccccaagatcgttccattcgagaggggatggcattctgaaacggtcgaccggtcggacgtccctgattgagcgttcaccaactaccttcaacttgcctagatcgtcaccgccatcgtcgccgccagcatcctccggtcttcggcctcaggcccaagggcaagggcatatttcccgtcttcggcaacctcgaacctcttttggcccctcctcttctaccaccacgaccaccctcaccaccatcggcgctagtggtacagccgggcgaagcaggccgaattcaatctcggctcttccaaagacaaaccttccgcctgtgcctgccattccgtcttatatgactgctagcttgacgcctggtcctaaagtcgggcatggagtgagaggaagacggtcggtcggatcggtctcgatgtcggtaccgggttcaggcagggtcatgtcgcctgttggtggtgttggaactggcgcgtttgctggtgagaccgttgttgggtcgaggtcggatgttaggccaaaatcagctctggcaggacggattaggagtctgacgggtggtgggacatgatgtctctttctcttctcctctagtctagtgtcttgttcctctgcatgttctccttgtacgcttctcttttgggacttctttcgtgtacatatatgtactctcattggttcatatacgcctccgtggtagcggtgtgcttgttataccctgttctcttataaccactacatatgatattccatattcaattccccttcctgcctggattttattaaaacgtagacggcccttgactcagtcaacgaacatgatcgatctaataaaatcagggagcacttcgtggtggttttctagagtagtcacacaaacaccaataagacattcggaaaccaggattatattattgtctgtgtgactactcaagaaaaccaccacgaagtgctccctgattttatcaggttatgagcccggataagcgcaaagacactccagaccacgatcagcctgtgtaaaaatgcccgctgggttacaggtgattaggtaatgtggctggagcccaaaagtagcaacactaagttgatgtgaagctcgagggggcgtgttggatgtgagcatccttcacgttcacatggggttgtatttcagtgggaagagcggctctacgtagttcagggggcgcagttttgaatcctgtcaactccaattcgctattttatcacgatcgacttgaaaactaggaaggtcaaaagtgaccgagccaggaaattttcaaattgaactggagaagttgagtgtcaaacccatttagtactcgcatagtccttgggaggttacttgaatcaatgattcaaaggagcaagcaagtgtggacaggtctacgttccctcctttatcaatggagggactccctcctcctcttgtttgaccaagaaaaagaaggaagcttagaggaggtgtctagtctccaataggacggtaatcttccactggctagttagaaccctgactgtaaggaggaatctctcccgtggagaaagaaaccgagaagtagggttctaggcaataagctggtggttgtaggaggtaagaggaaatagggagaaagagaagatacagaagaaaaaatgagaggattaacgagggtgaccacctggataaactcaagggagttgttcatgatgcccacacctggttcaagaccaatgcgatgagagaggtggaaaaggaagagatgagaggagttgatgatgttgagagaacagttaaaaacccaaaaaaaaagtcttcctaaatacgtcaacttttttgttcagggctcgtctcactgacgcgttcccccccagacgcgctacaggacttctttacacgcttacattcactcctctcatatatacacgctcgcactcacactcacactgtctccttctctttctcgagccagttcaacatgggacgaaggtgagtggcgtatgtgttaatggtctcatggttgttcataatcaccaagtctcacctctagtttgcattcctgaagtacaggactcactccggtaattccagtcttcgaaccaacaccagctcatcctcctcgtcttcctctgatggtccgtcaagaacccttcggtcaatcttgactgccaaattagctagaggagtcatcgagtctcttgtccatgtgatggtgtttgaatcatcatgctcgcctgcggatcagacgaggtcgtttgaggaaacaatgactcggatgattgaccggttcgattctaaggatgtcagagtccaaagatcactctctcgactcctcaaggtccgttctcttcctttgtgatgatctccaaacgatctgtcagaccgatgtcgaagctgatgctcatacgtgctttccttccaacggtagatattctggattgaacagaaacggatagatgctgcgcttcattcattctcgtctacagccgcttctggatcaacctccaccggtagaccacctcatgttccagttgttttccctcgaagtcgatcaaatattcctctacccatgtccaaccaagccagagccgcaggtgctggggatgctaacactacgacgaatcctttgatccctcctcatcggttcatccctcttgtcaaccgggggtcgacctctcgtccgttaggcgcggtctcctttctcgatagagctcgtccacgttcacgaccgactatccctacgaacggaccgacgttctccgatttcttttctgaaaacgacgaacatgacgatgacgacgatgatgagaacggggaggatgatgagtttggacttcgagaagagacggatccgattgatctgatttctgatccgacgggtgatcatcgaacacctgttgatacaggcttagattctcatcattggggatttgctcctgacgatgatggtgatgatgaggaccaagaagaggaagacatcgatcatgggtgggttcatacaggaaatgtcaatgaagacgagagcgaggaggacgaggacgacgatgatggtgattatcgaccgagtgttggagtcggccgttctgaatcaaacggaatagccgatgaggaaactgatgagccgcctccattttctcgagctcgtcggttcacagaccttcttcggccaagcgccggattaaggacaggtttgttgagaaccggtggtcctctcggaatcagagcatcctccagagatttagggttgagaagattgggttcattgaattacattatcggggacgaagacgaaaacgagaatgatgatgacgaggatgatgcggatggtggcatcgatactgctatcatcattggtcaagaaggaggaaacgacctcgaccgaacgctcacctctcgaactcgacagactctaggctctcgtcccaatacgttcgtccgtccgaggagagctccgccaggcccaacggcaccgttggaagaacactaccaatatgcgtcctacatcagagacatggcggtgagcgacgatccgttggtcgccggtagggctcgtagtccgttgccatcgctatcttcttcctggatgtcgatcattcaacatttggcacctacatcaacatcacggccatcaccatcgccaacactaccagcatcttcatcatcaatccaaccatcatcaaatatactacctgcaagcgatgtaaataccgagaccatcaccaccacctcctctgaccctccagctgatcttcctgcacggtctgcacccgcgctgggatcactgaacacatcagagctgagattgaatccagaggaaagaaacgagttcgaggatgcctcagcagagaggagggcacagtctagattcggaagagaagatcgagtccggtcttgagctttttctctctttgtcctcctttcagtagtccattctttccttctcccgctgtcaatccttctccttccgttctttcgttctgtgcataaaggaaggagaagtaataccaaatcggcctcctagaaaaatccagttgtaagagataaacagatgtatgaaattagagaatcttgtatggccttgctggacgctatttcgttttcttagtatctcatggttcatgtgccttctagagaactttcattttatttttattctcatctttaagactggttgatcatgagaagtgacaccaaaagaaagacagagacatagatcgagatcagttatacaaaagagaagaagacaaacaagcagtaaactgggtatggagagaagaagaggtcaaacgcgaggagattgttacaagtagagtagaaggagaaatcactgatatgttgtctaatccaaaaggctgaaggtctttttctttttcttttcctcagagttacatttgaaaagaagagagagagagagagaggataagaagaaaaagaggcagaggcagagacctgaaagacgggaaagaaatatagatactaagaagagctagcccacgtcctagggaactctcccccaaccccctcccatgcaagcgctctcactccaactttccgagatgatctaatctgtccaacacaacggtcttactggtctcttcaatctcaccggccaagaaaatctcatctaggatggcgtaaactttgtaaaagttgaagacgagatcgagctcgcatacgttctgaaagaacgcgtctgatgattgagattaccaacagatgcataggcaaccaagccagagatagggtagatcaggttcggtgttagatatatatcaacaaaacggggagcgatcgatagaaacaaccagaaagaaggaagaaacattagaagcatacctaacacctcgacaaaaagatggatagcctccaaataggccaactcattatcgttcgagtccacacagatacagaagaaaagaccggcataacgacttgagtgtgagcgtgagtgtgtgcatgttaccagttcagcgtgccaacaagaatcagtccaagattaagactaatagatcctgcatgagatgaaactgagggaacgaaccgatagacgattttgaagctgcgaaactgatgtccgaagccaaagtagagagaggccgtcaactttaactcaacaacatcaatgtaacgtgcgtccacacatcgacagaacgctctgatgagcaagaggagagagagatctgacggacctcgacaaaattcgattgatacttttggtctcggggagcgatcaacctatggacctcacctctcagtcggacctacaagtcagttcgcttggtcaatcattagctctcgacatatcaaacagtaaaaagagaagaggagcgaaagaaaacagcaaaagcagagtaaacagaggaacaaaccttttcgtcgtcctcgtacgggacataccacttgctcaaccgagtcttgccttgtctgaatgtgatttaaaatgatgatcagttcccgagaaccaaaacaagagacaggttcgtcgacaccatcatcacgactcatccgcatcagacgacatgcatatacacacatatatataaaacaagagagcagagaagagacatgttcgctcacctattttggatcaagataaacttgatagacatgatggttgcctaaagagatgaggttcgtcttggggttaaatccgagaagacgaatgcgtgtagatggcaagaggcggtagatgttggtatagaaataacgtcctagtctgatattaggaaattattgtattcgtttttatcatgttcgctcaacgccgataccgtgcgtttgacatacttttcctttgtttctcttattatcggattcaaaacatgaataagcttcctaaagaaccagttgtccatcattgaacagtaaaagaggaaaacgtaagatcctaaaaaaagaacaggtgaacgatgaagcagagttgaagaaaattgaggatactctaggcctgttgtcggtaaccacatcaagaaaatagagacaaaaggcgagaaaaggacaagagtgaaggaaaggcgtatggaaagctgtagaacgcagctctagaaagatttgataagcaagaaacatcatcaagacctccaaatgaggactgaaagaacagatcaagggactacaaaggctttcaaagcaagacctcatcgcaagccgacttgttcaagattttctgggggaggacgatacacctgatgtatttccatccgcatcagaagaagatcagtttgtgttatcatagaatgaggagaacagaaaagaaactcacgatcggatgtatacctccttagagacattgacctcatccgccaagatggcaatcgtcttctttggcttcagggccgcggcgtcctcgggagcaccgtccaccctaccccaagcgccactttggaccaaagttcacaaggaaagaagatagttcaacactcggctcacggaacaagaagtggaacaaggaggagaagaattcaaaagagagctgtgcctacatcttggagtctctaccgacgattccccatccgactacggcgtgctcacccagctcgacaccctctaacaaaattgcctcatacactctagccccctcgccgatgatgacgttcggtccgatgctgacatttggtccaatcttggcgctcgggtgaatctgtgccgtcgggtcgatcgacaccgcgccagtgatctctgggctcgaagccgttcgagccgtaggaggggtaagaagtccgggagaagtcttggagaggtgggagaggtagagcgcgttggcaggaagagcggagctatcagcaggaggaaagtaaagagagaaagaaacaatcgtcttagccaggaaaaatcaaacaagcaagagatcttgacgaaaaagggacgaacccagcgctcttgatctgctgccaaaagtcaatggtctcgtaaacgaagagctttcggctactggccaaccgggtaataacatcctgttcgagatgaatgatttcgtccggctcggatgtggggtcctccctgtgaaagcgaataataaatttggtcaagaagatcagtaaatatatt

SEQ ID NO: 2962 - DNA, 8538 bp, Xanthophyllomyces dendrorhous
tacctccagtgttgatgactgaacgtaaaaaaaataaaaataaaaataaaaaaaagagtaaagggcagtcgtaagcacaagaacaaggcaagaaggggttatgcacaacccaaaacactctatgttgggatgtaccatcactgatgaatccctcgggcttctctacgtaatggagcgccattctgctctcctggtcaacaactatagatccgaaccggagctcctggcccttgggaacctttttacccatgattgtgcccactccacggtgcttggagtggaactcttgaagagacttcaacggaaaggacgagcagatgtcggcgttgaggacaaaaatctgatcaggcgaatttcgaaggatgacatctcggactggaaagtgggatggaacaggagatgtcagaacattgagggagtgaagaagagaaagaatgtgtgttcaagaaacacggacagtgatagagtcctccagcggttcccatcgccttgaactctcgcaagtacctgtcgacaaaagtccagaccggtctcacttagcacgttggtggctatatacatcctattaagcaagaatcgagaagctgaaagatacatacgaaatgcccatgttcttgaattctctcctggtctcttttaggaaaggctcaatcactttatcgtcccagactccaatcaggaaaatctcggtaagacctggcacctgggagagggcccggatctggtgatagatcattggctgtagcgggagaggggataaaacgtgggtttgaaatagatcagacaagcgaagagatgagccaagacgatagacttacctttccggcgatggggaaaagaggcttaggagagctaagggagagaggtctgaaacgggttcccttgctgcgtttgtggaaggcgatagaaaaacgtttgagagagattttagaactaaagcggaacgagagatgattccgaccaagcttagactataggacgagggtgatagagaacgctgacttacgaaggacctccgatgaggatgacacctggaatttataaagttcgtcccgggaaccagatcgccaaccagagtgatcgaggaaagcaagcgttgagggatggttaggaaggacagaaattgacaacaaaggacagcgtatacaaagttgatcgaaaagagatgagccaacgctccggactttgccggcgttgagagagagagatgggatctagctctgatcgctagcgatggacgaacccttgatggcagcgtgagacattgtttggagacgtaagtatgctttatgttctttagaaagagagtgcaagacgactggatggtcgaggtaagatggaagcgagatggttgtatcgtctgtgaaagaatccgccggaaggaaacaaaccgacacggccagtgatgatgaaacagactggcccgaaggttacccgagggactgtaaccatggctaccgctagactacccgatgtgagcttgatgactaagcgttttctggcagcctggatgctattcaagtatatgcataggtttctgttgggctcatactacatatgacggagtagaacatgtgcgcgcgcaagagaaagagggagataggtacatgtgtatgtgtatgtgtatgtatatgtgtatgtgtaattatatgtgcgttctgagaaaagccaactgagagactggaaagcgttggccaatacgatgggccaaagagtcatcactcaatccccaacgacttcatggttgcatcacactggtttccagcttgaagcaaagggaacgaagaaaagacagatcatgacgtattcatgatgggtcacagacaacatgacgtcggcgttagagaatggaagaacaagacgttgtttttgacctatgcctgaggctgtatagctgcttgacgggcgtactcgctaacgcacagccaccggtatatagagagagagtgtcggtgtgtatttgtctgtgttggaaattgtatttgaggttgtactcgaatttgtaatccaaatcatattagaaagtattagaaagcttactaggagttctactagaaattctactatgaattctgaaggaaatcctaataaaaatcacatctcaagcaacactacagatctcaatagcaaacctattgaaaactgtagtatgaactgtattcaaaatcgtattgatcttcccattaggaaattcgtaatcagcgatcgtattacaactataacaaattcgtattgttttccatcttggcctcgttctccattcgtccttttcttccatccgcactctctttctctcatctctctctcctgggtatcttatccttcttactcactcactcactcactcactcaccatcactctttctgtattcgtccctctcttgtgtctctgtccttaccaacaagtttctacacctcctttaccttcctctcagccgagtacatcaagtgggagctgcttctttgtcgcttacatggtgcgtttcatctatcttgcttgcctgcctccttgtttttttctttggtgtttcctttcttcctttcctctatctctcttttcttcactactctttgctctctctcaaagatcatactatcgcagatcatcctgtaagatattggaggcatcttcagtgatgggcttgtcacataagtgaggcaagcaagaggggagaaaaggagaagaagcagaaggaaaaaaacaaccagatggacgtatgacaggagagcgatgaagagttcaatcatcccatgttcaattagcacgtctcttcatcatcgctcggtatcacacatcgtttttcctcttctcctcataaaacatacagaaaattcgctcttctgctctctgtttggttataaaaataaaaaaaagcggtttgcccttatgcagaccacatcgatcatccttgtttctgaatcattctgcgtcgtcaattaaggcgacagtctccaagatagaagactgacttggttctctgtcttttgttcgtccaaccctctcctactctctatgaaccccatgtctcggatatccaatcttttacccgaccttggcgcctcttttcttcatcttccttctctgatctatcataaatctggtctgtcgatcggcctgtcggtctcttaaccgatcaaggctacttccaccgaaaaactagatcgttccattcatgacaccgagcgtttcatcatcatcgagcagcaggttcttcaaggctccgtcgccatggccgctgctcaccgaagggtctcgaggggaaatccggaatcaaacgccctcgtccggcaggcagagcttggaatcgatcagagtaaagcccgcttggaatttcttcgcggtcagctcgagaagaagaagaggaggcgagctggattgcccaaagtggaggaagccagatggaccaaccagcttggtatgcccgatctttattgtctcatctcatccaatgatattctcgaacgagataactatacgaactcagaaagagaaagcgctgaacctatatcgtacctgcttggtcgatgacctctctagatttaatccgagcggaaactccactatctgttcctcgaatctcgcacatgctcagcaaactcgagttcaaactgaaactcgaagaccagttccgacagggccgagaaaagatggcttccgcgctgacaaactcgacagcaaaggacgaccgaaaggaaagagcccgactggcagccgatcaggaggagagcaaggaaagaatcaaactgctcaggatggcggccaaaaagtacaataatctactctgtgatgaagatgaagaggacgaaagtttgttcttatctcctcatatcccttctctctatctccttccttccttcttggcggctaggatcaggacacatgtcacatgatctctgatgctgaccaagcatatacgctcttcgttttcttgaatggacccaccagatctatcaaaccccgccaaggaagctatcaatcgaaaaccaatctctggtaaactctccctggccctagtctccggacgagatctcgaacatgcccctcttcctagctcgtcttcatcctcactccggtcgtctccgaaatactacaatgagacctctgtcgagttcaaggtacactctctcgttaaagcagtctctcatccatctcgaaacgatcgttggcttcaagagttcacgctcgaaatggataaagcggatgaagtcgagatctcattttacgaccagcccgtcggcggaaagagcggaaaggaggaaggcaagcgagtgttgattggagtgatgtggctcaaagtgagcgatctgttggaagctctccgaagacagaaggtcgatctgatgggaacaggcgaaggcggcgagaccaactgggtcaccgccgctaccgtcagagatcgggacggcagatcctctgggccacccaatggagggagaggaccacatggcatcgcaggtggatcacagaacgagttgggcgtcaaagggcaaggcgtcaaaggacagagctcgaacggggagggtctggagggttggttctcggtcgaaccacaaggagctgtcaatctcaaaatggacttcggttcgtccctcttctgtcttttattctttgtatagagattcaaagagaggaagagttgtattactgacttgtgaccgataacgatgacactcttgtcctctcatcccttcttctcttcttctccacagtcaaagagaacgttcgtcgacgacctctggacggaacccctggtgggctcggtcgtcaaggcgccgtcaagaagcgcaagggcgaggttcacgagatgaacgggcatgccttcatcaaacggcaattcttccaagtcattctttgtgcgctctgcaacaagtttttgatgaccggagacggttatcagtgtgaagactgtcggtacatgtgtcacgaggcttgctaccataaggtgctcacaaaatgtatctcgaaaccgaactacgaacaggttagtccaccatctgtttttgtatactctcatctttctgtcatcgctatacaatcattgctgacgaacgagcgtaatgactgaccggtcttcttccgactgatgtgtcatttctcactctcaggagggcgacgaagacaagatcaaccacaacatccctcatcgattcgagccatattccaatatgagtcctaactggtgctgtcactgtggatttctccttccacttggtagaaaaatccctcgaaagtgtaacgaatgctcgattacttgccacgaacattgcgcccacttggttcccaatttctgtggaatgtctatggagaatgctaatatgatccttggtatggtccgagatgttaagagcacgaagccaaagagggaccagcaattggctgcttcccctgctcgacacaaccaacagcagcagcaacaacaaaggctgccactctcaacctccactcaatctattccagctcctccttctcaaactcaactccctccgctatcatatcagcaagaccataggcatcctcctccccagatacagcagtcgcaaccgcagcaacccttggtggatcgaatgcaaaatctttctgttagtagcaagaccccagagcccagacctttgcctccgactcaggctcctgcccagcctggttaccaaaatgtccaccagagccgacctcctcagcagcacgcttatggatcttctggatcacatcctcttccctctcctccgacccaacagcagccttcgaggggagatcgaccactacctcagacaccagggttgagcggatcaccatctgtttcgactattcctgcaattgctccccctccccggtcaacttcatctcaacacatttcgtctcaacctgctccaagcccaccccatccgcaacatcagcggcttcccagtacgccgcctcaaatcacccctcctgcccaacacccacctcagaaacaacaacagcaacaacaccaacaatttccggcggatggcatatctcccgcaggagttgtcggtactcctcacatggtctctagagtcaaaccgaagaagatcggcctggaggatttcaacttcttaacagtactcggaaaaggaaacttcggaaaggttatgttggctgaagaaaagacgtcaaaccagctctatgcgatcaaagtgcttaaaaaagagtttatcatagagaatgatgaagttgacaggttgagttattttcttcttcttttgctctttgactgtgatatttctttcatatgctgatttcaatacaccccatttgatgtggtaccaatagcacgaaatccgagaagagagtattcctcgcagcggccgaccgaagacatccgttcctcctcaatctgcattcttgcttccagaccgagacgaggatctatttcgtgatggagtacgtgtcgggaggagatcttatgcttcacattcagagaaaacaattcactctcaggcaggcaaagatgtatgcgtgcgaggttctgctcgctttggaatacttccattcgaagggaatcatctaccggtgcgtcttcttattttccgttcctcactcgcttgttactctatcatccgtctggctttgtgtattgaactgctgttctctgttttcttctctttgatatgtgcatttggtagagatctgaaattagacaacatcttgttgacggtcgagggacatatcaaggtggctgattatggtctgtgcaaagaagacatgtggttcgggaagacgacctcgacgttctgtggaacgcctgagttcatggctcccgaggttagtatgcttttctaatctttactcaagtttctatggtcgttgtatcttaaagcttgatgggctgatatttgttttattacaacagatcttgatggaacaacgatacggtcgagctgtcgattggtgggctttcggtgtattgacgtacgagatgcttctcggtcagtctccgttcagaggagacgatgaagatgaaatctttgatgctatcttggaggaccctccgttgtatccgatcacgatgcatccgaatgctgtcatgcttttgcaaggagtgggtttgggtcttgtttctcattatccttcagtttggtcggttatctgtcgacaagaagctgacaaccgatcgcggggtgaacgttatttcctagcttttggagagagatccggcaaagagattgggtggcggtgagaccgacgctttggagatcaagaggcatccgttctttgctgatgtcaacttcgatgatgtctacaacaaacgaattccaccatcttatttcccttcactcaaaaaccctctggatacgtccaacttcgacgctgagttcaccaacgagcaacccacgcttacgcccgttcatacccggctcggtcaaagggaacaagaagagttccaaggcttctcatgtaagtgcttttgcccttctgtgatgaagtacgtttgtactgatgtcgatctgctggcttcgaacggcattcttcttctctagggatcgcaaactgggtcggagacgcttaatacgacacacacgtctatactccggctagctggcctattttttcttatccttgtttcctctggatctcttgaacaccttactttctttccatccttcatcttgctcggtatcactgttgtccctcttgccttcctccgtatctgtttttcttccattttatgaccccttcctaggcttctcttaattcctcgaccgcggccttcgggctttatcttctcctttttgtacaaccttcttccttactcgctagtgattgcgaacgccagattctccgtctttccctattgattgttttgatcgataatgtcttctattcttccgaatcttcttcatatatagataaacttttcttcgctcatggttcatctttctttctcctctcttgttggatcaagttttaattgaagaaccatcgatcattctcgacttcaaatgtaggttgctccgagattcactctacccgattgcgtctttctttctcctttttcctccccactcttttgcgttccttaaaattctattcgctatacaaaacctcttcctttttttctccctcgaccttttttttcgttcactttcttgcttgttggttctccctttctatgtgatgacagtgatgtgcctggatccttctttcctttcttttttcttctttctttttacctcgtgttgtgttgtggttaatctccgattttattttgtttcatctcgtttgaatagttcggttcagcaaatcaagaaaaagacgaatcaacatcaggatacaacgagaaaagcgccgagagaaagagatctcgatattacaaccttcgaaagaccagacagaaagagaaagatagaacaaagacctgagagaacaggccaggagagtatcaagtagactgaacatagagtcccctcatcttgttgccgactgctaatcgtctacgagcttctaaccaactcatcgattctgcatatgtctgttttcattccagaacaaccccccaccccccaccccgagaaagacaa

SEQ ID NO: 2963 - DNA, 41841 bp, Xanthophyllomyces dendrorhous
aaacccaagattattagaggattgtcggttgataccgattcaacgcacgagaaacggtcaagaaggtgaaagagggaaggacggacattggggataacttcgacgtctaatcctgccccgttgtcttctttttgccatgtaaagtggaaatccttcgtaaccaaagaacgcaccaagaatcgaacaagccaacaaagaaatcagtataaagatgcgctgaataaggagggaaggataaacgtacgttggtggtgtttcttctaccggtggaaacatcaaccacatcagccgtcacttgagagtggacctggtttgtgctcgagtccgtatgggtcaccacggccgttaaccgaaggacagaaccgatcgggactggaagtctgtcgcgcgaatagcatgagaacatacacatctgaatcagagattcttatagagaagtaataagaagtaaagaccaaaatagatcttacttgaatgagatctcatctagagctctgtcgttccaaacagaaaaccatcagaccaggataggggaaacgtatgtgtagcatagataggactcacaaaaacttcatcgggcttcgagtgaatagtacgacgttactgtacgacagctcgtacgctaacctcatcagatatcctggttgagcaacaagacaggaaagaagaaaaaattgaacccagttcatcctggactcgagagctcaagggaccagaattgagagatgtcctgacctccaaagatcttggaatgcatgtttctctgctgaggactagctcaaccaaaggccgcaacagaattagattagattcgctactcaagaggatcgtacgtgactacatatatactgactgcattaggtggtcggcgcttgtctgcgattcaaagtaaaacagtacatgaaaggagcatataagcgctattctcgatgaaggggtgaaggcatccatcgactcaccagagtgtcttccatcttcacaattctcttcccctcgcttttagctgcatcaatagattgatggtttaggataaactgatgaagaatcgccatctcctcagatgtaggagggactttcgacaaagatgtcttcgagctagcctgttttcgccttttatgctctgatggagcaagaagagtggtgtcagagtgagtgtgtatcattgagacgtagacactcgtagagatatatgtatgaaccttttccgacttggaataactctttctcctctggagtttctatcaaaagtgagttgatccgtctagcggtatgaaacctagtatctctggcaaccatggtgaacctccctggtttgtttgacgatcagagataacaacacaaacataggcaagcgccgtgagtttctacttcagatcacgatgtcacggatgaacatagcacatatacctagcatgagagtctcgctcttttcgtctggcccccgaagtccctccatccgaacaaatacctccatactgctgctccccacgaaacaaacctggccactcaatctcaggtcttgaacctatccgttaaagacatggagcgagcgcaagcttgagccatcaatacgagggaaggcaggaaagacataaactcaaagatacgaaccaagagatccttgaacaaatctaatctgtcggctgaagcggttgccatataaaccgaagatttcgcttctccatctgttcctacagagccatcatcctgtgacttggccgggacatacaggtgcttataggcgatcgcgcctgccaaggagtctatatgctctgtaagcttcccaatccgtaaaccgccagaagtggagatgtagtcatttagcagagttgggtctgacgccaaaggaaggttgatctgtccagtccaagcgcacatcatatgttcgacgatgtgacgagatacgaaagcaagtcaaagttactttagccgctagcttgtataagaagcaaccttagggcagagagactaacctcaacgtaagagtcagacatccgtctaggcggtagctcctcctccttttcatccgacctcacagcaggcttcgcttcttcagtccctcgcgactttacacccttcttatcttgactatccattccaggataataggtgaaactccaaggctcgatgtttcgaacaccctgccatagttgaccagatggtctcatagcaatcccttgtctatcggatgatatagtttgatcacctttttttttcaagaatcaacatacacaaagaaaaatctcttagtatcctagcggacatcaagcccttgagtcaataagcaaaacaaataaaaaacaaaacttacggcccacttgatcaagaagttggtctatccgagtcacatccttcaattcttgacgagccttttgattctgtacaatctccgtctgttggttcagattggatgagttaagctgtctgtgttgagcccatcgtgtagccaccagtcctgcctttgagaggcaatgagaaggatgtctaggacagaagtttcgaatagcaatcagcatggaaatggaaaaggaatccaatgacggttggttggttggttgagagattcccaaaccgagtcagattatccccagaagagataagatctttgcacagttggcttggtcacgtgatctagcccaaccattctgttcaaactaagcacacagagcgaaacaaagtcttgggatacgaaagaaaaacgatagagagagcgcgatcattcaagaggaagtggcaagaggaacagatggaatagaaaacgataacatgaaatctaaacgttcattaaccgaccagactcttccttttcctccctctctttgcaggttcctttccggactctttacctatcacatcatcatcgatctctcctctcttgacgtttgccagctctttcgccgcttgttttgcacctcctacccaaccggtacaataagccgctccacacagacagcgttgtcggccgggtacgatcaaggtggtcgaccctgaggtaggcgttgactcagtaccggtttgagcggcagcggtcgatttgatctttgtagagaaagaatcaaactaatcggtcgaatatagtcagaatcgacatgaaacaacaggccaaaagcgcggttcaatctgaatgtagagaaaggggaaggaattcacattgtagtcgtagaaaagttcttcgccagctttgatatctctcgttgtccagaaccctacctcgtattccttcgaaaggaaaggaagatccgaaaacaataaaagacaagaatattctttgagcctcttcgacttggtttctagtcaaagatgaagcgttgacctacctcaaacccttctccgagcgtcatccatttttcgacccgaagatttggatcacagccatctgtttttggtccgttagacatataatgaagagcgcgcactcagtaaggtcttgatcaaagacaagaagagtagaagagggagcgaaaaaggaacggacggttgataaaccgagcaatattccctttcaacccagaatcaagtacctctccatctccatagtcaaccgcatagaactccttcctgtccccgtagatagaaccgagtcgatcatagtattccgtggtcgatacaaccttttgtgcatttaatttcattcagttcaaagaaaaggaagatattgattttgaaaggaggagtgaaaggttagccgaaataaaacttagaataacataggaggaagaatgaaacaaacctctccccgataatcaatgacaaaagaattcgctggaatgaactccatagctttaacggtgaacccccgatcagatgtctaaccaagctcatttaacgagaagcgctcaactgtttagtctatctattgagattaatacaacagacagtacaaaagaaagaaagactcacggagaagactttgatagacggtcctgttcttttatagagagacttgttcaagcatctacatacgtttaatccatccatccattcaaatctcttagcttctgctctgcttctagtcgatgaggataggaagagaagaagagggaaagaagaaggacgaacacttctccgaaccgacagttcttgggatgacatagatactgcatcgctctaagaagcccattcggatcgatttaaattgattcgggaagatatcaataccgagtaccgacatagacatcaacacccgaatatggttagatgagaggaattcctcaccgatttacacagtgttctccgcaggcatcgatcaaactaccttgatccctgtcttcaggtttccatcccggtggtggtcgacatcttttttttaccgcaagtcagtgcgatccaaccccgatcaaagcaagttgaaaagatggaagcaaagatgataaaaattgggtttgaaaatgaagatatgaacgagaagaagaagaaatgatacggaatagaacagaaatgagcatatgttttcacctctgggttctgaggccattttcctcaagctcaataagacatggttctatgacttactcgcattctgatggctgggccagatccttcgctcgattaggatacgtatctggttaattccatgattacatagaaagatattccccacatcacgtcgcacattccataacagtttgttcatctttcatgttctcagtccaaccataaggaaggaaaccaaaggagggcaaaacagagagaagagaaggaaaaaaacgccatcctatcaatcctcaagaagacgtactcttcgtaatcatcttgaaccctgccttcttcccatcgatctccgccatcgcttttcctccattctttccagtttttccttccttttctgtgctcgctcccaattgagattcggtcttaggttttgcttttcccctaccctttcgtttgttttttgaaccgtcctcgctcatgctcgagtcgcccacatacccagcgggatccaaagtcgtgttgggattgacaccaagtgtggccgtggaggccgtggagatacgggggaggaaactagatgaagggatggatacaaggataggattaaagttggagggtataacagaagcgagcgacgtttggtgctgattatgagcaggaagaggcgccgaagatgaagggggtgacaacgaagaagatgaggacgatgaagaagatggtgccgaggaggatggtgtggatgaagatgaaggtgccgaagcgacagaaaaggtagatggtatagattttgcaacggagccgatgggcacagaggacgcacgctcggtgctgggtcccaaaccaccaagtttcaatctgatcgagggtcccttcttcttgaccgctaccgcctggtctgcaacgaccgactctgtcggattcaaaatgagcgataggttcgaggcaggaacagagccggaggcgagattaagagaggtaggatgagaaggaggaggtgaacggtgaagtggccggaaagagggatctggttggctcgacaaagcatcgttcacagagaatgttggcggcaggagctgtcttggtggtgacggtggtggtaatgatgattgctgctgtgatgatgttggtactggttgagtcaaggacgatgagccctgaaaaggagccaccgttgaatccgtttgagcagagactggattggacaggagcggaggcgacagtttcgatttctttgtcggtctttgtgagtccagggtaggacccattgagtgaatcaccggtttctcatccttttccgccacgtcggcgacaggtgcggtcgcagtcgctggctttaactttgctagttcagccgcctcgttcgctatactcaactcttcctcctttctctttgctttctgtccggccgtcagcttgatctctcccggactgcccaccaagacgacgtttggatctccacctttcccgcccggtccggtggcgacgtgagcgaagcctggtttgatcaaagagactacattccctggccttctcgttccttcttcactcagcattcccttgatggcctgtgcctgtgcgcctggaatcagactggccgggagacccatttgttccattcgtttctgaacggcgatcttgactcttgcttttcgttccttgtcggacctacgggcgaacgaatccttggtcgaccacgtcccagccggaagttcaccttcgaacggagggatacaccctaggtcgaccccacctacgaagagcgaggtcacggtgggtgcgagtatagtggacgtcgaaccgggtgaggagtggacgggtggcagagtcgacgactgagaacctgcctttggaaggggagtctcggatagacgggcaaatggtgctttgaacgctctcgaacgggctgctggcttctttgtcgtcgccgctttcggttcgcgcggtacgtacgatggtgcagactttgtcggcgcaaaggatgaagtggaagaagaagaagacgaggcggaggaagaaccggtggcagctgtgttgttgttggcggccgctgccgctgctgccactgctgcttcactggccaggacggcaaacgttctgggtccaacgaatctcttcagctttttccctcctctctccgctctaccgccggtggtacctgctccgccgttatcggtgccaccgacaccaccggtggccgatcctgactcgccattttcgcccgaatcctccatgtagaatccagcggcgggcacaccgacgccacctgagggtttggcgcgaccggaccgtcgacgggttccatcacccacagcaacggttgcgctagtcttcttggcatagacttctgggtcatgacctggtgtggatgtatcattgatgaaaaagatggccgggtgggtgagtgggacggagggataacctccattgaagaacgaagtatggtagtagctgttggtgttattgttgttactgttattgccacccgtcgcggtcgtcgtcggaagagcatcgccattggaagaaggagtgtttgaattcgaggttgaatctatatgggagactggacgctctggtagtcggaagaaccgacgaggtcggatcgaagccatcgctgtgtaagaggaacggaagcagatggggagaagagaacggaacgcgcgcgcgcccgagacgaagcatgaagaggaaaggatgggtgtcagtactagataactcttagaacgaacggacaaacagaagcaacgaagagagcgctcatgaaagatatcgatgtggatgttgtgaaagtgaatgtgattgcgtatgtttgtgtgtgtgtgaggcttgtgcgcgcgcaaaaaggagagatgcgttctggacagatatgagaggaacctgaacgaaccccacaaccttctcgccagaacgtagtctctcacttgttcactctctcgcatacactggcacactttagcagcgcagaacagaaggagacgatccaagggatcaaacggaacaagaagaaggagagagaaacgaatgaatggatgagcgcaggggtatcagaagctcagacaagcgacctttgcttttttctctccttctatttttcctctccctcgccctgctaatgtaggcgcatacatacacccagaaggagcgcgctcaacgcataaagagagacacaagactcctccgagagaagagtgaacacagcaaagaaaacagaccgaccaagaaaccgctgaagggaagagtgttgaggaggagagagaaagagagagaagagagaaaaagagacggggagggagatcgcgcgcgcgcgcagtagtaagagcatccgcagtcaggtacatacaccttcgtccttggttacaacctgacgcaccggccgcctctctctccctctgggctgccttagctacggtcggagttggaaatgtcacgggtaactcgcctgatgttcctcagccctataaaatcacagaggatcctttctcttttcgctcgttcgttcatcattgacttctcgctctctttgctgtccttgtgagtactctctttctctgaatcgatcatacccatgtccgcatacgcacacactctctcttcaaaggatgaagcatctttaaacacatatcaactagaagctgtttcatagctttcgggcaatgattgtttttttcagaatcgccctgaaccctccttttaatatctccctccttctcttcttgatacaacattccgttgtgagagaccgagtactgattcgtgttccttttgcctttggtctgtttgttgtcttgcgtctggcaggatctttatagttatactccttgtttttgaatatcatgttatcatttacacaactcttgtcgtgcatcgttcaaacctaaacctctttgaaacataatcatcagaactgagagaaaggaaataagaattgttttaatggaaacaaaggataccaggttctgacgcatatcgctgatctcttctatattctccgcgctcatatcggtttaagagaagaatgaaatcatattgatacactacacgtcaaactgggtcctattcattctgttctttttttaagtatctcgttcaacgtctcctctgatccctatcgctctcttcatccgaccgagcaggactctttgtcctttgtttcctcggaggagaaggtgatcgactgtcgtatgacctggctcgaccatctcgacgagaatgggatgtcgttctcctctttcgtggtctggaggaagaggaggaagaatctgaacgcgagtcagagtctgatccagaatccgagtcggaaccagaatcagagtcagagtcagaatcagagtcagagtcagaatcagatccggatgaagaagacgagaccgaggatctattggttttaacccgccaaaacacacccaatcggaacgacagaacgcacacaactcagtacagacacacatgagcagcagagcgagatacctgaagagaagtaacgtacgctcgtctcgatttcttattctttgagcttcctccatcagcggcagcggcagccttgagcgcctctcgttcctttctcttctgttccaatatctttgtggctgttccctttctgatgagccccaagatcaattaaattcagaccaaaaggatgataagctcggtcagactaatcgtcgtgcagccctatgtagtggagggaaaaaagagaaagagtagacgaacccagagttgagaaactcctctggaacctctacactaggtgcttctctctttgcaggtttcgtcagctgttgagtcctcgtcggcctaggcttgtacggccgttcgttcttgcattgataagagtaatgtcctttatgcaggcatttctggtttaggaaagaaaggattaaagatctcgtcatatcagacgcgttcaaacagatcgtacaatcacatagcaaaggcgaagaatagagttgggatgggatggcaagcaacgaacctggcaggtcgtggtgggtggagccgaacggaaagtaccagagtcagccgtctttggtttccacatctcttttcgttatcttcttcgtgtcttttttgtgagagtgatagagagaagaggcgtagagttgagtgagtagaactagaaactgtccacacacacacacaaacacacacacacacacataactacaagaaagcagagtaagcagagaagaggggcacgatgggtggtgtaaccctaagcgtaacattacgtaatccgatcacccatcactctacgtcattagccgtccgtcggactgtgcgggaaggatctctcgattgtctctgtccttgtacaggtgacagagcatgtgttgagggatgccatcagaattgaggagcagacctagtgatactgatgatggtgatggagatagtgatggcactggcgatgggactgcaaccaggactgagtatgctgaatgggatggagaactcaagtgaaggtgatcaaaggaaagtgaacgttcgtccagaaggctgttcaatcagtccccagacagaggccgccgctgagcaaacacatacacaccacacacacacacatctccagacactcacacacatgtttaccatcgtcatcggttcgatcgagactggattgtaccccagtcaagattagttccctcctaacagctgacctcgagattaggatttgatctctgatctccataaaaggaagagataccttctgtctatcctgtttctctttccctttctctttctctttctctttctgttctccacattccacctagccttctcgccactcagcctatctatccgtttaccctttacacactaacaactccttataatgcatatccctaaccttcagaccatcatggcttctgccctcgccttctctggtgccgttcagaacaaaagtacgagccgttctgtttcccgcatgtcttcccgtcccgtttggttttggtgatctgatgcattctctacatcctgttaaccatcaattgtttgacatcccggtcatcagacccatccaccgtcgcgaagggtgaagttctcgatttctgcaataaggcttgtatcgacgatgatggcaacgcacactgcaccaagcctttcgctctcgaaaagtcaaagtgttacgagtaggtatctcaccatcccgttctgttgtatcatctaccctggttgacactatcgatcgaatggttggacttgtcctaggttcgcttggcagaccaagggtaacactttcactcacaccaccctcgagcttcggtaagatcgttccttctctcttcactttctctgcaccccggttctctgtaacagaccattcgtctgaccgccgttgtgtgttttcttcttcttcttcttcttctattccctcaaccagaaacgtcaagaagcccaaggacgtggtctactacagggacacgaacggaaagtacactgtcgagaaatctgggctttactacctcgactttgtcccccgaaccggttgcgacaacgaagtcgagtacgagatccagacttgtgtctagacggtctctcgatactcgtcttcgatatttgacaacaatactcctctgatgatcttctatctctgtcttgcccctccccaattctgttatcccaccacactacttgtagcccatagccttctgccctgcctttttcgcgaaacacctgagttggaaatcctatccgatgtgttttcgtctgtaaatagaaagaaagaagcctgcgagccgaaagagttgtttgcacatgctcgcattgaaaggtctgttttcgagccgaacgggaagaaagaatatccggacatgcaagacaaataaaatgaaccaaacatcaaagataaatagcgcaagaaagaagagaaggttgatacagcgtatggggtgtctagatgccaagatggtgggtgatgagagtacagtgaatgttgagggatatagaggtgaatcgtgggtaaaagagagagggagatatgtgagaaaatcggttgatttgacgtatagaccttaaaagccaggcaaaaaaaagaataaaaaagcgaaaggagaaagaaagaaagcaaaaaaaaaccaagaaagagaggaacacaagaccgaaccaagatctacagaaacgggagaaaaaaacagatagaaggggagtgagaaaaagaatattacatccccgtctcacattattgcgcaagctgcacatccgcccttcacttcctcatccccaccgcctctacttcttccaccacccttacctccacctttacccgtgcttctatctatagattgttctggctgtttcgttccgatctctccagaggttgtgttggatgccacattctgccctgaccggatgacatactgtccttctcgattctgcgcctgggcttgggtcgagggtacttgatctgaagaactcgatcggtaaggttgactaggagaccaaaaataaaaagaaccagaactaatcaggcgcaggtccaaaaagaattaaacataagaaaggatagacgcctgacgtcgagaggaaagaagaagaagaagaagaagaagaagaagaagaagaagaagaaaagaaccatggacagaaaaaggaagtacatacgatccattcatgtgagacagagactcgactcgttcacgttgtctattgagagaaaccgaaccgtcgtttcctatagtcgctccaagagaatctagagcgggtgtcatttgcgcaggaggaatcggatcgacggcggttgttgttgttgttgttgctctcgtcaaaggcgacggcgacgaggagagaggaggataagggagagctttatggtcggacggccgtgaagcctgttcagtccctctgtctgttccatcattgattgggcggtcgacaaaatcattcatctcgatcaaatcgaacgattcctctttacgcgccggtccgtcggcaggggttccagactcggtttgagagacctgtgagatctgagcgagtcgtctgtgggagggtgatataggaagaggatcttgccattctgagagcgggttgatttttaaattcttccggaccgctagagcatgcaagggatagaaagagcgcacgatatcagacttcagacgacaacatgataataaaaaaagatttaaggaagggagagaagtagaccaactaggaatgacgacctcgtcccaattcctcagctcattcttcgtcggcggactagagctactaggcgggacggaaaattcgtcaaacatgctcaatctatacgacccatcaggtgtcataggtgaacccgaatctggctgtgcctgtctagatatcgaaccagatttggccggccttcgcttcgaagaaggatcagcagaattcgtcggaggtgatacccgagatcttgaattttgtctgttcttcgtggtcgtggtgtttggaggtgaagtccgagaagaagaaggagtgacaccggtttgagatgtcttgattggagtctgagaattcgtacgaacgatagatcctttaggcgttatcggagaagagcctattgactttgatcttgttggctgagctggagaaggaccgtctctatcttgaacattctgcgttgggatcatgttcgtctggacggttggtttcgactgacgagcacgatcgactgatcgtctaggtatactcgaagattgctgaccggttgtaccactcatcactctctttctctcgttctgaacggatccgtcctgtcgttggccggtaggtcgcatatagccatgtgtttccgttgatagcctaccaacaaatcccgtctgcgccgcttccgacctctccgaaccgtacaacgtttccgaaaggtcttcctcactcccgattccgttgaggatgcccacaccatcaggaaggtggccgtttcgagcttgtcgagcgagttctttctcggtaaacggttcgagatgacctgtcgcactgattaaatccctagacaggatttgaaagggagcgatttcatccttgatcatcaattccgaccgaggttcttcctcgccccatggatcgttcatctctgagagtacgaacgccatgagaaagaaaataggcaaccgagaagagccgggtgttatctcgagcgagctgagggaacgagacgagctgtctatctggtaggtgtttgagggagacagacagggaacatcgacagaaaaaaaacacaagtgcacgtctcataaatcccgatacggatcacgtggatctcactgataagattgtgggatagaacgtttcctttatttattgattgactgactgactgactgacttgacctggaccaaaagaagcagcaaatcgatgaacaagaacgctctcgaaagacttaacgagagaacaaagagaaggtaagtaattggctgtaaagcctgaaggcatctataagtttctacttctttctgagaaaacaggatgactagaatacccgaacccaaaaaacgatagagtaagaagagaaaaagacgaagacgaagatgagaacgtagtatcgatcaatcgatctagatatacgggaaggaaaagaagaatcggagagagaaaaagctatttgatctaacaaacaaataagaaagaaaccgagggaacaacagagagaaggattaataatcaagaaaagactcttaacctttatcaactgaaaggagatacagaggggaatttaactctttttttatttacccaagagcgaccgttgaaaaacttcagaacggcttcaggtacgatatctgtagaaatacacagggttttggatttggaagaagaagaaaagagccaaagagaatgcgcaaactcaaaggaaagaaaaatcgaaagatgacagccaagacagaaggaaaaaaaggtgaagaaagaaagacaaggagagacgaaatgaaagcaatcgaactcaaagcaactcaaagagacaacagagacagacaacaaataagcggatgacgtaaagcaacagaacgaaataaaatgtagaaagagcaagcgagaaaacgaagaaaaaagaaaagaaagaaagtaaaaagcagactcaagacatgaactgcgtcgagtccgggtggcttaattgctgtgaaagattggcgaattggttcgaggatagaccaacagttccgtacatatttggctgcgactgttgtgtttgttgggactgagcttgaggctgaggttggagttggaaaggcggggcaagaccgtggctaggagtaaccatcaaagaggagccaactcgaaggatgtcgacagaagtggccgaaggaggtagaagcttcaaagcaagaggaaaggaagggaaaaattagaaaaggctgatacaagcaatcgaacgtagatgatcaacatgaaacaaggcacatacttctgcaccataagcaaccgctttgatggctcttgccgttgcgtctgcatttgtctgttcggcgaactctctggagacatggccgacctcaatgaatctttgctgacattcagcttgagcttgcgcgatgaccgtattggatatcaacgatgattcagagacaagcaccgctttagatataacaggcagacaaaacgagaaagaatgaagcgcgagagtttgagtcaatttgtcagacagcaaaatggcagaagaaaagaaagaacaagaagaaacggacgatgggcgccaatgccggatggctgaccagatgcttcctggattaatcaaacgagtgttcgaagaaagttagtatcatcacaccaacagaacaaagataggccaaagtagattacgaacctgcacagcctgaatcaccgccctctctgcctcctgcaaagggaacgaaggaggcatttgcatcgatcttgggttcatgttgatgttcgtttgttcagacagcatagaaggcgaagagaccaaattcggtctttgatcaacaagaaaaaagcaggaaaataataaaaaggaagaacgatggttaatcagcaaaagagaaaagaaagagagattctctcgatagaactgaattgatcacccactggtgtaagaaactagtcgtcaaccctgtattatcacccacgaacccaacgggagtatgatgtactggctggggcaaagggaacgaagggtactctgttgaaggcgaagcctgtagcgaggacggggcggaagcagcgttgaacccagactgagacggcgctcgtgacaaattggctcccgatttttctttgatgaaagattgtacagttagttcgcccctgtgaaccacgggatggtgggttggctcagccggaaactattttgccaaggtttggaaatgatgaaatggtgagtaaggtggactcaaaaacacatcctccacaatcaatcaatcaattaaaccccaagaccgcgacagagaactcacagtcgcaacagtctcgatgacgatggtctcaacatggtgaggcggaattccggataaccggttgtctttccacttcaaccagacgggtagtgagcccggtggcgacgagaagaccgcttcgatactggaagcagatgtatgcgggtcccatactcgcggttgccactgtttctccatccgttcgttgataacagttagctaatcgtcgcgtcggtctgactcccaacccaaggaagaacaactcacttgccacattgcaccaaccagcgcggtatttgtgaagtttccattgatcttccgtgagcttaagaatgagaagaagcgcaagaaggaaggtcggtcgatcaaccaagacacaatggatcccgaacgaaaagagcaaggaaaaggagaaaactaagataaaacacctacaactttctaaactcccagcctccttcaggaagctttcgagcgtcaacattccagatgtggtttcctttggactttgacttttttccatcctcgttgaatcgagcaatataggactggttccatagataatgcttaatcttcttagccggcatttgttcgtcgtcgaacccttcggcctgaagctgtagtcaggtgtgtttcaagaggccaagtcagtttccccgatttgaaacatgtgcaaatgaggcggaaagaaaacagagcacacgaactcgatcggtaaaaacgttggtaaatgcctgaattcggaacttgaaaggtcggaaatcccatgattcatcaagacgttgcatcttttttgccatcaacacctgatgcaactgttcgcctttagaatcggtgacgttgactatcaaataaacaagaaggattaaagaatggtcaaaaagtgtcaacaaacccaaaggaaaagaagagccctttttgttatgaaagcacgagaacagagagagagagagaaagcttacgatcagaacagacggcactcaagaaccggaggaagaccccatccagacgctgtctaaattcttcggagtacaacacttggccgcctcccagatgatcattcgaagatccttcacctcccgctccggaactcatccgtcgcttcgactctcccgggatgatgtccctatagtcgtacatctcggacgcatacatcctgctatcttcatcacccgagtcatccgagtcttgctccgagaaatctagatagaggggcgaggtcgagcttcttcttgaaccgaccgcctgggccgttccttgtggcagaccagtctgtatgttgaacagagaggaaaacacaggctcggctgtcatcgtcccacctgccgaagaagacacaggtgaggccatcaggttttcaacgtttggcggattgctgagagtagaactcatccctcggagacggacgaccggcctaccgtctgctgtcgtggcggttgatgaactccgtcgggaagacgaattcgaactggggtttcgaccactcggtgttgatacagaagaagaagcaacggggagcgtttgagattgggaatggacgtgctgacgcgaggaatctccactgcccgaccggttgccgacgaggcccatcgcgcttgtcccagcattgtcgaccgtcaaacccgaaaactccaactgattctgcaaatccatccccattcccacattcaaccctaatgactgctggggttggtttcccgaccaattctgcaaggcaaccggatccatcgtaccccctgtcatcatgtcaaactgcccatggaatgcaagtatctgctgcagagacagagcaggcgacgttgaatcgggtctcgaagttgatattgctagaggggagggaacaatagatgcatgcgactgctgaggttgggtctgaggctgctgctgctgctgttgctgttgctgctgttgttgtgattgcggttgcgttgagagggatactgatggcgattgtgtagacggggatggtgtgatcaacgttaccggtgtcggggaagatcccaagccagatggtgacgaggatgaggcaggtactccgagggaagaggtcggccgcgtgggaacaggcgccataagggaggggctcaagaaggattgttggttctggtcaacctcactcggaaggacctggtgttgaacgttcgggaacgaatgagaatggatcatcggaggcggctgggctggagaggactgttgggaagtaactgttgtcgaagttgtaggagccgttgaagaggatggtagaccgagtcctagaacacctagctcgttcgtccgaaggtgtttagatgctggggcaacctcattggtctgcaagaccgatgatgattcggcagaccgttttgaatgctgaacctttgagacatcagcggatgagttgatcggatgagtgttgccggacaaaggtgaatccgaagaagccacattcataggcactgaggtgacagctgttggcgacaacgtctgtgcgagaagagagagttgccggggaacttggatggaggtgtggtccaaagacgcgattgacttgagagtactgctaatttccgtcagatcaccatgaggaatatcagcttctctaccctcaatgagagagttacggatagcagctgcctgtcggttgatagcggtagatgcagcttggatgctggtcgaccgaaatgtcgattccgagaacggagtgagaatcaaacaaggggtaagcatactctagaatcatccgacacgtcccgcgtttcctgttttcactttcggtttcaaagaaaaagtcaagaacgactcacgcttcgagatctctcaatcttgattctaatgtcatggcttttattctcattgaaagatctggtatctttgctcctccctgacttgaatccccggaagacacttgggatgaatggagcgaggaaaccattggagaatcctgcaggctaccacccactgtgccgacgggagcaaatgtgaagctgctggatgtacttgatcgaggtctcgtacgcgtcggcgagggcgtatggagcgagtagggatggttgggatccatcataccctgtaccgagttggtcggaggcggtcctatgccaggcgaaggcagaggaagcatagcatgtgatccaggcgggctgagctgctggagggatggatacaattgttgtcgtggcgagggagcttgagagtgcaccttgagttgttgaaagtggtgggttgggtctccaacgacggactcatctgagatatcggcaaatgctggatggttctgaaggtgttgctgctgttgctgttgctgttgctgggatagcagataatcctcagagagctgaccgaagtagccggaagagctagcctgagaagccgtggtgacggacataccccactcgctggatgactggagtggagactgtccgagattgggggtattgtagttggatgctaacgcttcgacaagagaattcgttggagacatcaaagggggaatctgatgagaaggggtagagacatttgaatgtattgttgcatggttgccgggatgatagatagaattcggagagtctagatagggtacggaatttaaatttccggtgaaaccggtatcgaataacccgttgaccggtccggcagaggccatagctattgagagcgacatctggggacgatggcctcgatgggtggtgaaggcaccgttcgaagggaacgagctaccgggctgagagctcgaccttgacctgttccctaccggagcagagttcgcggttaccctggctgcgacgacgttcgggtttgaatgaacgtctgagccagtcggtcgagtaggcagcgttccggatggagagccggtcatgttctctgttgatatcgaggggaccaaattagactgagtggtgatctgttgttgggaaaatgaggaaggagtggatgaagaagcgaagtcgttttcgacggatacggccggccaagagaacctaggtggtgatccttctccaatagtcccaaggctgaaaaaggaaggaaagagaagcagcagcaaagaaagaccaaggggtatatgcggtacccgaaagatgtcagtttcaggaagaggagagagagatagagagaaagaactaaatgatagaaagaaaagagaagaggaggaagagagaaaaagaagaagaaaaaggaaaaagaaagccagtcttgtgcttacggtggatttaaaggtggggacgacagaggcatatcaaggccaagcatcccgaactggtgagagttttttttgatggtgagagaacgaagtgaagagactaccaatgaaccaggagatcaagaggttgtaagatatggatgtgagatgtaagatgtgtgtatgcgagtgagtgaggtagatgtaccgacagagatggaacgggatgggattgaatttgggggatggatagtcgattatagaaagcgagactgagcgggcgtgtgggaaaatgcccgggtgagtgtcgtagtagttgtagtagtagttgtgacagtaggcctagtcagttctaatagcaagtgtagaatattctaatcagggttctagtccagttgtagtatagtatactgtactataatgcactataatgtatcgtgttgtattctaatacaccgtagtgttcctgtcgagagtgccatatcctagtctattaggctcgggctttaacactctgtcgcctttcactggcctacttcattcacactcggtgtccccgcttacttcgcacacttcgcatactccctcactatccgctctctcatcactttactcatacatattcatacacacacacacacacacacacacacacacacacacacacacacaaacacaaacacaaacaccggcttttgcactcttcttgtccatctttttctccttctctctgctctatcaatttttcacttacagccatagtcacacgtggttacagagagtttttcgccgcaagttctaggcctttgacacaagtgtaacatgagcgtggtgctgcgcggcagctttcctcctcatgtggcgaataacacgtgtcatgtctgaacctcagctgtacgcatggttacgcagcaatccaaattattctcatccttctttcctcgcttctgccttgcgttcccttctcttttgccttcgagggttcaatcgtacaacctacagaactctacttttcagctagaagagatggccaactcacttaacaggtctctcatatcctcttggtcatcccagcagtcagctcctgccccctcgtcttcttccagaaagtctaaactcaacctaaacgctctgccttctccaaacactacctcttccacaaatcctctcgagtctcactctggccctcctacacctgcttccgagtccggtccttcgagctcgactgcgtccaaacgtcggactaggccgacttcaaccagctctccgaatcctgctggatcagccaccaaacgggtaaaaaccacacctagttccaccccggccaatcgagagcctccgacggccagattggctgccatcggtggtctgaccggaaccattgagaaactactcgagcttgtggctcttcccttgttgcacccggagctttaccaagctaccggagttcaaccaccgagaggtgtgttgctttatggtccacctggttgtggaaagacgatgatcgcaaatgctatcgccggcgtatgtttctctcttgctctctctttctctggcctctgaccgtggatcgagctaaactttactcgcaaaccccctcacaggaactcggcatgccgttcatttcgatatctgctccttccgtcgtctctggaatgtctggagagtccgaaaagacgcttcgagaaactttcgaggaagctcaggtgtgtgtttggatgttcggggtttcggactatgatgtctcaatcttttaggcctgtcgtgctccaaactgaacgaggctcctttgaatctatgtctcaatcacctcagaaaattgctccatgcctgctattcatcgacgagattgacgccatcactcccaaaagagagactgcccagagagagatggaacgtcgaatcgtcgcccagctcttgacgtgtatggatggtaagtctccgactttttgcgtctcaaacggagatatgagacctgacctatctctttctctcccttctctcttccttccttgacttcccacattcagatttggcatggcacaaagatccagagaagaaaccagtgattgtgatcggagcgaccaatcggcctgattcattggatcccgcgttgagacgagccggtcgattcgattgcgagattggaatgggtgtacccgacgaagcaggtcgtgaagagttagcctcctttttctccttttctctatctctcatcttgtctctgggcctctctcaaagaaagctcattccaatgatgactaatcaatccacgacgcatcctctttcttgctacaagaattcttcgaacgctacttgctcctctatcgattcctaccgactttgacatccgggctttagcaaaggcgactcccgggtacgtaggagctgatttggccagcttgacgagtgctgccggagtgggcgctgtgaagcggatgttccgagaactcggtacggcagacttgaccgcacataactctccacgtgcggcattggaggaacttctcccgtcggtgggagaggatggccctgctggaacggctctcgagggatcaatcgaggaggacgcgaccatggagaacggggacgcgcctgacgagtccgggatcgtccctcccgtggctctttcttctttactaacgtcatcgacgcccaactctccgccaagcacccaacttgttcttcccacttcctctctatcttcatcatcgacagaactcttccaaaatttgtcttcctccctgctctctgctccaatcactcaattcctcaaacatcatacttccgcccttcctccttccttactgtccacccttagaatccttccttccgatttcaagtcggctctgcagacgacccaaccgtcctcccaacgagaaggtttcgccaccatccccaacgtcacctgggccgatattggagcgcttcactcgaccagagacgaacttcacatggcgatcgtccaaccgattagacggcccgagttgttcaaacgggtcggaatcgaagcaccgggaggtgtgctcatgtggggtccaccgggttgtggaaagactctgttggctaaagcggtggccagtgagagcagagcaaactttttgagtgtcaaggggccggaagtcttgaataaggtgagtgtccagtgtttcttagagaaatgacgatgatcacgacagaaacagacaacacggattcatcgggctctgacaaatgatgtgtgcgtgtcttgttcccgatgtttacgtagtacgtcggagagagtgaaagggccgtcagacagatctttgccagagccagagcatcagcaccttgtatcatctttttcgatgaactcgatgcgcttgttcctcgtcgagatgatagtatggttcgtccggaatctctatttatcttttgaattcaggaggaatgaagctcaagaggtctttcctcctcctcatcacacacacatatagtctgaatcatcagccagagtcgtcaatactctcctcaccgagctcgatggattggattctcgaaaaggaatctatgttatcggagccaccaaccgaccggacatgatcgacccagcgatggttcgacctggtcgactcgacaaattgctctacatcgatctccccactccgaccgaacgagcagagatcttacgaacgatgacaaagaagacacctctctcacccgctgccgaagcagctctggaacccctcgcgaccagttcggcatgtgacgggttctccggagccgatctggcggctctggtcagagaggcggccacgttggctctgcgcgggaagcttgaacaggccggcgcgttcgaggtggacgacggtgtgctcacgttcgagggaaaacatgccgatcaggatcctctcacacgaagcctcgacggcggcgcaagcggcgaggaggaagagacgatctgggtcgaaccggagcatttcgttagagcggcagaaaaggtgacgcctagtgtgagtattgcccagagaaaaaagtatcaggcgttgagaaacaagttctcgggcttgcctgtcaagggaaagagagagcccgagttagaagcgggcagaccggtcgaggcgggcagcagttcaggtgatgctgtggccgatggcggcaaggagggtggatcgaacgaagagatgaactagaagcgagacaagaaaccaaaaaaaaaacacttgtggctctttaatgtctttcccatctctctttcttctgccaattttcctttctccttttttttccttccctcttacatgacacgctcaagcgaaatttgaaagaacacgagaagaatattctcccttttgtcattattttgatacttttcatacaacaagcaatcttcaacgaaacgttgacactgtcccgtaattctagagacttttcgacgagcacctaacaagccttccagcaaccaacccagatactcccaagaagacacggaaagatgagcaaagacacagacacagacacgcgccttttacttttcggcgttttgcttccgggcgtccgttccccagatgaaataatcacatttgtactccagattgacttcttctcgcagtcgaccattcttctttccgcccgaatcatgacctggtccaagaggtcttttttatttttatttttattattttcattaaaagagcccaggaaagagaagaaagagaaggcaaagcaaaaaacagagcgaaagggaaggaaagaatgagtatacggagagatgtaagtggagggaaaaacaaacaaagaaggacactcacaacgaacagagccagaacttctttcccttgttcggtccctgcttcgtcaccgttcgctccacacaaggcgcctgatgaaccctacatctcggaggttccaccttcttcagtagacccgtccaaagctgagctgctgacggcgcaggttcgcccgaatccggatcgattttaggatctgtgttcgactcggtttctttggcgaacgcttgttcttcctcttgagcgagctgaagcgcataggctctatcggcggcttcgtcaggctctgagcgctctgctgatgtatgctttgcgtccggttcgtctgagtctgagcgcggccgtttgagttttttgtcgggcgagatagaatgtgggggcgatgaccgtcttttcttgaaagccaatgtcgatgctgtcgggggcgtggaagaaggagtcgatggagcgaagaaagagaccaatgatgtctggccgccgttcggtttgatagggctcgatttcgttcgattctgaatctttggtctcgtctctgttggcttgatatccccccatgccttttgatgttgtttcgatgctgtcgatgtgggtattggagcgggtaatgtttgagaggacggccgttgcggtttggcggggattgagcgaggagccattagttcatccgattcgtccgtcaggtccacgacgacgatctgatcgttcaccttgtccgtcgcagttgcaggcgctttggaaggggcgaccttttgtactggttggaagaacgacttgatgctctttgcggagaattctggatagaacattgtggccagctttgggggttcattcgccactctcgtcccatcctctcttggtttccccactaccttgacgtttcttgcttgctcttcgccctcttgatctgaacgttcagacgaagagttagctttcaaggtcgagattgaaatcgagggttggaaaggaacgttcaacatgtcggccaataatctcggcttttcctctggcgagaggggaggcagactttcgtgcaggtctacatagacaggacagtgatctgagcctctgatatcaggtagaatatcacacgacttcacccatgggagtaagccttttgtgacgagaactgtatgataaaaatccaagattttcacacccgttagccgaatctttgagatatccggtttacctccaagaaggaagggaggtaaggaggacaaactgtaatcaagcctggtcccatagtttgaagctcgagcgtcgatcttcgtgttccagcctgtccgattttgcgtggccgcaagccaagttcaaaggcgatgttcgtgaacaaacgagacttcacagggcagagggtgtcctaggttgtaccaataagctgttcgaccgaacaagaaaacagtcacgtacaagtaaacattttctctctttctggaaaggccgatcggacgatatctgtcataattcctttaggttcgagaaactggtcgaaccattgtctagcctattaggtcgaacatcaaagtgaagaaaagaaaaatatgaacactcttgatccactctctcacttgtgttatctctgttcaacagacgcaatacaccacgccccaaacaagaaaacaagaaagaaagagagagagaaagaacgaacaggatgatcccaaaacccgttttgtttactagccagcgtgccctctccatgatcgctcggcctgtgaacgacgttcatatcacccaccaccatgacttcccttccgttcttcaccagttccttcactcttgcctctaggacggtgagaaagttcaatttgaacggtaagcgatcttcgttcgtctcgttcgggcaatacacatttataagaataaacatcccaaggtcgagtgtgagggatcgaccttcgacgtctagtttccagagtggctgttccggaggagggttcggtctttcgggtgtaggctctgttttgaacagagggatggatgaaacgtccggatagggtaggacatgatcgtctgctggaagaggcaaagacgatggcgaggatgtgggaactgaggaggaaggatctttgggagagatagacaagccggtgattccttctgaagctttgtgcggcacaacaaccgattgagaggtatacactccgacgcctgaatatcctttaccagaatgagggaacgacaggaaggcgtcataaccaggagggcatgcttgggctttcgtcaggttcgatcggggtatcttgagctctgagcgacgcgaacgggaaaaccgaccgggaaaagcaggagccagaatgaaattagtctatacaagcacagagagagagagagagagagagagagagaggttctcaaggctaataaggatggaagtggaaatagagagagaacgtcctcaccctggacacataggatatcagcctcgagttcctttaggacggcatcgtacgtcttgagcgcgtaccacggactgtagttcatcaacgtcttgagcccattgacgttccaagtgatgatcttcatgtcgaactgttccgatgcgaatgaatcgagtcaacgtgagagctgtgtgtatgtaagtatgtatgtatgtctatgtttacgtgtacagatccggatggtgaggggaacaaggagacgatcggcgttgagcgagagtcggtgacgtgagcaaacggaccggctggatggattatccggtatttctttctctccgcctccgatcacccttcgtcttttttccagctttcaagatgtctctgcaagatcaggatactctcgctctgtcgaccgagctcacggaggaagatgtgaacgtcggactccgactagcgatcgaccaggctatgaaatctcttggggaaggcggtatacccatcggtgcttccgtgagtgtctttccgatacttgagaggaaaatgaaaaagaagaaaagagaattattctctctctctctttctccaagtatccactttgctcatgatgtttgtcgccctttacgatgtgtgaatacatgaatcaagctgtatcaccacccgaccaagaagatcctagctgtgggacataatcagcgagtgcaggtgtgtgtgtgtgtgtgttttttttctcacggccactttatcgttatctcgtgtgaactgagcgagaggacgaacagacggacggactgacgatatcgcaaacgaaaaaaacttgaccgaccgaacggatgaacgaacgaacaaattaacgatgttgaatgtgacctgtgaaagatgaactcaaacatccgacatggcgagacggactgtttggagaatctcggccgagtggagccgggtgtgttgagggaatgtacaatgtattcgaccttgtcgccttgtgtgatgtgttcgtctacgattcttgtgagtgtgcatttattcttggtttactttttgggaaggaaaagaacaaggaacgttcccttttctcttttcttgtgtttgccttaccgactcgttttacttttttacagttgtacggaattcctagaggtgcgcgctcaatttacagctttaaaaagtccagctaacgtccagggatgatcctgaccatacagctgtattttctcctcgtttaaataaaaaaaattaaaaaaaaagtggttatggctgagaacgagaactttcagggtggagaggatctgttgaggtcgcctcctagctctctggccgagcctctgcagaaggctcgaattgtgatcaacgcccgatcggaggaagctactcggatgatgggagactggatcaagagtgaggccggagcaaaggtctggtgggaggatattggactaaaggaggaagagaagtgagtaagggagggaacgagcgagcgagcgagcaagcaaatagagaaaaatacagtttagatgagaggagggagagacggagcaggttgtacgggtaggtgggtctcggagccagagagagagtgtgtgcgtgtgtgtgcgtatgtgtgtgtatgtgtgtgtatgtgtgtgtgtatatgtctactaggagggcctcacaagaacatgatgagaacacagagaggacatgacgcgagctctgaaaggcgcttgtccagcggactacagcaatgttgtagtcttctctctaatgaagactacaaaagcgacgagcaaaaacactacaaaaaaagactacgacttgactagaactcgaccagaaaaacactacaatctctagccattgcatcatttcccgctatcggccgttttcttccatctcgtctcttttccccatctcaccttctgctggatctgcccaagcgtgcacccacgtcgacactcactttcctcggacagcatacacgtaccggcaccggcactggcaacaacacacacccaaacatacacccacactcacaaacactcacatacactcacatacacacaaaaaaacaacacactctataggcaggatcccgctcgccctcatcctaatgccaccggtagagccaatctcaaagcctaatcgctttccaccgtccgtcccgacgcttcgaccaggaggttggctcaacccatcgagcacaccctcttcttcaaccgccaccacatcaaccactccgtcctcgacgtcctcgtccgcatcgccttcaaggtcccacagctttctccaccacaactcgtcttccttcagttccggtccatcccagtcgatcctgtcgaacgggaacacaaacagtctcccgagaacgccttccggcatgaacacaccaggtgatcagccagccgaaggaactaccatcggtggaccaaagaaacgtacgttccacatcgttcttttctattcatccatcgttcatcccttttcctcttgtactcgatcgtccggccttgttggcttggcttcttgttctcgttcttgttcttggcagccgtgagattgaatcaagagaacacacagtgctgacgtcccactccttccggatcgtcgtggacatgccagccaaagatctttcgcatgttccctgcaagttcttcaagtccggaggctgcaccgcaggatctgcctgtgtctttgctcacgtcgtggccgaacgtaagtcgcctcgttcatatcaaatccgtttgtcctgggtgatcctgatatgtcctcatggctgactcctctggcgtcttggcttgatccacccatcattcccagccggtcaacaaaaacagacctgccagtacttccagaaaggaagctgcaagtttggtcacaaatgtatgtgtgccttctgatcacatctgatcgacctggcttgaatgtcgtgtgctgatagatatccctcgtccaatctcacccggttcctccgtctcacccatcccggtccctcaggtgctctcgcccatcttttgcccggacaacccatgtcgatggaccgaaagaacaaacgaggtttgtgcttttactctaccttgcctctgacgactcgttctgtccgctttctcacaccgctcctttcatctctcaatcgtatgactcatcggtgaggacctcgtgaacagccgtccagctgcaagcccaagctctcaacaacggcctcaacccagcccaggtacatcctacccagccggatctcaacgtggcagccaaccgctcgctcgcctccacattagcaagcttgcagacccagtcggcaaactcgggtatgatgtctgcgctctcccaacagatcgcgtcatctccgctctcccaccagacgggctcctcgaccatgccggcaaccccaccggccgatgttctttccaacggatggcacaccgacatgtcgtccgcgttggacggttctcgaatctccgggacgagaacccttccgcaaggtgtacacacctttcactccctctccgaactctccgtcaccccgacctcgtccggtctgtccccttcaccaccctcgaccgcagtcaaccaactgtcccgaccggtcttgttttcttcacataccacatcctccggaccatctggactgaacccatctcgggatcccctcgcgatcccttcctcggccagacgtccgtcctttcccgccgccctctcgtcggccagtctgttttcgtcttcgccctccagacgactcatcccacccctgtcctcatctgtcaacgtgtctggcgatgcctctcccttctcgtcttccccgttcgccgctccaggcgggaagagtctcttcctgtcgtcctcgtacgaaaatcacttcatgtcgacggccgaccagatggcgttctctccacctggtcatcaatcaggaggaaaacacctcatgacctctccaccgggtgcgctcagacggccgacagctgtggccgaagaagaagctcactatctgagctcgctctctggtaacgatccggaggacgaagagttcattcaagacgatgtcgtcgacgacgatgaaggcgaagagtttctccctggtagtttgagcgagcttctcacagacaacgagatggaacggcgaatgatcagaagacactcgaaccagatcgccccgttaggactcaaggcgttgtcaaagtcggcagcgccgacgttcccaatcggccaagggcgatccgtcctcaagatgggcttctcaacaggtaacggcacttctccttgggacggaacagcacaaatctcgaacggagcacccaatccggacaattctttgtcttcctcggccggactgaccgtcggaaggaactcgacaggaggaggtcggggcccgctatcgttcagacaactcaccagtaccatcgttacatcgcctatggctcatcctgaggatccgacagtgctgatgaacccccagtcgtcttttaaccatacctcggttgaatacgctcatcaagactcgaccccaacgtccgcttcggctgctctggccaatactccgtgggacagccagagtttgttggcgagccgtcgatcatatgccgctgccgcgtcccctccgctagcgacccaacagacgtcacgcgtacattcagcctggccttctccttcggccatgacgacggcaacagcggcgaaccccaacttgtccccaaaaaaccagttgggtcaccctcatctgcatgaaccgacatatacccaaccgatcctatccccttcgtctaaagcgcttgcctcccatcctcccggaacgtcccttcctccaggtctgggcgcagcctccagcaggcttcatttcatcccggcgacctcaccctcgatgtttactccctttggtagtgtggcaggtaacgcaggaggcggaggctaccccgatcggtcgtccacatcttcttcggcctcttccgtctcgacctcccaggccggactttactctgatggccagaaccaaccgttctcatctctgactttccagacccagggtcacagccagcaagcgcaggggatccagcaaagccctcatggtttaacctttggcacggccgttaccctcagttcttcatcttctgcagataggttcggccgaagctctatcggcgacggacgatcgatcaaccaggaacagaaccaacagcaacgaattggaggtattcaaggccaggacgaaccgttcagcactgccgtctttaggaacgtgtgggaccggccggatcgacctaacggttatgagactggatcaaaagcagcaggtggggcagcagtaggtggacctcgttatgaaggacgaaaagtcggagtagagaaccttgggtcaggagtaggaattggggaggacgatcaggatgagttcggggatgacgtcttgttcaactaaatgagctagaactggagagccggaggagactcaggtgggtgtatagcaccaggagtacaaggggtgtctaggttggggcctctcagtagtcgcgtactcttctgaccgtcaagccctctctttaatcctctttgggctctcttctattttctatgtttcctcaagtctatcatttatttatacgattttttcttctcttttgcttcttctcctttttcttcttccgacatataatctagttgtatcttgactccaccccttacattctctcttctagagattgaaacaaataataacattcagaagccaaacaaagaaaaagggtctcaacaactttcgttctttcacgtcattctacatacgaccttgctttgttcttcatctatctacacatgtcgttcattctcttctccgaatcccttctctctctctctctctctctctctacctcatctatcctgcccgtttcttcgtaaggaatgggtgtctttcttttgtttcctctctttgtttctttcggtctcttgatgatgcattcttcctctcctttcgaacatgtcttctgaatggtgaatctatgatttcgtttttggatcactttcgttcttcgctactcacccatacattctttcgttgtccctatgtcttttcttgcttcctctaatttttctttctctctctgagatgacatctagatctgacaatggatatccgagaacctaacaaagaggctaggagcgaatgagaaaaagggggaaaggggggggggatgaaaacaagaagaggatggaagagcgaacgtgacaaatcgagaaaaggagcacacaaaaggaaagagatcactttgatcgcttctccttccgttcccttcgtttctttccgatcaacagcccaagctctttcctttccctcttttccttctcgaccgaaggatcctcagcgggcgcattggtatcaccgcccgccggtcctccctcgcgctctcggttctggccgggtcgacgacgtttcgatcgatcgtctgttccttcagagggttcatcgttgaatttcctcttggatggatctctatcgcctcggggttctcgaggaccggacattcggttcgtacgtctttgaacaacctgattatgggtagtgaagccaaggaaaagaggaagagaaagagagagagaggtggaaggaaggagagagagcaagaaagaaagaaagcaaattagtggacagacatggaagccagccgaaagaaggaaagtacggacctggatgttctcaatcgaaaactcgatgatcaacgtctttttcatcacaacagatcgaccggacgcaatttgttccttcagttctgattccttctctctgagcttcatcaacctcaactcgagttcgcccagatcaaccggaccgcctgcctgcttgccgtcctttcctcctttcttaccggccacagccttggcagaggtctcctcgagaatcatgtcttcctcgtcgatgtcagaagcctcggcgtccgctcgaccttttcctttcttcttgggaccgtgcgatcggataggttcgggcgcggccacggcggtcaactctgccaatctagcttcgtccaccaatttctttgttcgttcgatcagatccccaacttccacagcccaccattctctcatcaggttctcgaccgtcgggttgttgttcgcccatcggagtgccttcagtgcatcctggtgggatctcatctcgaggaaaccgtatcccttggatttaccttcgccgatcaacgagtccactcgatcggtagcccggacgatcttggcttgaaccaccaccgtctgccgttcggcccggccggccttcttcttcttcttgggatcctccatcgacttgagcacagcggcagaaagagtgccgtcccgtttctcatcctcgtccagatcttcccgttcgcctcgaccgacctcggcatcgaattctcgacaagcatggatcgccaaccgcttgagcgttcgatcagtacagaacgtaggcagctgtcggatcgaaagtcgggtctttgagatgtacaacgacgggttcgaagaaagtaaggtctttcggtcgttgaatgacttttggcgtttctcgagttcgatctcggataatgaggccgcggcaggggagttggcaaagatgactagaagggaaagaaaggaaaggaaaaagaaacaaggtttcaatggcgagtttgataaggtggacgacaaaaaaaccaagagactgacctccttccctcatcaagtaggtgtttttcttatcgaccttctccttcctcctctcgttctcctccttcatcttcccagcctcctccctggtgacagcccagtcgacgtccaaaactcgtccgttgagaaccatgttggaagccaaggaagatgacggatcggccgtcaggacggaagagagcgtgaaggggttgctggcagcagctgttcgatctttgacctgtgaggcgtcaacgaatcgtatgggtcagtatcaaaccgcgcaaagctttaacaaatataaattcgatgattttaaaaggtttggtgaggggaaacaaaaaaaatcctgaaagacaacacgtacgggcacagagtttgcaccagaaccgcccatttcggaagccataagtctagcctgctcgacagctttctctgcgtcctcctttcgccagaagcaaacgaaaccagtccctctggatcgaccagtagctctgtccatcgtgattcgggcgtatcgaaggtttccaaacgttcggaacctattggtaggcatcgcaaatagaatcagtcatcaacacttaatgtggacatcagaggaagcgcgccggaaaaaatgaaggatggggggagggacaaacaggttgcgcaattcatcctcagtcacttcgaacgagagatttctaacaaacaaggtggtctgatcctggacttgaggcaaggcgggcctgacgggttcctcatctttctctttttcctcgtcttcctcctcatcgacctccatgactccttcctcggtcttctccacctcagcctcggcctcctccgtctcctcctctacaggctcctcctccttctctttctcatactgatccttgctcaaagcccaatccacagcaacctctctgctggcttcctccttgccgtcctccccgatgacctttgttccgttcacactctccattgccttctccgcgtcttttcttgaaagcatccagacaaaggcgaatcctctcgctcgaggtttggggttggggttcgcctctgtcggctttcctggaagagagggaggcagggtgattgagtggattggaccatgaggcaagaagagtctctgcaaagtcttcaatgtggtctggtttatcggaaagacaagccaaaaacgtcggtcaggctctgagtgggctacgcagcctggagactgatatcaaattgaacgtaaggataatgcaagagggaaaaggacttacgtcccaaggcaaatttcgaacgatcattcgactgttcttgtgcaccccaccatctttaccggtcgcagcttggatcttgtctgttcgcttcttgatgacacatgacaaaatgttgcccaagtaatcgtgggcgtgtagtcggatggtagcatccaacgcggctgccgggcttggcaagagtaaatgagctacaagaggaaaaaatccgaaacgaaagcgagacaatcagctgaagccggatttgaataaaacaaagaaatcccagaatatgaaaacaggtaagaacaaaagcaaaagctgtagtgctcaccaacggtctcatcgttatccacggggaatacgagatttcccaactcggacccagcgacctttctgatcttcttccatagcttcgctttggttaatccctcggggatattgctaatgacaaccgttcggatcgcgtccgagtcgtatcctcctcttgagccagaaggcgccgagttggtgggcacagagttggcagacgtcggttggaacggagtggtagggaaagcaggtcgtcgcttggtgattcgctcgacgggaggagcaggctcggtcgatgatgggtctgcttggagaggctttgagagtgacacagtgatttatttttcgatttaatttttttttttccaaaaattcgctcgagcttagctcagtatggactgacaaagcgttttcaaagcagggggaaagaacaaaccttcttctcggcaagaaccacacccagccttcggtcctttccatctccaaaggaacctccatgaagctccttgacggcacgctcagcgtcctccttcatggcgtacatgacatatccaacacctttggactttttggtcgtcttgtcgagcacgacgaatgcagatcggacgggtccgatatcagaaaaatgagttgtcaaatcggtagtggtagctttatcggaaacgattcacgggaaggaagacaaaatggagagtatgaaagttggaatcatcagcaaagttgtaccctgtgtgagtgagtggttgattgagagcgaaagacaagagtcggacagaccagagtaaggcaagttggagacgaaaagagtacttccaacaggagccgaggaatcatcctcgatgaccgccttggcgatctgtgtttgatccatgtttgctgtggtggctaggagggttgaggtttgatgagcaccaaaagttgaggatccggaatacaaaattttgtaatcttggtgggttgattgagtgatgcacgtgatcgttagcgtctgaaggcgcaaggcggacgttcactctagaacgccaacttgattccttccttgctcagtcaatcatcatatgttgtctgaatagattcgtttgttggaatactagactggtcagtcaggtagaaatctctaggagactctgtttgaggttgtgttgttgctttcggcgatacagatatacatgctgaaattcgacgagtttgatctctggttcggctctcggtgcgacttcctttgtcattcttactctcctccaggctgatacaaaccttggtcttcaaagacaggtcaagcgtcatcacgatctccccatatgggtctcccaacgctcccactcgagatcctgtgccatattgtgttttatgcgttccatctagatgagccgctgatcgtatcgagactggcgacccggtcaaaaccgactgaactcttggtcctgtcgaaagctcacctggaagcgttcgagccgttgctctaccgacggatctttcttacctgggcggtcgactacgtgacgttctatcatccgttgacgggcttgttcaacgatcggaagcatggcgctcgccgagcgagttacgtacgcgaggtgtgctgggacccaagtcagcgcttaccgttaaacatgcaggcttactcgactggggcgagaaacgaggatggtagcctaatggatccgtcgcgtgtgcttttgccgttgacgatcgttccgctcagctcgctcgaccatgtatgtatactctccacgaacccgatccctgtcgacccgagtgaggacgatgtggacgtgttagtgagagatcaactggcttcgctctctgctaggaggatcagcccggaagtctgggacgatgtgtatgagcttgtgctgggcgaattttcgatgaaacaaaccgacgaatccttcgaggctcaacaagaactcatccggtcgttcgtctcggaaacgggactctgtctgcagttcagtgtggacgcgttgacacaggatttattgttatccgaccatcgttccgtcgacggttggactgacggttcacctatcaaccgtcttgttggaccgcaaggtcagattcatatccgactagaacctcatccgccatcgacttattctgcttctgaacaactcggcgaaccggccgaaccagaagatcctatagcgaacgaacggaacaacatattggatacattggatgaaccggtcgacctggctcggaacgagcacatgaagagaatgctctctccgatcaaacctttcgttcaggtatacctctacaggatagcgccgcatgaggtgggtcgtcctgcggatgatgatgatggcaacgaccaggaggtcgatggggatcctccgaggtttactctcgtcagatcaaacggttcgctgtacggtctcttcttcttgccttcctttcattcgttctctgttccttatgttgcgtcatttgctcacgtccccatcaaccgtctgaacgaaacagccaaccgattcagtccaggtctatctagatgcaacacgaggaagaccgagaagcaaacggaaacattgacaggaaccggaatggggttgttaactgtcaaagactaatgtgtccgtgtaattatcatacagacgttcaaagagatttctgttaaacatacaacaatctacattcaagtaaagggaagagcacagacggatcgtatcgagaagggggagatgtctatcgagggagaaataataagataaggacaggaaaggaaagacatctgtctgggaggaaaaagaaaagctaactccgaaggctgaagagccaacaggagaagaaaagaaaagaaaatgctacagaaagaaagtctgatgggaaaaagaaagaaagcaaagttccaagactgaatatataacaaacccaacagagctatatttgacagtaattcctatacccaaaaagaaagatgagatatagatgcgacgtcctaaaagaaggaagaaaaagaaaaaggccggaaaagagaacaaaaaagaggcaccagagacgagaactacgatgaaccgaaagcacttcaagccaacatccactcgatcggtctttccattatgtcgacctgttcgacacaaagtccagctttgacccatttgcccactctgctctcgtccagttcaagctccatggtacgttcgctcgggggagtaagcggatgatctgagagtctaatgtgagcgaccggaaagttgatacctagttcgatgaacgagtcgttcaaattcagtgtcaagcatggatctagcgccaaaggatcatcgatggtgtgtccggtcagatggctgctgctactactgctgccattggccaagcccaagcccaagccagatagatagtcaacttcgaccgagtgatcgatggggatcgaaaagtaatcatccgtgatcgttccctcgagagaggaaagcatgatgggcagatcaacggaggacgaactcgtggccggtccgatggccctactgtcgaaagaataggcaggcgagtaagacaaatggccgggtaagggctgggtggcctggttgagggagatgacgtcgtagaatgagagcgcggtcgacattgattcgtcagtgccaggctcaagcatggatcttggttccgacgttggggaagggtatacgttttggtccgaatctctgtcgatcggggagtagtatggtgattcgaggatcggatagaccagcccagtatttggttcgtactccgaatgggatctttcgagggaaatatggccggagcaaagggcgttccgtctgcttcgctggtttggcatcgtcgacgagtggtgtatgggtgtctattgggtgtttttttttcgaaagcaagaagaagaaaaacaaggtaagcataaggaaacagtggcaagtatagtatcggacagaaagataaagatgtattcactaaaaacgcgggcacaaccttctgcgtgtaaggtctgggagataaaggaatcgaaactttcggtcgatctcgtcgccgacggatcgtcaacccgttcgaggcaggactcgatgggatgggcaacgatgaactggccacgcttgctatcttcaccgagtttgcctttcgcctcgcctttcgttctcgagtggccaccttgtcttcgaacggcacggcctcaaaagctgtgggagatgcgcatcccgacagatagttagctcaatacattcatccgcagttcgacgacacggaccagagaaacatctgtgactgaccacaatcggtcttccctgccgctttacatcttgaacaggccccgttatctatacttccggaacattttacttttctaacggaggaggatagaaagtgccgcgttagaatcgatcgacacagttatagatcaaaaagggaaagatggagggagagaagtggcagtatcagttgagctggttgttgtttgtgttttgtttttggggcagggaatgtatgcattgatcgagagaggatgaaaacaacagcgaccggggtgacgatgaagaaaggaggaaaaaacgtctggacggggagaaaggagaagtagatgatacacaaatgttatggacaaaccttgaacggcacaaggtgcaggcctggttgactcttgatgttgagctgactgcagtgttcgtagagaagagatctggcaggccggatgagatcgcaaaggaaagagacgccgatgccgagccgctgggcgaaggcgatgattctgcagatgcaaatggcgacataggagcaaggatctgtcgtgagtgagtgagtgagtgtgtgtgtatgtttgtgtccttgtaatagtcttgctagcagagccgaaggaatgagtggtttagaacgaaggcgcgaaggagagcgatttgaggacaagacggccagtgggtacagatgcgactgaaggtagtacctcttgataggatttattaaagagaagcgagctagatccgacaagagtcgaacgatgtcgagaaagatgagaaatgatccgaggattaaacgaatgagaggatgtaaaacaatgaaagaaaaagggaagagaagcgagagtatgtgtatatgagagaaggagaagaggattgaatggtatgcacggatgtatgctcttaggttttgtttatcacccaagaagattgattgtgaaggaagaaagtttcccgcgctatcgtttctcctcttttcttttcttctcttctacatgttcttcgtttctttctttatttttccttctcttcatacggccccatcgttttggtcctttcatgtacaccactggaatggcctccgatccaccattcgcttccgtgttctgttcggcgcggtgaaaataagaaagattactgcttcttatgcgagaatatgagtgaaacgcgcatgttagcctcggttcgtccagctatgtgaaacgaatagcattcataagcgagcgagtagagcggcgttttagagacagcctaattccagagagagacaagccacatttaggacgaatggcaaggagaacttctgcggctgcgagcgctaggtgtgtgccatgtctttctctctgtggtgtttgcgcttacctcttcagtctcgttcccgcgtgttctctctgtccatgtatctctgccagtgtgtgtgtgtgtgtgtag

SEQ ID NO: 2964 - DNA, 1744 bp, Xanthophyllomyces dendrorhous
tctaaaacgtgtcaagtagacttcgcgtttagtctcgccgccagctacgatcggcgagtttcatagatcgttcatgtcgcaatctaggcttttagttctggactttcatatattgagttttggcccgacagacaaaaagcgcagcgtcaggaattgggtcccgccgcctgagggcaacaggaggaataacaatagtacccgttccttcccgcgacctgatctatccgttacactcgttcgaaacatgcaaggtgacacatagcgttcgacgcgcgaagcaatcgatagccggttacctcggtagtcagcatctcgagaatgatatagattaatccgagcgtacacagagagtttacatgcctaaaagataagcatcgggtgtgtgagccttaatagctcacgcgcgaagcgtatttctcagatagtatcgatagagacacgtgctcagacgacgcgtccaaattccaacccactttctgaattttcctttcgtcaacacttactctgttaaggagaaaagagactctctcgtcacgctcatgtctcacagttcagctcatcactggtctcattctcattctcatgcatatccgcctcctagtgtttcagtagatcaatcggcctccttttcctcgtcgaccttcccagcggaagaccaaccatcacagactgaaggtggatactctgatgcagaagaactactagatcaggacgtcgatgacaatgacgtcgtcgacgaatcaatcgacgaccaagagtcagaggacgggtcggatgaagctctgtcggacaccgggtttgaagacaagatggaaagccagctcggactctggaagccgaccgaacaagaattcaaggcaaccaaagacttgctcgtcagctgggattgggaaacacaaactgtcaaaggtcggtcatcccggcttccgacatccagtgtgataaagagtatactgatctttcgctatttcctcaacagaacccgatcaaggtcaggtcggaactgaacaagaactcgttgcggtcgctcacaaggcgatgcgtcgagcactctattctctcgaccgggatcagtggagatatgacagctggccggctgacgaacaaacgtttgcccctccgttcccgcatcgtagccagaggggtcacaaccagagtcaaactcagggtcagagtcagggtatctctgttggtagactctaggttcggagaacggctcgaaatgaaacggtgtaagctagacgtaaaatcgtgcgatactctgacgagacggaatagagtacgtgatctctcacctcatctcgtttctatcattttttctctcttagtctcttttattctctatctaaaacaactggttaattgcctttcccctttctcccgcacagcgtcctagttcgaaccttgatggccgtcaatgaaacgaaccctctaagatttgccccataaagattagggaagattgggtcctagatcattcttctgctcaaatgtcccagaagtggttcgatgtccaatcagagtttctgttgtttcagtagtatctgcctcacaattatttggggccctagcatccttcgatttctgcaatttctatgatagaccaaacttgttgtgatttttaggagacttgttattttcatgaaccccttttatgaaaagatgacaggtgtctgtacgacaatcgtcaacataggctaactttcctcctcgcatataagaaaagcctttccccagtgcacac

SEQ ID NO: 2965 - DNA, 27813 bp, Xanthophyllomyces dendrorhous
ttccatcgagcgctggtttatctgggctgatcagccacccaccaaattcacccgaatttcagccaagattcactctgggccgatcaatcgacggagaggaggatagattcgttttctgacgttgtttttctccgatgggatcagcgtcttcgatttcagttttatagataatattaccttgttgcttgatcggcacgaagaacttactgataccatatgtcactcttcggacactcttggctttcttccgaatcttttcaaaagtcttcctacccgttcggctcggtctcggtacacctccatacattttgttcaaacccttattgtctttgtttgttttttctctttgtcctattttcgttctctaacacatacacacacacactctctctctctctttctctctcatcagcccactgttttgagtgttccttgacgtttgaagggggcatgcacaatgtgccacgtgctctatcacgttcaaagtctcatcagaagaaaaatcagtcatttttaatcattgtgttatgtcctctttgctctactccttccaaagtctatacaagaagcacaaaaagttcctctacctctccttctcataagacggaagccagatttagatgcttagatgttgtctgtggatgcatcattcacggaagacaacaacacgaaagagaaagagacggagaggtcagttgatgttttcctaaagagcagaagaaaagagaactgcaaagagaacaaaaaacgaacagaatacactggtaggagaacccggctgggcgtcatccaacaaagcttggctaaatccgttctctccatccttctcaaccccactctccaacaaggcctgagcatcctcaacagtcatcagcttagcggaaaccaacttgagactcttctccatatgaggcagcaactggctaagagtgtcaatctcggagaaaggaagcgttcgggtgaaagcggtggtagctccaaactcagcgattcgtttctgtacagtgcgagtaaaaatctctctagtttagcacgtggaaatctcgctcgagatttggaaaaaatgaaaaagaaagtcagacacaccttgagagtgatggcgtagggcatggccttcttgttcttgatcaacccggcctcagtcaaagcgactcggaccttgacatcatcaacactgtcggtcttttcatcatagctaaacttcacggcctcaaggaccgtgttctgccaggcaggccatgtctttgcgataaacaaccgaagtcccaacggctttgacttgtcaaccaccgggcccttgcccttgcccttcttcttgtccaatgcaatctgtcggtcccgagtatccttaaggacagctcggatatactcaattccgttgatgatctccttgtcgatcggtcggatctcggggaagcgagctttctggatggagctcgagttttgaagcacggtggtccagaggtgatcggcaaagtgagggatgatcggggtgacgagcaaagcggtgtatcgaatgcactcgagcaacacatcgtagtgcatgcccacatcggacgtcatctcggtgtatgatcgtcgagcgttatccataccatagtatccgtattgaagagcctccttgtaccaggtcttctcgtaggcatccttggtcttggcggcaagatcgttcatctcctcctcgaacaccttgtcccagtagctatccttcggtccagttcggagcgcagatttgttagccaaagtctcctcgatccaggcaagctgggtgtagagtcgctggatagcagagttggcggtgagctcctcaaagttcgcgtcctcaataccgtctccggcatcagccaaagtcaaccgagtggcatcagctccgaatttcttgacagaatcctccaacgtcaaactgtttccggtactcttggccatcttctttccgttcaacatcaagtgtccgttcgctcgcatcgcctgaggccagtggtgctccgggaacaaggcggcgtgaacgtagatgcagaaagtcaagtggttcgggatcaaatccttgcctgacgatcggacgtccatagggtagaaatactggaactctcgcttgagcttatcaaatgtctcctgggagatgttggaagaagcggggaaagaaccggagccgagaacgtattcccaagcctcgtccgtcatatccgcaggagagatcccggccggtccagtggtctttccagtgatatcaccacctggttgtcaaacaaaggggttaactgttgggtcaatctcgttcaaagaggccaatcattgaaagaagaagaaaaagaggccactcaccctgaagaaggtaggcaacagtgtagtaggacatgtagatggtggaatcactcaaggactcaaccaagaactgggggtcccaaggaattcgagaaccaagaccgtaagatcgggagcaggcccactgcttgagccagtcgagaacaccctcaaatccgttccgggtctcgttgaagtaggtgttcatctgagacaaaagcctattggtgcgaagaacaagatttagcaaagtatagatgacatagtcaaacagctcaatgcaacatttgtattgaaacgttgactcttacctcttagcagtctgcttccactcctcttctccgtaatcaatgtaccactgatctacgagcgcgacaatgcactcgtcaccacttcgagaggtgaccaaactctcaggctcggcgtacttgaaggccaaattcttctcgatgagcgagtccctgaccttggtcttagccgtctggacagcctctcccttgaattctccgatggccatagttccattgaagaagccctccttgtaggcaatatctttggcttcggcaagctgcttgacatccttctgggactgaatcttcatctgctggcaaagtgtggcagcgatcataccaccgtagttgggagtagtgatgaccgagatgggctcgttggaagcccattcaggctggatcttgtagaattcagccttctttcggagatccattaaagtggcgtaatcgtcaggagagtcagaaggaaccgaggtaacaactccagtaccctatttatgaatatcacagtagcccagacagaacagtaatgagagcagatattgagtggtcaaatctttgactggaaatgtgacaacaagactaagagatgatgattataccttggtagcaaggactccgtccataggcaagacccagacctcctcgtagaccgagtgaggggccttgattttagttccgacaagggcatctcccttgatctctccaagcttattgatcttgccctcttcggcaaagattccctggtaagccatgtttcgggcggcccgctcagagataataaatacctcattgttggcggcctcgaagaagccataggtgatgttggttccgacgaaacagttggtctgtccgtacctagaagcccaagagcagcgagacaccgagtcagatgtacagttttcgagcggcaaagaacacgacgagaacgaaagagagatacgaacatggtctcgggcctcaaagtggcagcaaccatgtagaccttcttgccttcgatgccctggagtccattcaaaacctgcttggcagcctcaggccagtgggtaacctccatcttgagaccggtgtactcctggggcccaacggcctctccgccagaacggtcgtggtccatacagggctgtccgtccttgatcgagtagatggtgtttcgcttaccgaacttgatcttcttctgagcgtgtagcttgttcatctgccatcgaacaaatgagtcgtagtaggggttctggtcggtggtctaatggatgcagaagacacaagatacacgcgcgctcttcagcaggggtattctcgccatgcggctcagatattcagataagaaatactgacgatgaaagttcgtcgccaatcgattcgagctccgaactcggtgcaatcctttcgagcgataggagggaagtactgaagccagtggagaggatcagcaaacttcttgatctcctctcgaggaacacctagatatgaacaaacacggaaccatacaaagatctaagtagatgccagctttagaatttgaaacgcaaatattgatcaacgcaccaatgctctccataatctggaactggtaggtcaatccggtagcctttccggcgatctttcccttagtagctttcgatgggtctttctgagcatcagagaccttgttagcagggggaggggcggccgaagcctggggaacagggttctcagggtcgtaaccctcgaactcaggtccaaacatttccatttctcgaatgagcttatcagcagcagcctagagacgaaaagagagaaattgttgaaaccaggatcagttttgaggaagacctggcaggaacgacaatgaaacccatggagaacagaacaaaccttgatgggcatacccgtgcagtgaagtcccatagggaacaacgctcgcttgccaagcatcctctggaaaccagtagcaaactcgatcttggagatagtgaacgcgtgtccaagatgaagggatccgttcatgtagggatagctatcagaaacaaacgacaagaagtgcgctcttcgttaattaactgtcgcctttggtctctctgagaaaagacgagaggaggagagtgatcgacgtacgggaaagttcccatccatttggggtgctcggcctgaatttcactaggggtaagctccttagagctgagctcttcgattgatggaggattgatctcgaagagcttctcttcctgccaccgagcctgaagatccttctcgatcttgataaggtgatctcgtttgaaggtctgtggtcatcgatatacacagacaggattaaagttgggatcagtgtctgacgagaacgctttacggatgcataaggtcgaccatctgttcagctcagcaaaatgaaatctcaaagcaacagctctcatccttctctgacgccatcacacacggccaacctgattctcttccaaaactctgccacaattaccgctctactgtattcaagctcgataaagcagcagcagccaccaatatgaagagaaaaagaaaagccagaagagaagaagagaaaaggacggagggaaactccttaaagatggcagaaaaacaagaaacatccaaagaacaagattgattagactgtcacagagaactttcagtatgactcacattttccaagacgagaggtccgaccttgactttatccatcatgtcgaccttggtgttagaatcggccatgtttgcgtatgtcctctgagagtgggtgtgactggcaccgtaaatgtttaggcttgagaagattaggaaccgcggttttaaagagcggaacgctagagagtgaatcgtgacagatagaatcctcggaggtagtgaggatcagagaaggaaagaaagaagagactttcgtcgtatctgctggaggaaacgaaaaatgggagaggcgaagaaagagggtgaggaaggccttggaatccaaggattagttatctaagtatgtaaaatcaaaaataaaataaatatacgacggccactctactcttccagaagccagcattcttccgtagctctactttcagcgcttccgtcgtctctgttaacatggctgaagccgtattaaggatcgtcattgttctcgtccgtatcgggcgagagaacgacgtcggatgttgcagagtgacctgctgagtggtctatcttgattgcaacttctgggcgcgatttcgagtctctgtacactttacgagtgcgagtcgtacactctaaaatggcaggagatagaacaattcggaagaggaacggagtaatgattggaaagattcaattgatcaagaaaaaagaggtatagttcgtacgcgtagaaggcgcgtcacatgataaatgggaggtagcctgaaagaaaaagaagagaaaatggaaatgacaagaaaagaggaggaaaaagagattatggtcgatgacgccagagcagccttgaagattgttgatgagagagcaacaagatgaacaatgaaaagggtgagaaatcgttgagacagcttggaaagaaaattatgaacgatgttcagatgaaaacaaagaggttgagaatgatgaagaacgaaagcaagtgtcaaggaagttaacgaagagaagaagaaaaaacgcggagtgtattttgttgtttgtttctttccagatcagaaggtctcatcctcgtgaagctgaccatcatggagttgttcttctcctacaagctcggcatcagcgggcacctcaaatccctcctagatttgtgtgcggcaaatgtggtccattggaagattcccaaaacaacatgcgagaaactcttaaatcagtctccggctgcggacaaacagaagagcatatgaagccgaccaccagtgacaagaacgaacctctgtagagtagagaatctcttgaatctttgaaagtgtagccttctcgagttctggagttgactcgctacccaatttttcctggacaatcatctcgatatctcggagctgcagttttgttgtttgcacgatgtttcgtagccaagacagacgaaatagaagggaaaacgagatttttagtaactgactcgtgagtcgcactcagcacaacgggttacagattttaccttggcaaagtagaaatctctctctgtctccagaccctctaccgatcctttcaactcgtttaattcagccgtgagcgcatgaaccctttcagcagcagcgccgctcatcgaagatccaggccgcaaacctgagaagaacacgacgaaacaccaagccgtatggacgcaacccagttagttcggtgaactgacacgctcgttggggtttcgcttgcgcgcacacgtatctaccctccatccatgcactgtctaaacctggttcaagaaaaagattggggaagtacgtaccagcagctttggctctcgcgccagaactaccccccagacttccacttgacctggagataggggcagaggttgacgtctgtaacgccggtacatctccctttctgcggccagcggcgtcgtagtgccctccgccaaaagattggtcgtggaatcggcgaagccactggaggaactcgaggttgtcttgcatcttgcatttgaccagtcggtcaactggaataggctttaagccccaatcaagagggaggaatggagttattttagccattgtcatgaaaagatttatatcagcagatgggtcactaataacaacgggtggcctgtaggtatagactgaccttcgcgattttgtgatctttgaaagtcttttgcagaaccttgaagttgtttaggtactcgtattcctgcttagcagagaatttgactctgctcataggcacatcacctgaagatcattttcagacagttggtgtttaaatatcgttttagtacataccgttttatcaatgagctgattggaaagtgaaagaatgaagctaaccaaatatagagtcaagaatctgttgaagaattccaaacgacatgagtcggtaaatccaatgttagccagcgagctcgtagtgacaaccaacgttcagattgaggaatgtatcgtagaatcctgtctgaagctacaggattaacccaaaagtgcgaccttccgactgacaggcgagctggtcaccgaccatctcatctgcatccgtgtatgctctttcaatcattcatatactctgcgttctgagttgaacttctaataatgaagatcccggagcacaacgtagacagatctcaagacgacacaggatatatgccaagctcggtctccaagtgacgcgaagaacaggagagtgacaacgaagcaggtcaagaaagagggtaaaggtaaaaacgaacctgacagtaagccgctccggttccaaactgttctaccttggaataactaatttgaaggaggtcatttgtccatgcgatgagttctgatcgagctagatttccgacatacaagccagtgatatttaagatggaaagcagcttgttagtttccataaatctacagaaagggaaaggaaaacaaccaagaagagtgtggccctctttcttcttcgttcaatctcttctcttcctctctcctttctagtatttccagagaagatttgaactagatataagaaagatacttacattctccagccatgatgcccagcgaatgtgtagagtacaagagaggaggaaaaagaaggctaaacgaattgtgaatctttggtgagtatgtccaacaaacaaccgtatgttttcctgttcctctctggagacaggcggcggaaatgtcttacaccatttacagcgtgttacactatttcccactcataagcacttgttctcctgatacacaattcgactcagacacttttggaggcagttcgtcacagaggatagtatatcaaagtcacatcacatataaagagatacccagaaggaaatgcgtaagggaaagacaagagacagccttcactttctagttatcgtagcctgaatcaatccactaggcgaagccactggctcaaacacctctaccaatccttctcggccttttccgttctcgaggttgaaaggtttgaggttcacaggcctgtttccattgagtattcagaatgatcaagaccgatcagtttggaactatcatctactataccagaattttgatgtagagatgcgagacatacatataatgcttgttgggcagcgaataaaagacttctttgattggagaagctctagataggatagtctgagcggctcggtaaagtgtagccttaatcatgaatttcagaaacgcattagttatgccggctgcaggaataagtaaaactttaaggacatacctgaacggaagccgagtcgtgcgtcgcaaacacctcaagcgtagtggttcgtgctgtgctcgccagctgatgatgcacattggaaaatcaagatgataagcggaaccgtgggcaagataaagaaggtgtcagttagttcctttcagacggggttgagaacattcactgaaacctaatcagtatggttaaagggaaacaacggaccttctcgaattgcacctccgcgccaatcttgtttagattatcgatagtgagcgggatgtttggtggaagcgttacagtgtaatcgcaagtgattgaagtcgagaaaattcggtcgtccacctctggattgattgaggttcaagaaatatgcgcgaaaaatggaagaaagtcaataaagctcggttggttggagatgaagcaaaggcagaaagaaacgaaccaggcaacgtggtgaattcgtctcgtaaaaagttggtgaaagaacttcccgccgtcttcaagaccaagagatctttaactccactcttgacgattgctgtgatgtcgtccgttgatgttccatcgaccaccacggatacgacacgcttctcgtctccgtctcgaacgaaagagtgtgggtgtgctccgatatcttgaacctttatttcgaaagaaatgcatgaagtaagatacaacaggtcagtatctacaacgaacagtgaaacgctatgtatacacatacatcgattctagaccatcggagggattggatatcgatgtgggccttctgaatgtgactgtacttctactcagcagaaccgaaattccatagatggcttccttatcagtttctatggatttgcccaagatttagagcgataccaaacaggacgtacagtaacgaaatgagttccaagatgaagagcaaacaactctggggtcatcacatgaggcgagacctttgccatgatataggtagtgttcttgactgttctcatacatacaaaagatcttatcagaggagcatctttcgaccgagagacaacgcaaatcacttgtgatgaacaacgtactagaatcagtagcaacgattcgggtattgtccgcagcgtcgtagctctcggcgaaatcaccttcgagaagagctcgaacaacatactcgacgactgtggccagcatccgttcgacaaggttttgcgtcagtatgctgagagatcgaataaagatcataggcgagaatagtctcaccctcttgtttagcaggcttgccatctgcagcgggggttcgaactactctggccactcggacgagatcctttccgtatcgagcagaggaaaggaaaccaaggtcttcttgagtatcggacatgtctgtttgtttttggtgaagagtggaaacgtgatctagttgaaagttgtaagtgatgaatgggataaggagcaacgaaaaaagaaagaaaaacaaagattaacggttctatacaaggtgtttaaatgaaggtgaggatagagatgcccgtttggatcatacgagataagcggaggacatggagagctccgttgaggccggagccgggagccgaaagataagatataaccctaactccgagttgcctctctacatgaagatccctcggtcagcaaaccttccatcccttccaatgacatccgacacgtccggatattccaatatattctcagtggagttcggagaagtgataggcagtcgttttcgtttttagaagaatatggcttgtatcatcaaaggcagatacagtgagatcagataggctcagtgatgagggatgagatcaagacgtgagctacaatacggaaaggaaaatacagcaaacctgaatgtatgttatttgagtaatgcagtgagcaagaaacaacacaacagcctcgcgaggtggttgttcactcaaataacaacaatatgagctccaaatatgatgccgacacaaacatggacgcttccttagaatagggtacctagcagaatgagcctggtgagagaacacagtcaatgcagccaacgaccagacgcgctttttcggactgacgcgtcaaaggtacattgcgaccacaacgttcaatcagcccacgctgttctagcaaggacacctcaaacatggctatgctcaataccatctcccctcctccagccgtgttcctacagcctaggtgccagaagcatcagttcaatcgaccttcatcgaagatatccctttccaatatcgtcgagcgcccggctagacttcgagcaatctacgttggtatctctgctgccgttgcccgacttgaacacctcgtctcaactcagcctatcaatccaattgaaatcagagtcgagcctctaaggtcggatccatcttccaccgcagacagcaaagaacaggacttaatcaatcaacttcaaggcctaaacctttccacctcttcctcagcgccttcgtcgattctgccgctcccctcgcctctctctcgaattccccagcttgtcttttctgatcctccaaccgacaacttgattctttctccggcggtcaaattcattcatgctccctcaaattccaatgttactaccggaaagatcgaagcaaactatctcgaaaaactagtcgaatgggtaaagtgtaccgaggacaagatactcaaaaaagagagtgaaataccagaagatctgcctcagttggatctatactgtaggtactgattcctctctatttggtcttagtctgagtcgtttagagaaggactaaataaacaggtcatgaccttgtgtctcgacagtatgctcagaatcgcttgaagcaattgaaggcgccttgtcaaccgtcatccaaagtgttgacctcgtcatatccaacaccaatgtcgagacacgaaccaacaaagcgccccttcccgaagaagccaacagcaaacaaattaagacaacccaagctttctgtgctatccgtccgcctggccatcattgctctcaagaaactcctatgggattctgttttgtcaataatgtcttggtaggagcggcacatggtgagaacatatcatttcgaatcttcggtcgcacgtgctcggaagaaggaataacaacagctcatatgcgtgtttcgtttgtctcgtcgaatggtttgatacttagctcatttgaagcacggaatagatcgagtgatcatccttgatattggttcgtataacatcccttacgatctccgcgtccctcgacctgcctctatgtcctactaatctgatgctcactgtctgcttgttgaacctatgcgtcttctcaatagaccttcatcatgggaacggtactcaagacatcatctaccgaataaatgctgagacacatttagaggagcttctggtagccggcggcaaaccgccgagctctacagccagaggactcaaattcttctatgggagcttgcatgatatcgtaggtgtcaatgctaagagctatcattggcagattggtctctgatcatgcatcgactgacggaagatctgctcattcgtgattacctttgtgacggcaggaaagctttccttgcgaagatgggaatgctgagcgcgtcaaagacgcttcggtctccctggcggcccatggtcaatttatgtacgtttctaccgtaacacatcagcgaatcttttgactgacgatagaacaacaactgcatgtcattcttagagaaaacatccacttgtctccgtataattcccccaatgatttctatgatcgatgttacccaaggtacaaagtattactcgataaagctcaacagttcttgctcaagacaggaggtgtaccagagaaaacattagtgtttatcaggttcgtcatatcatactattgtgatggatcattccttgttattcagttcatccttttcacatcctctattcctaatttggtgtttaaatgctggcttaaaaatatgaatatagcgctggatttgacgcgaatcagcatgagttgcctggcatgcaacgtcacggatgcaacgtccctgtccgtatttttcttccttcccaccttttccgaaaagtagacagacatggctcaacctacattccgaactgatctgtcgcatgatactctaaaatttctcaccgaacaggtatcattctactcccaatttcattcagacacattcaaatttgcaaaagagcatgcccttgggagagttattagtgtacttgaaggtggctatggagacaaggcattgatgagtggagtattgagcagtttggtaggaatgacgctagaagaacaaggaaggttgaacggggaggactggtggagctctagctgtctgagcaaggtaaggaaaatcctctctgttctttcttgttctacatctcatgtcttggaacgtagctaaaatgatcagaccaaaatacatagcttgagaaagcgacccgactgccaacttctcgcagaacaacccgatctcaaccatcagctctggctcaaccaatcccagcgccattgacacctgaactcgcttctctgtcttggctaactcgatcactaacgattctaaactcaattgagtcccatccgagtttcccacaacctcctccgccgattccaaaatttggaggaatgagagatgtggctgagaaacgagtattgaggacgagaggagcggcagttgcgagaggggcggtcaaggtcgatgtgaaggctcaggaacgagtcatcacaacagatcagaaagaagagcatatatcttgctcctcttcctcttcctcctcctcatcctcatcgtcatcatcatcatcagaagaggaagaggaagagacggtcaagccaaccaagacaactaaagcggagccaaagaggatcatcctcgctcaaccaatctctgaattttctaatctcaaacttgaccccaaacccgactctgactctatctactctacatcaacaccaacgactatcgctactcagccttcaacgacatcaacgacatcaacggctgttgctcctaaacgaatcattctaaagtttcctaagccggcttctgcacccatacctgctcctgcgcccgtgtctgtgtctgtgcctgcgcctgcgcctgaatctgaacttggacgtcatcccgacggatcaagtcaacacatctagttcttatgattatctccattctgcatgagattaattgagtgacatcggcgttctttatacaaaggaaacaaatgagaaaagaaaggaaaggacagatggaccaggaacttcggactaaaagaaaggaaaagaaagacggtttcctatataggagagggcgacgatcaatagatgtaagaagaaaccaagtgcaaatagtaagagggatactgtatcgacaagtggttagtgaattgagacgtttaagttacatgcaatctgaaaggtatgataaatccttaaataggtatctgcagagaagaaagaaagattcggtaaagatgggaaaagatcattcgacgatgttcggtgaagaagagaaaattcggcagagtacaaaacggttgacttcagagagaagcaaagagagggaaggaagaggattctatcataatcgagtatacagtttcgagtgcttggacaaaaccactgacttgtatgaggaggaagaagaggatactatacctgattagacacttgtcgaagccagctcgtacctaagagtttaaacacgtgaaaatacaacaaacattttagaactcagccggataattgagagcagataccgaacaaagagagaagtgaagaaacaagaaaatgatagaataaaagaaaacaataaacaacttacgggcaggtgatatcttcaattgaggttcgatccgatcgagtgccaaccacgccaacagctttcatatcgattaccattcgaatgtcgaatgtagtcctgtttgtacctggatagatatgcgcacatgcatcgtagaatgataaccctgcagacattcattcgacgttgtgcttagtacgaactaggcccggtacgaagatgaaccaagagacatgcaaacaagtaacagaaactttgtaaaacacacaggtaggatccgtagagttgtaaccttcgtatgagaaagtgacattcatggagaatgggaacagcttcttggcaggcattgtgcccttccatacacctgtgccaacttgcttgtcggtgctcagatcatacagccgagcggtgatcgacttgaaagtgattgggatataagtcgctttggtgtcggctgtttatgggaatttagagtcaacatattgctctgcgatagaaatgaagaacgaaagaaacttaggataaagtctcaaaccttggaggttcaaagtggcgggaaaggtgaagttggcaggagtccgactgaatacagcggatgtgttgtccaagccggtagggatggtgaatggatccgattctgcccagctgaagctaggaacccgagggatgaggaagtacaacatgatcgccatgctagtatccgacgaacaggagcaaataagtttccaattataattacacatgagatagaagtggaaagagaagacaaacatgataatgaggacacctgtgctgtaaaggagcaactgtcttagactcagtccacaacaataccttccacgatcttcatcccgagtaaatgctcgccactttcgtttcctcttcagcgcagagtcttcttttcgactctttttggtcaagctatgtaattcctccttcttccatctgataagcagagcaagagtaaggattccagtcttgttggaagaacaagcggaaagagacgattaaagcactcactctgctcccagaacgggtacggttactaactccgagatttgcatctcggcgttgctcgccggctttccaccttgtgagaattcactagcagcatattttccataatgcgatctgcctctctcttgtgacggcaggagagaagccattgactgagatcctgtcgtggaatttgggccttttggagtctgatgaggttgaccagccccatacaggagcggtgtgttgtacattgacgatcctggccggctgctggtcggccttcaagattcgtatgaagaatgtatctatacacgtcaaggataaattcgagactgtgagaattctagcctgttggaacttaccgttgattacgagtggaagaaacgaatcgctcgccctcaatgcccggagcaaggtgtgaacgggtgttgtaccttggtccggcattgttgaaatctgttgcaacacgtggaagaatgtatataagtgagcgtgtatgttgtatttccggcatacacaggccaggcaaccaaagctggcctggacgactgaagagaagaagaaacgggaacaaaacgaaccagcgtagatatcccaaccatcgccttccccttctggtgcgccatagacttccctttcgtcttcttcctcctcctcctccgggtgatctctgtaggctgattgccgagtagactgaccaggccgattcaactgtgcgctttccggacgagtccgcacggacgaagcgtaatctttggaatgagggcgagaacgctggcctgactgtccagagctagcagagagcgatatgagagggattgaagccgacgggtcagactgacgatgagagttatacgaggacatgatatgtgtatgtgtgtgatatccaagatgtgtgagtacagaacaggcgagggaagagcaacagccaaggacaacaagcggccaggaaaccacgatcggtgactaccccaatttgacaatggttacaaatagatgatctcatatgtagcggatccgtaaccaggctgcataaacaaagaaaggcacaagagaagaaaacccccaaaagaggaacgtttccattcgctttcgccatctcttcttgctccaacccaccatctacttctcatcatgtcttcatcgtaaggtctttttcggtctatttaatctcatgggtgtctgattatgtactcaagctttggtcctctcatagtttcaatcttcagcacaacaagactacgcctttcgaaggagtgagtatctgtttttttctttattcagttcatcttttctttctcggtctccatctcaagtacataaatatatgtatactaatccatcttgctcatctctcacctttctagcaaaaacctggaacttccggtttgaggaaaaaggtcaaagtcttccagcaacaggttcgtagccgtcgctcactcattgtctcgattgatcatatcacatcgcaaacgataggtttcattcagagtgaaacatctacacgcggatctctacactcctttgctcatcactcaacaatcagtccttcgagcgtctcacacacgaaagaatgtcaactgatctcatttcctttgttatcaaacatacacatacatattcaaatcctttgctcgtatattagcactacactgagaacttcattcaggccaccctttcttccattcctggaggaccggagggcaagactcttgtggttggaggtgacggtcgatacttcgcccgagaaaccgtccagactatcgtccaaattgccgccggaaacggtgttagcaagctcatcgttggctacgactctatcctctccacccccgccgcttcggccgtcattcgacaaaggaaagccgatggaggaattcttctaactgcctctcacaaccctggaggacccgagaacgatttcggaatcaagtacaacatgtccaacgggtatgttctatcgctattcctcttgtgtcatagaactatctcctcaatatatctcaccattttcacaacagaggccctgctcctgagggcatcaccgacaagatcttcgaatacaccaagaccatcactgagtacaaatcgattagcattccccatgtaagtgtcctgaaaattatccgggtcatatagcaagttctcaataaatgtgttttacttccctatattcaaaggtcgaccttcgcagcgtaggtgttgtcactcatggccctattacggtcgaggtcattgattctgtagcagactacctcgagctactcaagtcaatctttgactttgaggctatcaagtcatacctacactcccctgctcccggtaccaagaagcctaccgtcttgttcgatgcgctcaacggggttaccggcccctacgggcaagccatcttctgccaaactcttggcctgactgaagcatctattcagaactgtgttcctctgcctgactttggaggatcccacccggatcccaacttaacgtatgcccacgatcttgtcgctcgggttgagaaggagcaaatctctttcggagcagcttccgatggagacggagaccgaaacatgatctacggcgctggagcattcgtgacaccatctgactctgtcgccatcattgctgactgggcccaggaggcaattccttacttcaaggatggaatcaagggtttggccagaagtatgcccacctctggagctatcgacctggtcgccaaggagaagaacttcgagatctttgaggtccctactggtacgcaccattcattgatcttggtctgtcatttgatgcatgcacacacaagcgcattcatctaccggtgtctatcatgatcaaaccgatctgaccactccgttgctgttatttaatcgtacaggatggaaattctttggaaacttgatggatgctggccgactttccatctgtggagaggagtctttcggaactggatctgatcacatccgagagaaggatgggctttgggccgtcatggcttggttgcagatccttgccactgctcaaaagaccatgcccggagctggtatcaccgaaatccagaacgcattctacaagaagtatggacgaagcttcttctctcgatatgattacgaggagatcgagtctgagcacgccaacaagttgatcgaccacattcggtcgacctttgaggcctcatccttcattggttcgtccctcaaggcaaccaccacggacaagacattcatcgtcaaagaggccgatgatttcgcctacactgatcccatcgacggatcggttagcaaaaaccagggactctacgttcgattcgaagacggatcaaggatcgtgttccgactttctggtactggatcatctggcgctacgtatgtctcttttcgttcttttcagatatcgtttcagtctcgttacatacctcttgtcgatgaatgactgattctttatcttcgatttctgacgaatagcgttcgagtatacctcgagcgatactccaagaacgagtccgagtacggattggatgcgcaggagggtctcaagcctctgatcgaggtcgcactctccatgtctaagctggtcgaattcaccggaaggaaggagcctaccgttatcactgttcgttcctgcttattctgttgtcaaacgtctgcatacgagcgctaatccgatctacctttttctcttgatagtaattcgactcgtctatcctgtgctttccctcctcttcatcagatttctcctctgtgctcttctgtaattttgacgactttctagctgcgattgtctgcacttgttccgctatattgggatttcgaatgcttaatggctgtctatctgaaactgtaacggtgcaacatatggaagtgtgacaagagctggaacaagctcaattacgcgcgaatacattcttttacctaacgcgtcaatcaaatatcgacgcgtcagaacgcgtcaagcctgtcaaccaactctcatttaacatctcactgcgcgtgtgctcattcatataccttctctaccgaccacactttccatcttctctaccttgtgcctccttccttggtctctatctaaatcatgtccaaagctaatgctactccaaaagacaaaaagcaaacaactcttcttggattcttttcaaaatcatcttccctcggtcctccgtcttcttccccaagcagaccgttatcgagcgcctcgaacctaaagtcggcaacgccttcgactctgactaagagtcggtcggttggtgggggaagtgctcttcctcatccgccctcatcatctcctctagctgcttcgagtgctctcaagtcaagacagacgaaatctttaagtgggaaaccgttatcatcgaaggatgatcccttcacgatcgatgaagtggaggacgatcatgatgttgagcctatcaccgaggcgaagaagacgattatgacggagaagctggagaaggacgagagaggcggcgaaaaagctttgtcagagacgagcagccggctaagtccgtttccatcttcatccctatctgaagtcgacatgaatgataaagagaagaacggagatccggtggctatggacggagtggaggaagatgaagatgaagagttccctgtcggacgatctgtcagtagaagatcaatctttttaccatctaatataacagctgaagtttaatatggattctgttctccgttggttctgatgttcggtcagcaacgagtcaagagaaagatcaattttgttgaatctgatctatctgacgcagatgatgaagaacctaagaagccaaaggcaatcactcgcaaaggtaacacatcttttgttgcttcagtgatcaacttgaaactcgataagctgaaaccgttcattggtaaaatgcacttctttcaggctccaagaaggcgaaggcagtgtcatctgatgacgagttcaaaatggggtccgatgaagaggctttactcggtaggctttaatttgtcaacttaacgctatcaggctgatcacagacagaagcctgacaatctctgtcgttttgatatcgtgtcttcttcttcgtatgcaatcgaagctgctgctgcttccgagtttgacaagtacgagccagacgactcattctccgctgaagacacacccaaggccaagtctaaacaacaaaagccaaaagcaccgactcgacctccacctcgaccgattcctagtggcacctcctcgagtaacacaggaaatggatccaactcgatgttgactgctgccgaacagaggaagcagcaaaacaaagatgacaagaaggcggccgaggactgttttgactttttgaagacgatcaaagatgtttgtccagctttctcgtcttgtttgtataccgtctatgctgtacgctgaatcggatcgaatcaactcgaatttcctattcgaaactaaacagaaagagggacacactaccggtgaggatttctttcttagtcttcatctggtcagactaactgatatgataacttatgacccgttatcctttcgtttctactttatgcgtcagatcatccggaatacgatcctcggacgctgtatatacccaaatccgcttggaacaagtttacgcctttcgagacccaggttggtagtctataagtttctttatagttgtcgtcgtcttgcttctctctgaaacagtcttgttgttttgaatctttgtttgatctcgtcatacgctacagttttggaagtaagttgttggtttgtttcatctagctctgagtcagaagcagcatgatgctcatatgcgtatatccggtcatttttttcttcttgaaaattatacagcattaaacaatatcactatgataccatcctgttcttccagaagggaaagttcttcgagttggtcagtctgtcttgcacaacggaacgtcaaaattgatacatacgtgaacctaattctctgtttcttgtatattatatagtatgaaaacgatgcggtatgttgattctgtaaccctcttgaatagtcaaaatgactgacaaattctttttcttataaacttgatcagcaaaccggttttctagaatttggattgaaaatgacagacagagtcaaaatgaagatggttagtctggactgagctctgatacacaaatgagtgtgttgtcggtgtctatattgatcataccattcttttgccggatgacaacaggtaggtgtaccggagcagaatttcgaaatgtggtatgcactatccagactacgccagtatctgtctttgtttgcaaacccgccaattcaagactcagcgctgatcgtcttctcgttggcgtaatccgcgctttgacctatagggctgccaaattccttgccgctggatacaaggtagggcgagttgagcaatctgaaaccgctttagggttagtgactcattagatcctattgcatcttgcccctcttctgagattggccattagctaatctttcgtgcctttgtcatttgtgaactgggtttatcagtgcagagatgaggatgaaagcgtctggcggaaaagcgcagatcgtgaacagagaactcaaacatgtgttgacgaacggaactggtatgtcttgtacttgtgctagctctgtttctcgctcatatcgcaaacctgatctttgttcttctctccttcctttcgtttccctatgttccagtgtccgatccgtcatacctggctgggttcgtcttcgtctttcttcaatcgaatgctatcattacttttcgacgcatagaatgtctgaatttatctctttaaccccaattattagagatgaagctaatcattgcatatccatcaaagtacgttagacttcacttgtgattctacatagctcaccacctctgacgagtttctctgccttgcgctctcattctaatatgactaacaggaagactcgtcgaacctgataaacccatctttcggaatcaccgttctcgatgccgccaccggagccttctcactctctgcatttgaagatgatgtctgtaaaaccaaattggagaccatgttcagacagctccgcccaaaagagttgattcacgagaaggtgcgacagcctattctcctacaacagaacacatggcagaaaggaagctgatcttaatcatctgttgatatcttggggcggtctgtttcatatatagggtaacttgtcggtctcaactcttcgaacgcttcggtctatcatctcgtcgtcctgcgcatggacagcgatgaagcctcagacggattttacgtctgcagctaacacgttagacatactttcagacttttttgccctccagtctgaggggtcggacaaacaggcagtgttgccagaagtcattgagaagtttagagaggaaccactggccatcgaaagtttgggaggtctagtttcgtcagtaaagaaatatttctagttccaagccagaatttagtttggtattttcgtcgctcattgctttttttatcgaatgtatcggggttgggtcggagcacagatatctgaagcagcttaaccttgacaaagatttgttgagccaaaagaactttgacatctacgatccgattcgacaaaacaagtctttgatactcaacggaaacaccttagctcatatcgaggtttgtatcctttctcacaatctaattctgcctctctctatcatatgaaaacatgctgattactgtacactttctcatcccggtttgggccaacgatatgcatttaggttcttgtcaactctgaaggcggcgaggaaggaacattgctcgatctactgcagaagtgtagaacacccttcggaaagcgacttttccgcgtgtggctctgtcaccccttgagggacatacaagctatcaatgctcggtaaggttgagtatcttttgaggatcagcttcaaggactgatcaaatctcgagtgattggtgtgatgatgatgtaggctcgatgcggttgacgagctcatggagcatccaacattcataactgattttagagagcttgctaaaggtgcgctttagtttctaagcaattcaataacttattaagccaggtctaaatttacaaaattgtgttatgatcaggtgtaccggatttggaacgaatgatttctcgaattcatgcaggatccatcaagattgctgacttcatgaaagtgctcaaagtaaccacctgttctcatatacgcatcatcagctctccacgaaaactaggctgatgagttgttcataccttttatctcttttgaagtctttcgaaatcattcaaaaacgcttcgaaaagcttcgcgatatttccacgtcatttgagtcaaccagtgtcgctactctccttggttccgcaccggatttatcatcgtatattgaaaacgttcggacgatgttcacgtttgacaaggacgacggtactctgcttcctgcggatggaagagacgaggcatacgaggagataatacaagagttagaaaccctagaggatcaattagaaggtctcagagaaaagtttagcaaacagctcaagtgagtttgttacattgtgcccatgccgataggtcgaattctgatctatctgcgttcatccggacaggacggaagtcgtgtactggcattcagctcagggacagaaagagagtacgtaagacatactccgaatcaatccttgtgtattgatgagactgatcagatgctgctcggatcttgtagttttccaacttgcaggtaaattgacatttacagcaaaagacacagattgttgagcaacttgactcatattggccttgtattctcgattagtcccctcgtccaaaaaggtgccttcgaactggaccaagacttccggaacgaaggtttgtgtaaaatgcatgatttctgcgctttccttgatccatctaataacctcttgttttcccgctgattataggctcaaaatcgatactacgctcctgagactctgccgattattcgaaagattcaagaagctcgagaaactcgtgggcaagttgttcggtcgttcgtcaacgtaagttcttgctttgaatacagtgatgatatatgttgtttcaatcaaattgaacaaacctgcccttttttttccggccacagcgtttatacgccgagttcgataaggagcgcagtgtttggctttcgtgagtgatatcttctatacattctgttatgctctccatcactaacctcgctggtttttattgcacagttccgtcaagacattggccgagcttgattgtctttgcagtctggctaccgcttctctggagcttgatcaaccaaaatgtcgtccgacatttgtcgattcggatcaagcattcttaaagtttgagtgagtggtcttccattccgtggagcgtgagactggctgggattgcattaatatttttcttctggaaactgttatattcaatcagatctcttcgacatccttctatgtgtctccgggcagattttatccctaacgatgtagagttaggaggagataaggcgagaatctctctcctcaccggtccgaacatggcgggaaagagtatgtattggtttgacttaatctgggacgactttcgcagaaaataaagactaacagtgaaatggcttaatcaggtactcttcttcgaacgactgctgccggggttatcatggctcaactggtatgtcgatctatgcattttcctgctgaaggtgctgttctatcgcgggtggctcatgtctaattcaattttccatctctcagggaatgtatgttggagctgagagcgcgacgtgagttgatgcctttcccctaacttcatgctaggcacaaatatacggtttcaacgctaagcttgttcttgaataggttatcacctttggattgtatcatgacgcgaatgggagctatggacaatatgttcagccagtcgtccaccttcaaagtagagcttgatgaatggtacgtttattttcgtattccattccgattttatcagatcattctttgtctgacgagagtcagacctattgctttcaacatttgtcacacccgaacagcgcaaagattttgcgcgaatgtggacccaaatcgttatgcatcttagacgagttgggtcgtggaactagcacgtatgatggaatggccatcgctggtgtaagctttcctcctatcattctctctcacgcgctatcaccgttccatgagttttaatttctggattttggatgtatggcgacgtgcgtcttgaccggaacaggccgtcttacatcatctggccgggacaacgcttccactcgggttttttgctgtaagcgctcgctctgctttctataattccttgtaccttcactgatacctcactttctcttcttcactgtctatcttgaagacacactatggaacgcttactgatgacttcgcgtatcatcccaatatccgagcaatgcatatgcaaactcaagtggacgaggagaaacgagaagtcacattcttgtacaagctcattcagggtaaagccgagagtagtcacggaacccgtacgttatcttttctttcaccactccttatctttgttagcctgtagttctgtattttgtaaccttctctgattcacgttctcctctgttccttttcaacgatcgaaacagatgtcgcccacctagcaggtgtcccgctggaagtggtgtctagagcagaaacgatatcttccacgttcttcaaagctcagcaaagtaggctctcagcaggccgtcgaacagagttacctttggtcgtccacggagacttcgcgagactcgtaaagctcggacttggactaggcgggaatgaaaaggaggaggtaaaggtaggcggagtcgaagtgtttagatacctgagagaaggaatcaagaggactttagaacaagccgccactgtcggatccggttgatcaggtttttttcctcctttctttccgtctttttcgttccttctctttgtggatctattggtgtatatatatatagccgtttctgtcaggttaatcaaccatagacggaacgattgacaaccaagaaacaacgtcttgagaaaagaagggaaaagagatacatagatcaatctggagagctggtaacaaacttgtcataaagataagagaaacgatagagtagagcaatatcaaacacatatagcacagaacgtgaacgaggagcagacaacatatacaaccgaatatggtttttttcgtacaaaagagattttcagaaaagaaaggaaagaaggtcatacgtagacggtcgttgaaaatgatcaacgtatcccactcagacgacgtggcgtctcgcattggacgacccatgagcttccacctcctccaacgagacgaccgccatatccttcaggttcacttcatccgccttcttgtccacatcgttgtccctctccactacagaccgagggggaggggggcgggaatgggtgacgtgatcgacaggagcttcggtcccttcggcaggaagaatcaaattgaggatgacaccgatgactccacaactcaagtaaggagtagagaccacgatgatcaacgaggaaaggaaaccttgtagagcggcgttcgtgctggtgacaccttcgaagaggtatgtcgtccacgtagggaccaaaaggttgccgagtccgaaactgagggaggcggcgaggatgaaacgatctcgtctggtgtaattgagcatagagagaactcgaagaccacttgtggcaacctgagagattggaagataacagaaaagacacaatgtcagtcgatacaaccaaaaatactgcacattaaactgaaacaagtttgaacgaacgcttgcgaacaagaaagtactacacatgttgaagacaggaatgaatcatgcaaatcaaaacatgagtaaaggaaattacacacagctgcatgaattgagatgtcaaaacgagaaaaacacgtacgtgactccacccaggacggggtaagggattgataagaagacaccactaatctttccaatgactccataaagaatgatgaacgaagcgcagaagaaacccgctcgtctattggctgttatttgttgcgtatcgaacaagagaagagacgaggttagagaggattcaacacgtttcgcgacttataacgaaggcagagatgcgcagatggtagaactgaccacatcgagtc

SEQ ID NO: 2966 - DNA, 16370 bp, Xanthophyllomyces dendrorhous
catcgagtcaagacaatgattccattgttctgagcaaagattgacatctgtaatgtttatgaaaggcagatttgagtggaaggttctttgaagcacagcttgatctgaatcggaaaagagaagagaggaaaaagagcaacatacgggagagacagtgaacgctccggctagcaaaccagcgactccgtccgaaagcacacctccctggattcggctatcaaacacctcgccctctacttctactcgggaagcttcggaggatgcggtgatactatacatggggtttctcgtcagaatttgcgcagacttcattaaggatagactcagaaagtgtaaaaactcactctccgatggcttcgacagcaagtgtgacatacacagccatcatagctattgaaataaaatgaaagaaaaaatggtagatcagggctctgaacaagattggataaagaggaggtctcaagagattactcacgaaggatagctggtccatagatcgaaagtttaaaagtctttacccagaggaacgtgatagctggggatgtggagatgctgcttccgtcgacgtatcccgtgggtccagcgacgatcattccgacgatcagaccaataacgatacttgcgttcctcatgaacggacttccgaaaatttcggtgatgacgatctgtaaagtccatcaaaacgaattttgagtacgttttccagaggagaaaacctcgagggatacataccgtgatgaatgagaggaatccaagcccaatgaattgaggacttccccacagagcgggtttaggtgcagcgatgttgggacagagtgcaaagtacccggtggctggtcttcctgaacagtcactgttgcgcaagaaggagaagatgggggtggagaacgattagagatcgaacgcaagtgatttatctgttggtagatagggacagaacagcacgtactttgaacctcctgcccagttcaagatacctgaatctccaatcaacgcagctccgatcatgaatacgaccgttccggtgatctacaaatttgttggcacaggaaagtagatgagcatgtatcgtcagatttccatcttgtatctagaacatctaaaacagtctagtgagagagaggacgtacgataggcgggaaaagcttcttgagcttctttgcggagacaaacgacaggccgatttcaagaatcgagcagagcatagcttttgtatcacaaccggttaaagaagagacgttgataggtgagccgatggagatgcttacttcgtttctggcccacaaaagaagataagaggaaaaatatcgtacatgtaccaatgagcgctccgtatgcatccgggcaagcagatttggtgacggttccatcagctgcggtggtcgttgaacattttccagagctatagtacgagtcaaagatggcgaaggcgctagacagtgtggcaaaactggtgcccacaacggtgatcagcccggctgaaaagagtcacacgcaaggtagacgaacagtaatcgttgatgtcagcaaaacaggcagacaagagggtgagttgattgaaaagacttacttccaaggtagtaattcttgtagagcctgatccctggattccatgaagagtaacccggttttgttcgtaaataatgatttgggctgataagaaactctcgaaatgaatgaggcacgaacttgacatttgcatcatagacaaaagtccagatgcgaccaaggaggctgagatcatgtaagactgggtctcggcatcgaggttgatgtagttctaagacagcaaagagggaatatcaggctgagtgtcatccaaaaggcaaaagctatgatacagtccgggactcacagcgaagatgataggaggagtgaccaaaccggcgatcatgccgagcgagtgttggaagccggccacgatctatgtgcatcgaatcggaagtcacaagagattgccatcagatttggttgatatcgatcaagacaaacgagagaagagtagattgatctcgagaagtactcacggccagcaataggggtagatcgtcatgtaacccgtagaacggaggcatcctgttgattggcctcttctccccatactcttccaactcgcccaattcctccgatctctcctttgctttggaacgaccaaaccgatagggaaactggggcaggcaaagctctttaaagtcatagtcaccgaaccaaccatcctttgtggtgagcttatactttgcaaactcgtatttggattgaatcgtctcttttttcgatcgctgatgggcatcaggagcggccgtggcagatggaggggtggtgatgtattctaccgacatgataagtcgtgcgaggggagagtgcgtatggctgccggatatgtgtgagagagtgaccagttaatgggaaggaaaggaaaaaggatcccatcgatcagaccaagagtcgggtatttagatgaaatctcattcaatagataagcaagcaatcaaggacgccatcatccatgaaggtttcctgctctgagcgagacgacggcgaagagagaaggtgttccaagataaatttcattcggctagataagcaagcgactaagccgaggcttatcttttttttgactacctgcgacgcaacccatccggtcgaatcggacgagcggcccgttgctcttggtgatacacattttatcttctttccgaatcagatttctgttgatcgatatcatggattctagtggttgatatcatagatcttggtggatgcttcaatacacgtggccaacgttacagacagaacatgtgtaatcatatttcatttatcagatgtggatgccgctccttttcgtccttcttccgtaggtacataaaagagaagaaaactatgaagaataggcgagcgaagcatcggccatctttaatgctccctcaaacgttttgttgccctgttgataggtaggtaggtagtcgtcttgggtcagtcaaaagcgacgatatttaccgtggcgcgaagaaaagctaagagaacaaaccccgatgaatcccgcggcatggcaaaagatgcaaccgtcgattccaatcagaccggacagctcttgatctcgaactcctcgccatctaaaattgtcgtcacggtcatccgtacagatgagtcagttctgtttcgtcaaaataatggttctcctttccaaacatcgccaagcgtccctatcttctgatttcaccaccctcttcacgttatcacagaatcaaaacattgactcacggctcgggcatagccttcctcgactcgaaactttcgcccgacttgggaatcgcctggatcctccacgcgttggcagcctcatctgggtagagaacgtaaagctgtcgaccgaattgaaattgtcaatagtgtaggctctttgagccccactggctcgaattacaacgccgaggcgccagggcgaaggtacgtaccggcttatcctcatctttgataccagcatcctcctcgacgttgaacagatgctccttccagggagcaaagtcttcaaacacaatcacctttccgctcgggtggacggacgttcgcttctcgaacgcggcctgcactagcgatcgggcgggtagccaggcctcgtgcaagtacgagagtttgctgaggaactctgagccggtcaaagctgaagccacctggaacttctcctatatgtcattagaaatgacagaacagacagaactatcagtaggaagaacacatctagttttgggatgaagaggatcggcacctacgtcaagaatcgagttgtcagacttttcattccatcgtgggttcagtccaccgactcttgaactcaaatcggtgcttgatctgtacctggccggctcggaggtgacatattggctcacgccgttgtcaatcccatcaatcgcctcaatgaaggcctcatatagcttcaggtgaagcgtctgaatcgatggatcggacacaggcacggaggtcacctgggacaggatgtcctttccaaagtgtctttttattgaaaagaatagaaaataaacacatacatacacacatacgttgtttagacgagtcagtttgaaagatgacaaaatatcaatccaagattggaaaggacagacttgtagacaaggcctgcggaggaaagcttggtgttgaagccttggccaaagacctcggtaaagcctcgctggtgatgatcgtatcggtgaacagattcgtcgtagactcctcctacatccacaacaatgtcgcaagtatccactatctcattaaaaaagacacatcaagccgaagcgcaatcaatatcatattgagcttgcccggttggtcagttcaaccaagagggcaacttacgagtagcgggatctcgggttctgacgacggctgagtaccgaagcggttagagttaggcatataattaaaagatgaccagtgccaataagataacgatcgacgtacatgcatccttatactggggaagaagcttgagcataaagacctatcgaaataaagctcaagcggtcaacgtcgaacctcgcggcatgtatcggaagctacctgtcgacgtacagcaagcgcctcatcacagtgaaaggtaccagaatgagtgccgatgaccttgatttgagttttgaatcacaaacagcgcacgtaagtgatcgttcccaggcaaagggaccagaaaacatcagaaagcaacgcccaaaacgagccattcatcaagtcagctatgaactatgaaactatctcagttctttccagcaaagcaagcgatcataacctaccaaaggttcacccgcaagcttggccttcttctcgatatgaacagctgacatattacagtggcgatagaggatagatggtacaggtcgatgagcagatgatctgatgatgggtctaaaggacatctatccgtggatttgatggaatttgagactgggcgcatcaacttttgatccatccccaagcctgacgttaaactaaagtttgatcatgtcagtcttacgccattctcggttaaatccaacctccacttcttacggtatatttgatcttgactctctgttctacacgcagactggcatctactttcagccgtcttttctttcaactcgatcctagtttctgttgactttgtttggacaagaacaatgatagggtccatcgtagagaaaccttcatcttcgcctaaaccgccgctgtttgtgccgccttcggctcccactccgggcggcttcccccgcgcggcacaccgttccaaatccacttcactcttcgcccaagcccgttcgaagccatcgccatccaggcagatccaagctcctgttgttcaatctaccatcccaatccctccacctcctcgctctcgatatcctttggagagccatcatgaccaatcagtctccgaggaaagaagaatcatcgagagcgcacagagggagaatgaagagcgtatagcggggatgagtctcgacgagagagagcaggaagcaagagagctcgtagaaagattcggaggtggtttagccgatctcttaaggaaaagacgagaagctcgagaggctaaagagaacagcaatgccacttccgcctctttgtctgtatctcaggtctcagtggattcaaactcggacgagccaggtgcgttgagtatgacacatcatatcatttgacgtacgcttatgatcttaaattcttccttctgcagcgagttcaccgtctattacagctccgaaagagacgcaagaagaaccctctgtctccaagacgggtatgttccttctcacgtatcattatctctcacgtggttgaatcgtttcatgttgtccttacacactcgttcatcaatagttcggtttgcaaccaatcccgaatccatgccggcttcgttccaatcaacgatatcgaatcaacccatttctgatcctatatcgcccgaggatacgcccgcctcaattctcagccaatacttccctactgataccacttatgatccgtccaaacttgaatggctccaaccacttccttccaattcgaccacccttgctccctctgcgccttcttcgtcccgatacgacctatccggccagccaatctcaatatctcgatcagcctctctgcccacacatctagggctccatcatcatggagatgatcctggcctagcaggctacactttggatgaggtccttcatctttgcctgtcgaccagcgtttctcaacgagtagctatgctggacgtcctctccaagattgtcagagtatccgcccgtctggacacgaacggaatactatctcaaggcgaagaagctgcagaagctgagagtctggcagaaaaagctctggagatagctggtcgatcgttggaggaaggaagaggaggagtcaacgttatctcccgagggatagaaatcatttacgaggttcttgtcggcagcggtgcacagggagagggaaaggaggaagaagatgtcgagatacatgaggaagtgatagatggtgttctggctcctgggctagaagggaaagatagatcaatcctagtaagactgccaggacttattccgctcctggtagttcagctggggaacccaggattgatgtcaagaacaaaccatcaactactggccattctagttcgaatggcacggctgcctgatccagttggcgatcttttgctctcttcgtcctccgtcaattcggtttcctcctcatcacctttgctccagtcaatattgcgaaacctctcagaatcccacccagaccctctcaatttgatactcctccacgcactcgtcgtttcgtcaaggaaaaccgctgagcggctgacgaatcatccttcttctcctttacccgctctccttcggtttgtcgcgctcggttcgagctcaccccacctcttgatcttggctagactttcaatcgacatctattcttcgttaggacggtatgggcttttatcgttcatttgttcagatggatcggatatctggcgcaatattgaaatcactattcatcagaatcttcgaacattgcactcggctaccccgtcttggccttcagtttcccatttggcactggccaggtctttttactccttgcttacaagttggacagtctgcgcgacggatccacatcagacatcaccagagcatgatatcacttggtctcaggttcaaggaatgggttggttccctgatgcgcttgtcgtcttgtctgggcttctgtccatgccttggtcttcaaccggtgatacagctaaagcgttcttagtgagcgtgatgggatttgtgagagcttggatagaaggctcaaaggtgaacgaaccgaaaggaggagaggaagtcaggctgaaggttggtcagttggccgggctacaggtagacaaggcggaagagcttagtcgaatctgggctgggtccgtacaagcggaattacagaagtctgaagtcagttggtcgaccgtagcgaggactatccgtctgatggatggacttattcgccttgtggatccttctcaagcctccatcgaaaagctggacgagactcttggccagacgttcgatgtgcttttgacgttgtcttctcattggtcgtctaaacacgtatcattcctcgacgtccgaccaatcacctcgttcttgacggcatacctcctccacaaacgctccttccttccaaccgccgactggctgtccctcgctcttgatgtcctccgactcctggtccctggagatgaacctttggctcgttctttattggaggtcgtatttgcgctcgacctgacggaggttcctggtggaaaaacattattggatcaagttggacatcgacatgggttctggatcttggaaccatttttctactttgtgacctcaccctcagaagaatctcatatagcaccttcgttccctatgccgaggacgttgaagcagatcacttctctacgacttccttccgcccgatcttcgacctcttccccttcctcttcgtctcaccctcagtcaaagtgtggtctaccgctctccccaacatggttcttcagcccaatggatgaacttttacattcctcttcatctagagcttttgcttctgcccctccatcgtgggacgcttcagaacctgaacttgtccgagccactctcgcgtttgccaggcttgttcagaccttacctcgctcgtcattatcatcgtctaacactacagacaagaagaacagcagcatcagcaggttaaacccgagtcaagtgatgtatgaatgtatgaagatcttccttctcgagaaaggggtggtcgctccgcttgaagaaccaagcaaagacgaagaagggaaagaagtctttagggatccaggagtggaagctctcgttagagatctacttaaaccgagtttgttttggtcgagttcatacaacccacctcgttcgagtccgttcccttccggtttggagcaagcccatgctctgtcttctatttctgccccatcatcaacgatggcgacaacctcgggaggacaaggaggccagacaaaggactcttcgacacctttcttccagacatatacagacttccacgcgttgtacagctcaatctcatacgctcacccgatcttcagttcgttgctcctcccgcctctggcgatgggctacgaaaaggattacagagcgctcttctggaacggagagaacgtagggttactccctgggttcaccactcaggttgcccatgtcctttgtgaatacaacgctacccaggatgataacgaaagcagcggaaagaggatcgaaccgtacttctaccctcaagagacgcaaacagacattttaggatcatacctccgagcgctcgtccttccgttgaactctacccaagggagaccaggattggacagagaccgaacagagtttttgtactgggtagctatccatcatctgacttctgccatattttcgccagagtccgttgttcccaaggcggctggtacggaggtggtagtggaaaacaggaagagacatccatcggcccggtcgtttttactcgctctactcgagaaagccggggacgtcgttctttccgatctcgtgaaatacaaccagcccgagcgttcgatctctcaaacacaatccggacagcgatcgatgaggttccctccaggatgctatgatctctcaggattatcgtcctctgagatcaaagctcgactagacctggtgagggggtgggctggagagagaggcgtgagcaggatcaaggatgtaggctttggaagagacttttcctaaaatcaaaggcgagatcgcattcagactcgagaggaagatcaagagaggttgagtgatttactgtggatcaatttatgtcacttttccccctcggttatcgataggaccggaaagatgatgcatgtatgaagaggagaagaaatgcaaatatgaagaaaagtcatatcctcttattgctgagacatgatgtttcaaaagagtatataaaacgggttgggttgacgagtacatagctgaacagacaggggaagacgagtcaaaagagagatcgttcattgtcgctttgtatctgcgttcaaggccataccttgcggttcacaacaaatagctacggttatgcatcggataatacatcgatatccaagatacaagaacaagctagtgaacgggcaaaagtcaacggccaggcttgggatggagatagaggatgatgaggatgatgaggatgatgaaaaggaggtggtgaggggtatcatatatgtaagtatttttttgtgttttcgtatacctaatctcgttccccgtcagcccccagaataagagacaaagcggatggttaacattcggttactctcaaaggaaccggttataaccgacaagggtatcgtagaactcaagagaaacaagaaagacaggaacaacgcacgacataactgatcgacacggccggtacgacttttgccaaattgacagtcaaacctctatagagacctctccaaccttctctattgatcgtttgttgggcgacatctaggaaaccgttgtaaacctggggatgacctgtagagcctgatgcctgaagtttcgtccggagaaggttcatcgctgtggttgagcagggtagagtacaaaggttattcatgcaagatagtatgtaaacaatatgaaggacgaaggaaatgccgtacgataaacactggtagcgccgacccctccagagatcgcaccaaaagcgaggacggcatacgtctctggctcatccacattctggtgtctgcagtaatgtatttttctgaatcaaccgttcatcaatttcccgagaagagcaaacaagcagagaatcgagtgagcaagactttttcctatcttctcaagcaactactgaaagagaataaaggaaaacgtacagagtttcaaacgtgctcatatcgatggcagcataggggaacacgccaaccaagccaagctggatcaagtataaacatgaaaacaaccccggagatcaaaagagattcggccgttagtacaaaggtgcctaatgtatatcttgttttcttgatctgaaacagagtgatgcattgaaaaaagggaacgaaacgaaccgtcaaaccccgataataccttcttactcctccgttggcccacatcgttgctgccgtcttcagcaacacttttgcgctatgatcagatcctgctgtcgtcatatgtgccgttttcagtgtctccagctttgtagccaaacagaccaaacagaaagagatatcaaaaagccatgagccaaaatctgtaagaagagaaggaaggaaaactcaagatcgacgtacagggtagatggagaattgactggcgattcctccgagaccacctgccaggaacctagaagatccagagatcagagacggatcttcgacatcatcccagtatcgtgctaagagtcgtttctttgttcatcaaattatgatggatggggggagggccatggttagatagatgaatggatataacaatgttgggctaatcaaatagggagaacaaaatatattagaaacccaccgaggattcatatgagaaaaacttgatggcagattctggcatgatcttgattctgtttcgttcagttgaaggcaaagtgcgcgcgaattgttaggtgtcatgtctagatacgattaaacatatgatcagaggcaacaagaaagagacctacacgttcagtccgtttccgacccagaacgctcggagcccaccgccaccaaagtagagcctcatgatggctctcttaagattctggtacccagtatgagcgcctgtcgttgacgacggcccacctgataggccatgagagtctgtgatgaggaatactttaagtctgtcgaacggggcggtggcagtccgggagactgagaacagcgaaacgtttgttcgatgtgagcgttagtcgataatcagaatgcaaaacgaaaaagagggggcgacatactagcaccggcgacacctccggctcccaaaaacttgacggcgaccaacgcgctcaaatggtttgcgtcttcttcctcttcctcctcttcttcttcctcatccgtatcatggtctccatcaaggattgtttccgaacctgaggtttgacctgctgatgttgatggagaagtagactgaggtgactgaagatcagatgttagggtaggttttgatctggatgctgaagatattgttccggtagacaaggtaggactcgaggacgacggtgaggaggcggatgtagatgaggaggatgaagaggaggcagaagaagacgaagtagatggcaaacttgggaaggacggggtgatgtccccgtcagaattcaatctggctgcacctctaccatcagtgatttgctttctgtattgataaaactgtgtacagaaggcgcagacggggcaaagagacgcgcaagtgggtaggataggtgaaggcgaaagcgagaagcgtatgcgttcgttgtcagcttctccagttgaatgaatagtcctgatacataggaagaaaaagaaacaggaaggtttcgtaccctatagaactctggaacgctagcctttctagggaggagcaagaacatgtctctaaattcgatccaccggataccttccggtgtgttttcacctctggcttgtctagactgctcgccatgggttaggtaagatacaaagtcctgaatcgtagctggcgtgagggagatgtctatgaaggaagggtaccagagtatgaatcgatcagcaatttaggctgatgatcgtcatccgctggtgacaaagctctgcacagaggttaaggcaagagagggcctcaccagcacgagcagaagcagcctggatctcttgaacatcgaggaccccgtcttgatttctgtcgagatcctggaacgcatgccatagttctggatgacagaagagaaaaaagtagggaaaatgatgcacgtttcagccggagcatccttatcaaggaaacagatttgatgctaacaaactaaccagcctctctttcccaaagatacgtcctaaactctttccagtccaacatacgttcccgctgtttcccttcggatgtcggtgtctctgatggttcgtcatcttccggtttgagtccctctccagcaaactctcttgcctgtgggtttgtcggaccgagggagcacctccgaacgagctcctcttggtacattgcctggagaaactctgctcgttctggcgaaagcgaggcagaaaagccgggtgaaggagatgtggtcggagatgacggtgcggatgaggaggaggaggaagaagaggaagagaaagagaacgttgagctaagaggattgagccagctggagctggcgtttgagtatctggacgatggacctccggacggtggtgcactctgggttgaacctgttggtgttatcactgctgttgctgctgctccagctgctcctgctgctgtcgatttcgaggtcgacttgctggcctgctccttgtacgggatgtttgcccatagttccctcagctttttctcccttgcatgtttaccttctctggctcggaaggcggtcagctcggcgggcacgcccgctcgcttctctgcgttcgcacacggtagagccggtgtcggaccgtttcctggagacgacgaagatgaaatagaggaagacggtgttgatgacgatgacgatgaagacgatgatgatttgaacatggcaagacaaagagggctatgggtgtgtgtgtgtgtgagatagatgaaagaccggggggagatctcacaagggagcagggcgaagcaaagaaatgggatggccaacggaatgaatcaaccgagcacagaccgggaatcatcgggccaagagtttattacgaaaatttgtagtccgcattctagtcgggcggtgcagattttgtagtgtttagcgggtgcggcgtgcattagaattcagactacggagcgactacaggacgagtaaggattgggtaatgagcgagcgaactatgattttgtctcgagtggactacagaatgtactaggatggtttgtagtgttgccaagaggcgtgtgtgttcacgtgttttgtgtgaggctgtgctgccctctctagctctctcgctacagattcctagtacacttgcctaatgaacttttttgttgtctaatagaatatttgtaatgcttttctggtggattctcgtagtacattggactatccagcttttccaatacaaagttggtgtcttttgtagtctccagtgtagtcattttgcagcctttttttgtagtcttttttgtagtcttttttgtagtctgtcttgtagtcatatcccacttactttgtaaccttctcgctgcgttcttcattccgcccattccgatttctctcctctccgctttccctccaacatcctcaccgatctttgctcaaatggtgtttgctcaaaggacactcggtctctcacacaggtcagtgttttgctctctgctttcccttgctctgtctcgacctgtcctcatcagatctttttcctcctgtgttgcccgttggaccggttcaggctactcgccaaaagggctttcaacgttagatctcgtctttctttctctcttctctttatgtcttgatcctcctttctatctgttctgcttcttcgttccttcctgttctctatatgtcgctctcgctctccttccttcggcttctctcaaaccatcttataaatcctgcagtccggctaagatagtctatcttctacctttttctttcccaaatccttaggcaagccgaaccccactcgtcctccgatcagcccccattcttgcaactcatgccagaccgttctctctatggccttccagttccaagcctgccgagccgctcgctcctgcagacatagaatctagtgtggccactccggtcaacttgccccaacctccatctattcctacctcctccgtcagttcagtcgcttcgaccccttcatccggtctgatcactcccgacgcgtcccccctgggtttggagtccggtgtggtggacccgctcatggaccttgctaagctacccctccactacggagatctcaaggctatgggtctcggtagctggtggccaaccggttggatccaaagtgctttcgaggccattcaagtctcaactggacttccttggtgagcttgttctatgtccttccgcttagaccccctagcacgtactgtggtagactcaacttgtcttcctgttctgcctcctcaggtgggccacgattgtctctctcacgttcgccacccggctggccctcttcccgactttcatcggctctatccggacggccgctggcatggtccgaatccagcctgaaatggcgtcccttcaggaggccatgtctcgagccaagagcaatggggataccacatccatgcagtccctggcgatcgagatgagagacctcttcaaacgacacaacgttaaccctttgaacgcgctcaaacagccgttggtcactatgcccgtcttcatcagcatgttcctcgccctcaaatggatggccgagttgccagttccccagttgaaacttggaggaattcccggttggtgtaccgatctcaccgtcgccgatccgacgtacatcctgccagtcacctcggcagctgccacctggcttgtcgctcatgtcggtctctttttattttctttttttcttggcaacccctcctcttttcaaggtcatcctgctatcagatcatttgctgacacacgcgcgcactcgtctctgctcgtttccgtcttgcttttcttctctagtttggagcgaacggagcgcctcacagtaagcagccagatacccagattgccatgtccggtatcatcaagacgatctcgatcatgggtatccccttcttcggagggtttaccatccccgcggccatccccttgatcggtggcatgagcaacgctggtttccctgctgtgcgttctgcttcttcattgtcaaatctcagcggaattcgtcggttgactgaccttgtcttaataccgtcgacgtttgcaggccatcctgctctactggacatgctccaactctttcactttctttcaatccatcatcctccgaagcgatgccgtcagaaaggtactcaagttggagcccgtcccggagaagcagccgaacgatgaaaagccgttgacttcgattcaggccatcagaaagatgatgaagcctacgatcgaaaagtgtgtttgacatcattgttctggattctatcccttattttgtttcaaaaaaccgacatcaaatctgactttcaattgattcgctcatttcttgtgttttctttaactcaggttcgagcaacagaaaaaggcgttggacgaggctcagagtaggcaagccaggtattctaccaccgccaggttgagcgagaagaaatccgtctcggacgcactgagagaacggaagttagcagaggaagccaagcgagcttccggctcctcctcatcttcttccgcctcgccttctccttctaccgtctcggccgcggctgcggctgcgggccgggcgaatccgttcgagtctccagataaggaaggatgggatactgcttctgtcaatctttccagaccatccatccagaccatcactcctatttctaccgctacccctgcccctacccctagcgctgcttcgacaagtggcaagagtgaaaagatgattgagttggagaggcagagaaaggagattcaggagagaatcgataagcttcagaaagctctgaggaagtaagacgagtcggtcggtcggtcggtcggtcggtcggtcggtcggtcggtcggtcggtcgatcggtcggtcggtcggtcggtcgg

SEQ ID NO: 2967 - DNA, 18112 bp, Xanthophyllomyces dendrorhous
gtcggtcggtcaggtaggcaggggtgcttttaaccagaagaataagttctctttgcatcttttctcccaagagatagagaactatggattttgttggtggggattttatacaaaaattacgaatgtctgatgttctctcttgatccacaataaatatgagagctgaaaagatttcctaagatttcttttctgactggcgggccgagcagacaactcgtctcctgataaacaagataagcaaacaagtcgtgccgacagagacaagagagcgaaatctgaaagaatccaatatcatcatttcatccgttcataacaccccctctttcttcatctccagttggtgttggactcgactgcacaaactcgacccgcatcccttcgaccgatccgccatccgataccgaatctcgactctcggtctcggtctcggtctcgtctccgtcaacgctcatctcgacttcgactggaagacccatctcggcagcctcgatttcgtccatcgagctgagctcgtcctcttctccctcgagctcctctccctcctcctcgtcatcgtcatcgtcatcgttccactcaaaggactcacctccaaattcatctctgaaacccccggggatgttctccctcagacccgcagctattccattgacgaactcatcaaactcgatgacatcctcttcacctacttctcttactgtctcgtcaaaatactcgatcgttcgccagtcagggtacattcgccggaactcggcttgagagaacatctgagcattggcttctaccaatgggttcgatctagtcagactagaggtcgatatgagtgccgacgtcgatacgagtggtacagaggtgtcggaggtagaagaagtaggtgatggacgggcaggtcgggatggaaagagtggcgagaacggtactcgagaaggcggggttttaaccggtggctgatcgctcgataacgggaacggcgaatgaattagaatagactgggaacgcggtttttgtttgtttttttgtttgattaatagatagatacaaaagaaataggaatctcagccacagatgctagatctcgaggagggaaacggaggtcgcatcttatgaggagaaagtgaaacgtacgcattctacacctgcgctgatgaccatctgagcgttcaccggatgaagaatgcagctgttggtcaccgacgcatgacctaaattttcaaatgaccccgaatagatgaaccattcatttgggtgtgaggaaagcttgaagagtcagtgtcatatcctagacgcaaagatccagatctcgatgcaagtcatgcgcggccggatcatgagaactaacctccgactctgaatgccggccgatcgagttcaacaggaaaatacacattcgatttggtatcatcctttgtgtaaccttccagcaaaggaaatgaagaaccgcgttcgtgatgatgatgaatacaaggagcaacttgaacatcaaaagcaaaaacagagaccaaccaatctttttagagcttctcccaccttgatcaacgatcagcggtcgggtctggcgttctctacgttcgatcagttcttctaccgatgggattttccctatgtccgttgacgcgcgcaaccaggccatacgatgagtctccaagttgaaacaagctcttgagactgttcgaatgatatagactactcacatccgtatccctggtttgttccctcacgcatacgaatcttccgtcagttttccaagtggtaaacatataaggaaagaacagatatggctcacgtggaaatcgtctgagccagtcgagtagatcaaatctcctcctgcacctagatatccaaaagaaccatgctatgtcccatgttatcaacgaccaagatgccccatcagcctagaatctcacaaagcaacacaaataagacatgaaacaaaactcatccaaaccttgacggtacatctattcaagtaagatctttctccgttctcgaacctcaccggctttccatcgggttgcttctttcccgacaaggtagcaatcggcatttcgtcccctatcgagtaaagtgtgggcaaatgcctctactcgccccacagaccaaatgaatacgtgttatgatgcccatttcgaagcaggaaactcgtcatgtaagcaagaaaagagcgtacgttcatatttgtggccaagatatcacctttgggcgagaaccaaacgccggaaaggtccggtttgaccatgttctttgttcttgcagtcgtcaatgtcgtcacgtactaaatcgaacaaacagacatgcgaagaaacacagatgagatgtctcctcatggtaggcttatctattttcagatcgtaacgatcacacatacctccatcacacaattcgaacgatcgttataccttggtctttgaccgaacgaccaacgaccacccattggcctcacggtcgagcttgacggacccccagaaaaactagaccttagatcgaacaacctgcagatttaccctcggccatgtcagtaatcgtgcgcaaagtaagagcagactgaatcatgaaagggagagtaaggaatggagaccaaccgtaacccaccgctttcgtcacacgcagcaaatgaattctcgacgacaggactccaatcaacaccagagaagcttcctcggttgcctaaagaatggaccaatgtcgtggatagtctaaaatcatgaagcgacacgttcttgtcctcacttttgaacgaaaaatattgtatatcagcctgtaagtaatcagacaagatttcgaaatagtgaacggtcgttacctggcagagagtaggagatccggtctcgaagggtgacaagccaatgctctgacagctttcgtattgacatttactctcctacaaggcagctcaggctcgacatctctctttcctccttcagcaaatggagtcgagaatcgagtgagatcatactgaaggatgaggccatcgatacctgaggagaatagatgtgtattatccgacgagaaagagagcgtgaatatgtttgcctggatgatgacgatggtatgatgagagggtttggttcagacgacgaatacaatcaccacaggataggccagaagaggagaaggaggctcactcggtgtcctttgaagatagcagacggtaaaccagtttcaggtgttgataaatccgaatgtaaatcccatagtagaacatccagatctaattttcagaacctccagcaatcaggatcaagtagttcagcccaagacctgttctcgttcacttctagtccatgtgataaatcgataagctagaagaaagaggaggaaacttaccgtcacctccagaagctaaccaccttccttgtcctctcgagatcgagattgcattcacacatgaggtatgacctttcaatttcctatgaatgcatatcgggggtttaaatcatcctcagtccgacgcaggaccattcttgtacatagatagaccgaagcgtacacagagtatccaaacccagaccgatcgaacgctcgttcaaggacacccaatttagctctttcaagacgattgtgcgaaggtgggaaagatgatagatttgctaataaatccattcttctcttccctctctatccctttattatctgacgagtgtttgacttagataggcaattgctggtgatcagtgtatcctatgaaggataagacaaagagtagcaaaggaagtatgtgagaggatgcgaaatatgccctaggatgagatggtttaattcttaaccgctttaaagatctaatctctctttgcttacgtcacccgcggcatttatccactcttctcccttccttctcttttctcttgcggcctgttgtgagagccttgaccagtcagttcataagattgcctcatctttgaaactcagacagaaaggattcttatacgtctgacaagaccatgtactaatcaagaaccctgtatatagagataataagaattggaaacctgctaagcaagggtttacggtcacacccgaagtggatcttctttctcaacccatctcgtgagtttcatcaccttacaaaaggagctccatcagttcagaagattatagaacgtcacacactacagatactattgggtaagaaacaaaaacccagttaggcgacctaaaaactaccaaggagaggaaagaggcagacacaaagaacccggaaaacgatttgcgtcacgttgcaatgcaagatcgtgaaagtaggaataaatctgatgtaatgcctggcgacattcaaggaacgcgcttgcaagtaaattacaggtcaagagtgacagattgagaagatcgatcatgaaccacacggacggatggaagaagatgggcccgtagacgtataaggatgagcatcccagcaaagagaccaaccgtatcctctggcccgtaaagaaagagatttgctaagaggaaggggcaagcccgatatcgaatgtattgaaatcggaacaccaaaagtacccagaaaggcgcgaacacgcgtggctcaaccgtgttttagcccattgatccggaaagatagaaagcccaagaggaacgaatggcaaaagagagtggaccagaagaggcggaaatgttcacgcgtcaaccaagacactctcgccaacggcagattcttcaagttcgtctggaggcgacgccggcacggaagacagcctggaggaatatgaaccgaatgaaagaggccgactagaactctttttgacattcgatgatactttctctcctcctttggtatctttctcttgcgaatccaacgcaggtccgagttccatactgaaagaaatcgactcaaccgaggcaatcataaaatcctggtcctcggcttcggaggaagtgactgaactggcgagcgatggggtagaactattggctgatggggagaggctgtcgatagatgaatccgagctactgctgacaatactcgagaaggaggaacttctggaccgtctcgatgactgatgactggttgggccggtagtaatattgaaatagcttccggaatggccggacggttgagagacaggtactcgtgcagaaggcgattgaacagaagtatgtcgagagtgcatcgctctctgatagaacggagatgagctcgattgaaggtacagcgagttctgaagtcgaacaggaattggaccgggaggcaaagatcggtggagaagcgctgttgggcctaggggcaatgtcaaagacttgttacgccggactatggaattcattttggggggtgaacggaacaaatcgagagattaaatcagctgctgtaggatgatgaaataaagggctgtattgacggaagtaatgggcaaaggaatagggagaggcgaagagatcatgcaagccacgcgaggtggctgatgtgtaagggcaaagtaaatatacacgtatattatttcgggatagccatagaccgaagacgcttgccgcgcctgctttgactcccatccatgaatagaatttgaaagaccaggtctggtcctatccagtcctgtccctcctcttctcagcagacctggactgatacgtagaacctgagagcaaaggccatggaggcatgataccagcatagagatgaatgcaaaactcacggataggtgctttgttggtaacagtgtggcccatagggaaagtcgtttcctgggatacagacagaccttcggattcggccggtggtaggagactcggcctatgggttgacgagatggagaacgaattattcgatcttagtactggtcgagaggatggtagagagttagatgttggaggtacagcggttggcataatcggttgtttggttgagtgagtgtgaacgcgagtgtaagtagatgtggcggaactagccgaaatacggtttgagcgtttcaccaaggagaaatgccaaaagctagtccaacacggatgatcaggttgcaaacgaagaatcaaggagatgatctctgaaaatacgatgatgaagaagataaacaggtatgatctgtcgaaaggtagatgaatgaatgaatgaacgaagaagagcaaggtttgtctcctccatcttgaagagaaaaagaggaggaaaatgaagctgaaggaactcaagagtttagaccaagatggataaacatacgcagcatccgcttgagatcggccgcctcgaccggatcggacttcctgtctacaagctccggccaggctttcttctccggggctgggcagtgagatgccgaacggatcatgccgaccgaatgcgccggcaaataaatagccccggggctggtttgtaacttctcttagttcttgtaaaagaatctgccgcccagtcatctgttctctgtgcctgttgccgctctactctctctgcttgagaagtcaagtgaaacagtcggccatgtggtaaagcgctagtcttccttaagggatgtgatatgattggttgaccagaacaaatcaaaacgagataaaggtggattgaacagtgtagatcattcgtcattcgattagtggcggcatgtcttttccatacggtaatgtggacagtaaaacagctgcggcatcgtgtgcacttgacgttctgaggtctgtgcatcgattggaaggggtttcgggcgagtttctcctgtctgaacgtttggactcgatcgagattgactatacacacggtcttcgagcacaactgaattagttgacatcgtgaatgacatcagaaacctcagagtcaaatgcgcatgcaacacaagtgatccagctgtgctcgaagaccgtgtgtatagtcaatctcgatcgagtccaaacgttcagacaggagaaactcgcccgaaaccccttccaatcgatgcacagacctcagaacgtcaagtgcacacggccgatgtcttgcagggcttcagccgcttggcctccacgatgtcgatcttcgtatggatccagcccatggctgtatcgtcgtcttggtcccatgcttcctgcgctttcggatggctggcagatggccgtggcctctcaccaataatgaccgtccagagcttcatgtttcaagagcaaaacggagccggctctcccagacaccatagtcgttggcaggatggttcggagggtgaagattctcgaagttggcaaacgacgactcggacagctttgtgtatagcggcacactcgatggctctgggtcagtgggctcggctggcttgacatcggaggacacatctctggtagtagagtaagtcagactcttaatctaacagcaaatacagttttgtagagctgtagaatagaacaaaacacaattccaaattcagcgtcaacgaaacgttgttggtaaatgctgaggaaggagaaaagaaaaggacagagaaagagagaaggagggagaagaaaagaagtcgaccagctggcagagtgcgctagctaggtcctaggtacatagatgataagcagaaaccaatgcatcatattcaagcattctcgacagttacaagcatgttacatgctgttctatcacgcttcgaaaggagagcatattcactcgcatgttccactactcacaccaacgagaatcagctgcggtcccaaccctaattagccaaactcacaagacagagctcaaaccaaagatgaaggtcttcagtgcatcgagctccaagcatcgccatttctctctgagagatccggaaccagagctgattagccgtgaacagtcagtggtagtcaagaacatcatgtatcattattgattcactttgtcttgagactgcaaactctagttctatgaggtctttcagatcattgtttttctcagatgtatgtcaagtgggcagcgagagatacaacactcgctcgaataagtagatctgtggttaggcaggacagagcatgagacagaaaagcagaaatgagcggagtaaattaagatcatcttgccttatcagcacgagcattggtcagatgcggacctcaacacagtcttgatggaggcacgatatggatgaatcagtttcaagaattgaataagtatacacaacgttgaacgctcttttctgtagatcatgtggttgtagtagagcggagactgagaagaactggagaagagatagctggtcttgttggttgtgtcatcggagagagcgggtcatggtatcaatatcaggtcaccctaaatgctcggaagggctttgtagtaaacatccgttggggcgcaatctgatcttctaatctcaaaacaaacaccgtcggtagcaaagaacagcagtaccgttcaaacgtcgtcaccgacgaagaaccgccttaccacttaatatgatatacactacttgggtgataagcctaatttgagtcgccgcttagatcaagaaagatagtttctctgatggtacagctcgggacatcgagcttgctgatcaacatgaggtaacaaatagaccttagttaaacccggtcttgtaatgtacatccctacaggtaggtgatggcttttagaggtatctgcagctcacatcgctgtattacgctccctcagagatgtgtcacacaaaccatgtcttgtcctgccactgagacttggaaaacgcatacctagaaatcatgaataatgttctcaaaaggacgtatctcccagatcgaatctgcctcttgacgttctatctctaggcatatctttaccgcaccggttcaaaaggaacatcgtgtcttgatggctaccagaaaagaaggatgatcgaagacgtcctacagtatcacttttaccatctcgtgcagaccctgtttctcgtcattatgaattagatccttgatctccaaaatcgatcccctttctcctatgtctctactcaatcgttgatgtagagagcaatgctgaaatgagaatgagagtgttgacaaacagaagagagacgggtttgcatgtacaaaggcaactacccatccgtatccgaacaaaggaggcttgggaagatgctgattcagctgtagatttcatattgcttcattttctagtctaaagttcgagattttgtgaattaaaagaccggcaaggtcaactgaacatcttccatcggtaagagattctccggtcggtgtattttatcggcaaggattttaaagtctttccctgaactccgtcccaaaccagtgaataatctgggcgatagtaccccttgcaagtgttcgattgatttatgctgaccaaatagacatgacctgttcttgtttaacatccactctcggtctctgtttctttccctctcttaacatcggttgagtgctcggtttcatccaatcaaagcatgtccatcttctagcgactgctttgtctctatatccgctgaaccggttccgccggtccgaataccagagatggtaaggaaagatacggataataggaggaacagaagcaaaaaaaagacgaaaaggccatctgatgaatggggtttagtgaagtccacttggaaagatggtcttcttctctctgtgaactcgtataaaagggatcgaaccatgaggttcagaaatgaggttcttcacttttctcacataatacatcctcctcaagacatttcatcgcttcgtcatgaagttctcgccattgttgatcgttgcgaccgcgacatatctagcttctgcatctccgttacttcatgctcggtttgatctaacccagagagcggacggaacggtcgatcctcatgatccacctgaagttcctgcgaaccacaccttccctgccgcgaccggaggtgccggttggaaggacgcgttcgaaaaggcaaagtctatcgtcgaccaaatgaccattcaagaaaaggtcaacgtcacttctgggtaagaacgtttcccagtttctttccagatcgcaaggctctagtgactgactcaatcatacctgccttcgactagtatcgtcgggccttgtgtcggaaacaccgctccggttcctcggtttggaattcctagcatgtgtcttgaggagtgagtgaagccttattacatgtttcgcatatgatgatatcattctgacagctcgatctggaccaattaatcgtaatctagtggaccattgggtgtgagacctgttgacttcgtctctcaatttcctgctggagtcacggtcgcggccacttgggatcacgatttgtgagcattttctctgtctctccatacaatatatcttgtccagttccttctgaccagtttattcttgcatactaggttctggaaacgtgccaactcgattggagaagagttcaagggcaaaggagtacacgtcgctctaggtcctgtgacgtaagttcgggattcgatttttgactctccttatcttatctccggtgattaactcgtcggtgttttccggaaatcttttagcggtgggcctctcggacgatctccactggctggtcgaaactgggaggtaagtatttttaccttgtacgtctctaaactggtcgatgtcggttctgaccaaagtctcttcattttggatccacctcctttagggattctctccggacaactacttgaatggaattggttctaaactttccgtagacggcatgcaggccgctggagtagtcgcttgcagcaagcactttatcgtccgtgtttttatcaccagccatctgatttcagtgctatcgcgacgactaatcgcctagcttgttcaccacagggttatgaacaggaaacttatcgagacctgaacattgttaccgagaccaacctcaccaagaggtatcaacagatcgattcaattattgatgataagaccgtgagtgatcccacacctagcgttgatctgtcaatcttatgtaccgacgtgtcgagattttgtaacaaaaacagatgcacgagctctacttgacctccttcgccgaggctgtccgagctggtacaggtaagatccattctcgggttcttagttcatcaaccgctcgaaagctgatcgtccatctgttttgtcgatgtgtgaataggatcgatcatgtgctcttacaacagtgtcgacggtcaacatgcctgtggtaacgacaatctcttgaacggtattctgaagtctgaattggtaagatcatcgatcatgcaattggagtgtccttatatcattcaacgtctatctcatttaacatttttcatatcaatcaaaaattcctagggcttccaaggacatgttgtcagtgattggggaggaacctgggacactgtcaaggacgcatcttatggtcttgtgagtctctcttttcaacttaatgaaactcttgacaacagctcatcatttgtctaccgctacaattatcgaacttactcaaccaggacgtctctatgcctggtttaggttttggcggagtactcgggacgtacttcaacgatgagcttgtggaagccattggatccggcgcaggccaggtttctgaggccaggttgaatgacatggccatccgaacattgactccgttcttctggctcaaccaaaacgactcatcataccctgcggtatcttttgtgtctgacaacctatcgccgttgaatcaggatgtaaacgtgcaggctgatcactggaaggtcatcaggaagatcggagaggagtctgctactcttttgaagaacaaccggaatggaacgtatggtttgcctattgactcttccatcaggaagatcggtgtattcggtcaggatgccggtcctcccactgctggtcttaccggatgcggtaccgctggagattgtgtatacgacgtcaatgccaatgctcttgcatttaccgagtacccccatcacaatggtgcgttctgttctattctttctcctattccaatcatatactcttgcgcatcttgtttagatatcacatagaggctcgccaaattcaaaccttactaatctcttccgccctgtcctatggttaatttacaacaggaactcagagttctggaggtggaagtggaacggcgttgcctccctatgtcatcaaccccttggaagctattgctgctagggggcgacgacttggccttaaagttgactacgctcttggagacaatccatacaatcctactcaagagattactttcgtcgccgaaggttctgagaagtgcatcgtcttcgtctctgctttccagagtgagagttacgatcgaataagcttgttgcttgataacgaaggagatagccttatcaacctcgtcgctgcctcctgcgccgatgtaaacgtggtgatccactctggacaacaagtcgatatggaagcctggattgataacgagaacgtgacatccgtcgtgtttgcgtactaccccggtcaagagtctggtgaggcgattgcgtcggtactgtttggtgatctctcgcccagtggtaaacttcctttcacaatcgccaaggacgttaacgattaccccggaggaaccggctcgattgtgacggccaatgtcgctgcgcccgtttctaactttaccgagggtctctttgtcgactacaagtggttcgacgcccaaggcatcgagccccggttccctttcggatttggaatgagctactcctcgtttgcctactcggacgtctctgtcgctgagacctacgctgctgattccggctatgttcagaagacaaacgaggcattcgacggtgaaggtgatttgtacgatgtccgatacaccgtgagcgtcaaggtgaagaacactggaaactggaccgctgctgaggtcgctcagatgtacctgacgttccctgagtcagagtccgaccagcctgttcgactgctccgaggattctgcaaggagacctacactgccggccaggagcagaccattactttccctgtgcgagcgaaggacatggcggtatggtcgagtgcgaaccagacttggcttgtgcccaccggagagtacacctttagtgttggtccctcttctcgagacttgcctttgaccactactgtcactatctaagaacgggaacgaatcgagcgtgtatatagctattgatttcttttcgtgaaaacgcattgtacaaatgttgtatacatattgtgatgtataatgtagtttgttcactaaactttacaacctgatttcttctttccctttttttcttctttgagaactcccaataagaagcaaccgtaacaaagaatcatttcatcgttataaacataagcctggcgtgtattaagatttttctagcaacgtctttttcaaacgtctatgtccaagaagatgcttgatggccggaccgggtagtcagattggtcatatattggtatctaatgacgagataggccagatgatgatcctgatggccggcgaggagacctatataaacgcgtgttttcattttgatccactggcgttcttatcgacccatctgctcatccttcgttccctctccttacctatatacccctctgtttaaagatgaccactgctgctctgtaagtggtcgaactagttcttttgatctctgttcttgacgtataagggctgaatttattcgaatgtacagctcgctccttcctcaagactatggcttcgtcgctttggctgccacctcaacttgtatgatcccttcctccctcatgtttttctctctctccatacagtggcagatagtagtacaaaaggagaaggtgtttctttaacttatcaccacaacttgttcattcgaaaggacagtctatctccacgtgtaccaggtcttgcaagtgagcaagtacaggaagttggccaaggtcgtttatccccagtttatggccgagaaagcccagatggatgcaaacccggacgctgtcaaattcaactgtgctcagcgagcgcatggaaacaccctggaggttcgttgctactccttctgtctaatctcttccttctcttcttccatttacgccctttcttttccgctcgtcggattgatctgtctgtaaacggttgactcttgctgcattcaatctttggttttacattctgatcttgggtacctctgctattacgcctatgggctatacttagattcttccccatatgctttttggcatcctcttcaatggactcttcttccctaagatctcagctgcccttggtgcatgctgggtaatcggtcggatcttgtttacctatggatatgtcactggtaaccctatggctcgttatcattacggtggacgtgagttttctctttttcaggtgtctctgttttcgtctttacttcttctcttttataccttctgtcggtgacctgaatgtatctgatctgcattattgttgttgcccgatcacagaattgcacattctcggcgcaatcggaacactcgtgcttgccacgtacaatagtgcaaaacttatcctccccactctttaagttgaaacgattagacttcagaaggacaaaggttgaataggtagacggatagcatacgcgctgggcgcaaaatctcggcaaaatcttaatggattgaaggataacccagcaaacatttagaattaccatgattgtattatgtcccgacagaaagaaacgcgcacagagagagaacatcttgagttatgttcagaacaaagagctcccagcggtgaaaggatatcaaacagaacaaaacaaaccaaaacgaaaaggtttgcttgcgtaccatatttttgagcaagtgaacaagagggaacttgctcactcggaataacaaatcatatccgtcatcgcgaaccgggcagagcctcggcagcatgctcggtcttccggagcatacgcgtcgttcatcctttcctttctgtcatccatatggaaataagaatgcacttgtggacgaacgcacaatcgtaagaatgacaccggtcacctcccaagactagatttgcatacaactcgtaccccaaattagaagtcgtgaaagctcatcagatgtgttacaagaaggagaggtatatatgaatgtgaacgagaagaaaatgagaaagtgtacactaaatgttgaacgaaacggatcacccggcgaccattccatcggaggatagagaaagaaagaagaaaatctatacagaagcccaaatatgagatatgaccgatgaaagtctaagaaggaacagagtattatagaaaaagtgggtagcaaagttatacaaacgaaaatagatagtatgacatatgtgtattatagaggtaaagaagacaggaactatgagaaactctcgtgaagttcgtttatcgggtcatgtttggggtttcggcgatagtagtaggaccagatataggtattggaggagccaagtgaatacagaagatacacaacagagctacacaaaaatgcgtcgaggacgtcgagttgaccgggaagagagacgttagcataattagagaggtaggagatggtgtaagactaactcacaaaaggtgatgatacccttcatcaacgtctctacaaataccatgagttcagacgtgtttagaacgatcaacttcttttcagattgctgaaaaaggcaatgtcaagactcactcaacctccagacgctttctccttctttaccttcctcatcatcgtactcgtctcttccgctacctccagcctgttggccgccgacggcctgtcctaatcgagttgtcctccatttcaatccggaacgatttcttcgggtcttgaaagtgcctaccatctgacccatccgagcgcgcatccttggccggcctgtggttagccctggcgacttcgcagaaagggcgactttctcattctgggcgagcgtgatggcttctcgatagccagatacacacatctccatagcctggatcgctcaaccaaacgacatttaagcccgattagagttgtggacaaagcgttgaaggaaggatctgaaaagtggaatgagaggaatggatgagaatgttggcttacgtcatgccatgttctgcccgtcgttccctcactggccaatctgcccatctccaatctcttttcacggttttcaatcatcgcggccaacaatcctccgtactctctagccgcttctttgaaggaatctgcgctctcagtcttcagtgcatcggcccaatctttcgtgccgaaaggaagtcggaggagaagaccggtcagatcaggttgaactagatcgcgtgttccctcggcatcaagaccgacgacaggtagaccggaagcaagtgcttccaacaccacttgacctgagtgcgttgaaagtgttgatgttcaataccaaggtcgaaaacaactaagagataagggagaaaccccggaaagaatgaacgaaccgaaagtctccgtgaaactggggaaagcaaacacatcggccgatgcgtaaatctctgccagctcgcttcctgtccggtgaccgaggaagacggcgtcgatgccacgggatgtacaaaatgtttcgaggtcaattcgagcagggccatcgcctgtgaagaccagttttggtggaataggaaggtaagcgtaggctgaaagcaaaaggagaagattcttttcccacgagctggaaatcataaagaaaatgatgtacatgattagtcggttggctgctctgaaagtcaagtggaggatggcaaatacgacgaacattcttcccacgtatagcaacgccagtttctcgttcttgcaatcctcctcgttctccttcccaacccaaaccgatccgatcgcttttgcagaaacatcctctgtgcttccgaccccccactcttttctcaatttcgtgcttcgtcggttcggattgaaatgcgtcaggtcaacgcctctagaccagagtctcgagtcaggaagagaatgacccttcaacatcgacatggtcgaaggtgacggacacaagtaaagtttgcacctgattacacgaggacaaacagaagaagccactgtcagcttccaaagttagaatgctaaaaagaagaaggacttgcttttgatagagccatcgctgccaaacccagatgatcggttctaaccacggcaaaccaaacaatgttgcgtacgttgcaagattggtatgataactcgctactacagcaccgcttactccaccacctacgcctggtccgtttggaccaacccactgttcgcctgcccaacctaattcgagtccaatgagtgtttggccacctagccaaatcttgggagcaatcgaacagataagaaaaaggattccaacgtttagcactgatgagatagaagagtagaatgggcaagcgagatatgcagcttactggatcctatagatatcgaataatgagattaccaagggataatcgaggaaagatagtcagtaagactgagaggacgatctggcaaatgaaggttcgggcataccaccatatggatgacatccggtttctatgatcaatcgatataccataagatggatagcaagacggtgtttagatgagaatccgggtttagagattatcgaccggagtatcggtcatgagtagagtaaacaaggaaggacgaacgaaatcttcgatagcatgcatcagcttaggccgaaggaaatttaacctgaggccaggatacaatacgagtgggattcccaatgtgccaactaacgggtgggaagcataatgcgactggcaaggaattttccggtatcacccaggtgatataacggaaaacagtcaggtcctcctcttgataagctacacttggatgcgcgaggagagcataccattcctgattctggtccacacaacagcgcttcgtggccttccttgtgaagatgttcgaggagcctggccaacgttcgggtgacgccgtctactttgggcaaaaagttctctgttatatgcgggtgtgtagaggttcatggaaaagacagggagaagaagatttagagccagaaatgaacggaaagaacggtaatccgtcgagaccagcgatagacctgtatagaatagacaaaccggtgacgataacgattctgagctttgcagtccccccggttcccttttcttctaaaggaactttgtggtccaatatcggttctgccttctcaatctctattggcactttgtcgtccaaatctcctgcctcgagcatcggtaatctgtcaaacaacggatcggtctcgaccgccgcgaacgttcgacgaggcgaagaggaggaggaggaggaggagga

SEQ ID NO: 2968 - DNA, 643 bp, Xanthophyllomyces dendrorhous
atattgctgtgattgctggtgattgttctatgtttgacggagaaaggaagcgaagaaaagagaagagagaagaagatgaggacgaggccggtgtgttgatataggagaactaaggaccgacgagatctggtgaagaatggagaaacgttcgatgacgagtgagtgtgttctgtatgctgtgtgtgtgtaggctcaaaggaacggacctttggacagatgaagagatagcgagtttatctttcagccgatctttataactttcgttcctgaaggaacaagcagtctgtctgttgttgttgtttaggagacctctctctcctgctacaggatgtggtggtcgagagaacgttcgtttttggtccttcctatccggacgatgcggataatcctagagaaggtgagctatagagtatttgagtgagaatctggtctactcactacccaagagaggaacagcgacgaacgtggaaggtttttcctcctcacaacgcgcgcgcgtgtccaaaaagtccgacgacgcgaatgatcgcgacgtgacgcgtcatgaattaaccctaacagccccaacggaagagggtcgtgcgtataaattttgagcgttcttgtctttctccttccctcgcccacattcgcttcgccttct

SEQ ID NO: 2969 - DNA, 21764 bp, Xanthophyllomyces dendrorhous
ctcagcatactcaatcggacgtaagtgtcttgttctttccatgtttccttctgcctggctctggtgtgcttctttcttcccctttccattggtcatgatgctcttgactcgctttacctttccaaatccttcggattttgcggatacacttttttatgtcaacctgaactacaaatacctctatcattccattctccattttgcttcaacgtttgctaacaccaaacatttatgaaagtaaaagttgtaacgatcgctgaccgtcgttttatgtgctctctttttgactggtggcacggttacccgaatcttaggtcttgtcagacgttggcggtgggcttggcatatatgaatgtattcctgtctcaaacattctgttttattttattttcttactcttacacgtgatgcgtatacccctcggatccaaatcaatgattgccttgatcaccaaacgacagaccttgcagttttcctcaagtaaaggaaaaaaaagagaggaaagaaaacgggactacaacagacatctcttccttgtttatatgttttgacaacgtaacaactcgacaaaatactcttctctatattcaattttgaggaggaaaagataaacaaagatcaaactggacgtcattcgagaaataagatgtggtatacgaaacgagagttgtctactgggcaagagtgaaacgccaagcgagataaccaacaaagacagcgagcggaaggaagtacgcaagcgagctttttcaaagaggtggaatgaggtaaagagagttccgagcagaatatcagtctcaacatctaggacagatgactagaacagacaaggaaaattaggaaagaacactcacgcgccctgtcgcgaaggggaaacaggcttggttccgggtatcgacttcttttgaaccttcttgttcacctatagttcacacgtacacgagatcagtgaaatcgtgagtttaagaaaagacaaaatcggtatcgagaggagaaaagagatgctcaccactccatcgaaatctccaacatacatatctttcaacaactttcttgcctcctcggaatgtcccacatcctcaaaaggctcagtcgcatccttacctgtttgattcaaaccagtgtgtgagtgaaatgatttaggaacgaccttataaccttttgatctcgatcttgaccatgaaaacatgggtagggtataagcaagaagtggacataccagcttcactgatgacaacctcatcacctggttaaacaacgacaatcatcatggaaacacaagaaatcatcaaatctcaatacatctgtaggagaggttgatccaactgaagagaaggaaaaaaaaacatacctccagggtgctcgtcgaggaaacttgtcacatcgtaaactatggttgacgtgtcacaaacgattccgaacaacagcaaccgatgaagcaaacaaaagtacaaaaatcacgatcagccttatttttcacaattttatcagtaagccaacgatatcggtcgatacatattcaaaacagagagaaaagacagaagaaaaacaatgcgaaagtagaaaaagaggaaggacaagcttgcgggaaggaaagagaagaatcgaaccacctacctttgccgctgatgaccatccagatatccttgggatccgagtgagcctcaagctgctcctgggtaatctttccagaatcggacgactctgccggggctggctccgacttaacggccgggacggactcatcagggttcgtggacattatcgacaaagtgattgagatgaaacagtatctagaaagttgggtggtggaaagagttgggcgaatggggcgaccgttgattgggggatgatccagggttgtttgattgaaatttgattgccttagatagcgttacatagtcttctctgttagcggtcagccattctagcggctcacatccaaatgagccaacggcatccatccatcaatctccattgacatcacctgttgaactctgtcctttctatctagtatacgaaagaaggagaagtccaaaagaagagaaaagaagaaatcgaatagtttccacataaaagaagaagatgagcccacctttggctcttgtctcaagtctgatccctccatccgggatctcgcacgctctctttcttcccttcacccactccgtcaatcatccactgccgacgcctcccagaacggtatactcttactctccagcagttattccaggcagagtcattaccaatttaattctggctagagggcgtagaatcaacctgtttgaggttagagaagaacaagttgactctgagcttggcggaggcgttcaggccagtacgtctgttaatgggtcgaacactcaggtaagttcatgttcgggcttctacgttgtgaaagaatgctctactggcttcattttgtatcatgatatccatgtctatttctttccttcatacaagagaaaaagttcatccgatatagtttcgcaagacatcttccatctttgcgaatactggcgctaatcagtttctttctctcttcatacatctctacatttatctattctctcctttcctaaatgtgatagccacgaacaacgctccgtctgcgacatgtagcttctcatactgcttacggtcatgttaccgggctcggcgcgctccaaacactctcaacaaaggaggatgggctaagcagattggttctcagttttgcagaggccaaggttcgtttttatatatctctcgttgacctgccaggagtttctaggccatgaaacatcggtttctatccttcctgatctcgttactcttggactaatcattccttcctcggaataacacagatggcgattctagaatggtcggacgccacctattcattctccaccgtctctttgcatacatatgaacgaacaccacaagtggtcagtagagattgcctgcattctaggccatttcagacagattaatctgatatcaacgactgacctgccgagttcctatcagtcgggtgccgatccagatacagaacacaaccctcttcttcgaacggatcctgactcacgatgtgctgtacttctacttcctggcgatgcgctagccgtgcttcccattatgggtggcatgttgcacgatgaagacctcggatttgagatcgaaggaggaaagaatcgaagagagatcccatacttgccaagttatgtgatggaatttatggagctagatcctcagatccgacacgtcaaggacatcgtcttcttgcccggtttccattcacccactttagccgtgttgtacgagattcttccgagttggtcaaagtaagtttgaatcgatggaaatcattctgacaagacagtgaacgatctaacaattactggttgtttccctcctaatatttcgtatagtcgacttcttcaggacaagccaacgacgacactttctatgcattctctttcgctctcctcaacttcctcatcctccacatctattgcgatgataccaaacctcccttcatcgtgcagcgcgctcttcgcctgcccaccttcaatccctggtgttcttattttatcacccaacatgttgatccacgtcgatccatctggaaataccatcgaatggacggccaaccggtttgcaggctacgaaggactacgaggagccgaaggtcaaggatgggaaggtctctaccgagtctggggaacaataggagaggataacggctcagaagagaaggaaggccatgagggtgaagctagtgggctccggttggaaggtagcagagtcgtctggttagaacaagcggatggctccactgccacaggagacgttgaagctctgctaatctccaaggagggagaggttcggaagattgtctttgagaaagagggcaggatgctcgccagaatgaaagttctcaaggatgtgttaggtgtgggcccaattcctgctgaggcactttgtgtgtcgttgggatcaggatcaagctcatccggtaagccggacagtggggagagcgcactatttgtaggcggtcttcaaggagattctgtactttatcggctaggaaaggaatctgctgtcggtaacaatcctactcaacctgagatagaatcttctataaacagcgtcaagacagagaacgggcaagaggaaatagagggggagaaggaggaggagggagaggaagaagacggcgacgatatggatgttactgaaggtcagtatctgtcttggtttaatttgtcacgctgaataggatttgcatgggtctcacgatcgaaaatcattctttgactctaaatcacaaccaattttcgagatagatttatacggaccctcctctccaaaaaagccgcgaaacgctcatctgacgacagcaacgacagcctcactcgacacaaatctactttcgtctctttacacgtccgctttcggagattcagctggatctggaggaaagaacgaaagactccgttttgaggtttgtgacactttgaagaaccacggaactatactgggaatgacgtttgggactgaagttggagaagtaagctcttttagaaggaatatatgtacctgttcttctgtgcaccttcgagatgtttttacatggctgacgctgtcattgcatctggttgcgcgccctgctcgactctagcatgcaccgaatgaccctcagttacttgctttgggagggtctggccacaccgcatcattcaacaccttttacgtaagtagtcaattggatggttcatctatgttctatgttgaatgtgttgtgagacagccaaccaacgaaatagaaccatgagctaactagcgttcttcatcccaaacaacctatagaaagacatgccggccatgttgagaagaaagccgaacgcaatctccggtgcgcgagggatctggtcgataaatgtaactgtacctgttcctgcagctacgcgcggaaagggcgcagcttctgcgatcaaggacactgtgttggtagtcgatgaagatcacaagagcggacataccaaagtgtgtttcttttttccttaagaaagcacagacggtcacaccactcattgcgagagacgagtgacggatgttctattgaacataagctgatgccaaacaatttgttcgattgacctttcttctgctagatcttcaattcattccctctgaaaggagatcctgtcacggctcgacgaattccatctgcaaccttggctgttggggaatttttcaaccgagctcgttttgtacacgttaccaacagttccctcagcgtcttagaaggaggtcagtttttgctcttgtttttgtcacagcacacctagatgttggagactaacagaagttttccctctacttgaatttgactaacaggtggcagagaacgatactctgttagagctccggacgacacttctttcctctcagcaacagtggccgatccatatgttttggtacatctagaaaatggatctgttcatttatacgcaggggatcctaccacggaaactctaaatcgcattcaagcggatttcaaaggggtgagtccgcggatctcttcatcaacacgatccatcaccaaattggtttgatatcctatcttgatattcacataattcatgaaatcgtattttttcatcaggaggactgcgttgcatccagcgtgttcacagactcaacaggtatattttcttatagactacgcgtgaaaagcagtccgacagccgaatcagccgatcagatggatgatgacgatgagaacctctacgcagaggtggaagaggccaaaccagcggctgttgtggcagcacccgaagctgctaaacgacctactcagtgggctcttctttgctttgcagacggaaccattcaagtaagtctagtatcgtcacagatagaaaattaaccactacaatgaagaatggcaaatcaagctaatcaagactgtttgacctttgtgtgggttgtcattaaaggttcgaagtctccctgagttcaacgtggtattcagttcaggcgatctagcaaatttccctctcatcctaaataataaagctggtaaaccaagaactggagaagaagtttctttgacttcttcccctccagcaattcaacaagtccttgttgctccagtgggaactttttcacctcaaccgtatctccttgttagtttaccattccatttcgtcaaatcttttgtgcttaagctgatcaatccctgctcgtatttcctttttcagttccttacaactaccggtcaacttatcatctaccacatagttctagcctatacccttccgccgtccaatacttcggctgatcccctccccattcgattttctaaagtcatttctcgtgccttactcccacctaacatcaattctctagctccttggtctcttgttccttttgcgcgcctttccggtcgaacaggtgtcttcttgactggcgagttccccctttggattgtagcaggtgaacacgcctcgattgtgttacacacagtcgatgaaaaggtcgttcacgcgtttgctgcctcgcccgccttcggagggcatggagaccgattcttattatcgactggagaggttagtctttagccatttgttgtgactccactaattcggtttcatttcagatgtgctgacttaccctcctttccttatttgaaaaccactctatctcacagggccctaaagtactagagtttcctaaaaatattgatatctcccaacctctgccgacaaaaagggtgtctccaggcagaacatactcgcatgtagtgtttgaccctacgtcatgccatgccgtcgccgctggtctcttctcggtcaaatacgttctcttcgatgaggatgatcaaaaagtccgatccaagacgggtgtgtcatttctttgcttcaacgctctcgcttatgtcgagatttactgagcatgtggtttcgacatggcgcgttctcggccgggtgcttacaaatggaagtggacgcaaggctcatgcctatgactgaacggtcgtctttggagctcctcaaattctcttccggagaagtcatggacgggtgagtcgtttctttctttacaaggtccttatacatctgaggacgactattgaatggctcatcaaaacatgaatgcatcccggttaaattctctcgcttagatatgagtttgcggacaacgaaaccgtactctctctatcctctgtaaacctagaaacaaagtcctgtccttctggtcgaaaagattacatcgctgtgggtacgggtatttcgagaggtgaagacctagcggagcggggagctgtatgtcctttctgtatactccattcgagcatgagaacggggaactgatcgtcgacgagctcttcaatagacttacatctttgaggtagcagagattgtagccgaccctgctcgaccgcaacatcaacatcggctcaaacttctgtgtcgggacgactccaagggggctgtcacggccgttgcagagataaacggctatcttgtttcatctatggctcagaaagtaagcattttgattgcacttatatcaagcgcattaagtctatatttacaaattatgtcttgttttccactatagctgtttgtgaaggcgtttgattttgaggacagactgttgggtttggcgttcttggacgtcagtatctacgtgaccataatttcgaccttcaaaaacatcatcatgatcggagatgccgttcgaagtatctctttgctcgctttccaggtcagtattaattcaactattcctcttccttcctgatgtctagcccgacacaatatccagctgtgtgcttctgtgccgttgggaatctatttcctgaacttgtgtacgactatttctgtaggaggagcctttcaagcttgcgttgatctctagagacttcaagcgacggcagatcatctcagcggacttcttcactgcccacggtgaactcgggttcataatctcagatcctaagggtgatcttcggacacttgagttcgatcctaatggttcgtagctttccttccaatcttaccaaaaatcatttgtgcattatcagcattatgcttaacacttttgacatgatatttgatagatgccgaagcggagggaggccagaagttgatcttgcgatcggagtatcatcatggttcagaactatcgtctgtcttgactgttgcgcgacggacgaacgagcaggagcttatcgcccctcaaacccagcttctccttggtatgttttgacgtcattcccatttgatatatacttgcactttcgacttggctcatcagaaagcataacttccacggtattgtcatcaggctgccacgatggatcaatcagcacgatgattccgatagatgatgacgtttataagcgaatccagcttttgcagagctcgatgctcagaaacattcaacactttggagggctcaaccctcgtgctttccagtgcgtgcacacaccctcttgtttttcaccatctcgttcagttaagtttcaggctgatttcggattttgtttcgtctttgcttaaatactcgaatataacagtacggtccggaacgactcaatctcacgaccgttgttgaaaggaattctcgatggcgatctcatttttaacgtgttctctcttctccccaggaatcaacaagagaagatcacacagcagattggaacctcggtcgaggttgtgttggaagatctagaggagcttcgggcagtctggtgatcatatagatacatgtatagaaagatagttctctcgacgcgtaacatggacatgtacacgtccagccgcgggcgcgctcgcgcgttgaaccaacatctttcaatcacctgcttatcgatctgcgtaagaacgatatgatgaatccctaagatcatcaaccgattattcttagtcaaattgtacaagtatgcaaatgtgctgaagtgtgcgtcgcgaattagaaggatgtagaagagaagataattctgaagtgtgtttgatgaggcaagagcgaaaaagatcgttcaacattttccgttttgtcaacgcttgcccatcaatcatcaacctctgaccgtcttcctcacagccacctcactaccttcccatctccgcaccgtcactcgcacccgtattgattttcttatctcgatctttggttcctatgctgctttcctctaaacgactaaggtcgtcgtctcccggccacgtgccctcctcgcccctggatcatatctctaaacgaaggaaaccaagcgcttatccgaccaacaatgacacatatcaggcgaacacctctccggcttcgcattcgatagttgttgattcccctcaaacagctgactgcactatacttcacaactcgtcagcatcacatcctaatacgtatccacaagaccgttctcgttcacagtcttttcaatcgagccagcaggctctaccatgtacgccctatcaacccgtcgcctcgtcttcctcaacaatgatgacaaccaagaccttcgcaacgaattcaatggacgcgagtgtcccagtaaacccagcagacgcaacatctcaatcatctcgatcaaaagaacactggcagactccgattggcgattcttggaaacaacgacaacggagaatccgtcctcggccatctcgacacgcggcttcggttaatcatccaccggacgacttcaggactccactaccctctcaacatggactaaaattacaactgaatgatacggaggaagaggaagagaaagaagatgaagaagaaatgagcgtgtcttcagtcagtcatcgattgcctgcttatcgaccagagcttggggtaacacaatacctggaagaaccgaggcgcttgtcaagttcaagcagaatagactgggtggatcaggaacctccggacgaactcaacgaaaatgacgaggaggaagaggaagaggaagaggaagaggaagaggaagaggaagaggaagaggaagaggaagaggaagaggaatctgagattaagggcgattcaccttacgctcctatgaaccgattgttgtataccttggttagtgatagatatctccccattaccacacgaagcagcacacatagcttatttcaacatttccttgacggaacttcggacggcatctagcaccaacaacgatatccacagacgccttcaacatctccaacagccgcaatcactgtgccaacctccccatgttcttctcccttgtttgccccacctacaccgaatctccgaccaacataccgaccacacccgctctccaaacaaaccagctcggtttcttcgcttcaaccaacgatacgggcaaactcctcatctgaggttgagcttatagtaggcgcaggtagtctcagccgacagaaagtggccgatcaagaagtcatcgaaggacgaacaatcaaagataatggagaaagagagcgagaagaagttgagaggagatatgaggtggctaaccgactgttgggtggcttagttctaggaaggagaagaggtcgagaagaagttgaatagcgtgccgcatcaactcttcttccatgtttcccatttggtcttgtcgcatcctcgcatctgcatctacatatgaaaaaatctgcagctcctgtcatattgtacgtcttgttcttgtctacatcttccaaaacacactcttcgttaacgcagtccttctctctacgtgcgccaaacaggaaacaatgcgtgccgcttcttctcatctcaagtgtccgcaaagcttgtttgttcctatcttgttcaatttattattcagttctcatttgtatgtatctcactatatgtctccaacatttgacttattgtctaacttgacaatccattgaacgcctcttctgttgtgcaccgccttttcactcgtcaggcttgagcttctattcctggaaatccggagagcttctcttaaatggatcttctctgcaccatgtttattttctctctacttctactatttttctctcttttctccatctttgtcttcaatccactgcattgcgggttcaactgtatacctttaagaagtaaccctacattttcatttcctctgtgttcttcatcgatcgtttaacttttcttaaatcatcacactgtctattactctcttctcgcatcgcccacttgctctgtcatctcttgaatgtccgtttctctctttcttccgactcccaatcctattcaattgcatctcctgtgatttcgtttgctagagttgacactctgtggatgcttatgtgattccccgctcttcaactcgctaacagatgtcaactcgcggtgttccttgcaatgcacattatcattaacgattcgtaacaacttccctataagaccgtcgtcggagagaaaatacacaagatgaggttaatttcttaggttcgacgtctcgacctggaacgagtaccgcgtctcgacttttgagaattactagcaccggacgatctgtttggcgcagttgaagtttcgccgtcccattgttctaaaatggcccagtcttcttcgaccgttcgtggtcgtccctatagggcatgatgtgaaaaaagtattagcgattgctgcttactggaaaagaagaaaaaaaggacacaaatgggaaatacaaaccaggtcaggcacctggattcctagggctttgaatgttgtcatccgatctttggcagcaactctctttgcagccgctgaaatctcagccgtatggtcctccatccagcctggtccaagtccagacagattgacttttgagtcggccgctatggagtagtcagatgtgtcatccatcgctgtgtctcctttgaacgaatctctggcgaatgaaggaggaagttgttctggaggagtttctgagtcgtagtatcccggcgtgtcttctggttcagccgttcgagaaaggttagattgagacggagaggtaaaaggattagaggggcttggttttcgaatatctgatcgagggaggtaatcagcgtatgttgctgggtcgatctctagtgcgccttcgagttgggttggtttgaactccacatgggcgccgtctacgatctcttctccatcgaggtattcaccgtccatcgaccaagcctctttcagtcgaacctttctttctggtacggccgaccttccttcatcgtcaggatcgatctcgcccgctttctctaggtgacccaatgcttgttgactctctggactccatccatcatgctcttgaaggaggctctccagatcaactggttcctccgtattgaaccccatgatcgatctcttatcccgctttcgactcgtcctgccgggatatgccggaatatctactccaagcgtcctcatcagcttttcgacatccctatactctatcggagtcattttgtccaacccctggactttcccgttgttgatgataattttattgactgtatggacgggcttaagtcgactaattccccggtctcgcttgacggatgtcttaggagtatgcgggaatgcgtctccttcgttggcgtgccgggcatcgtagaagacttgtctgccgagcgattttgagaagacacgtcgttgtatctcacctaagaagcgcaaatttatggaggtttggtttaatcgaaatatgttaggaaggtagaaggagaagaaaggagaaaggaaaacgaaccttcgggagtacatgtgtccatctcaatatatcctttatgatggactggcttctttataaccctaccccattccaaaatctctttccttaatatttcctcattcaccttattctcctctccagagctactcagaccttcgccctcctgaagagtctcgtaaacaccatccggacccaatatcgctctacccgcctgagattccctcagcttttccgattcctctctatcaacgggtccgtgtctaccatgacctctagtctctggctcaacgactggccgcggaccacgtcgaatgacagtatagacgtattttgtaggaacaacggctcgtttggagttcttcgtcagccgttgaaacgtcggctgggaaacgttttggccaaagtaacaggtgtcgggggttgctaggagaggacatgtcaagtcgtgtgagcactgcatattcaagagggaaagaaaatcacatcaagcgttaacgtctgttatataagccaactcaacaagaaaacgaagaacaggaaatattgacaaaccggtgctattacatgcgcgcccaatactctctcttcttctttcacgagcgcgccgttgttctcttccaccttaacagccgcctttgacagctcttcctccaacttttgtttctcctccgtctgaagcccaaagtccatgtcttcttcgaattcgatcccatcaatcatgatcttctcccttttccttgattcgagcctcttcttctctcttttccgaagttctcttcgttgaatctcggctttatcctcccacccggttggtccccattcgagctgttcagtcaccgacgatgatgttgataattctgtcgagtcggctgttgaagacggtacctctctcatctctgacgaatcctttgctttcttgacctcctcctctccgagtctcagtagaaacttccttgcctcttgaacgacttcgaaactatccctcgtcgcgtgttccaccaggacgattgtctctacccctgagttccacatctgccttaaaattcttcttctgtccccgacatatctcactccagtcaggtgaaaagcgcaaagtccgatcgatttggttggtcggatggtcaaaccaggaggtcgcgatttcaagtatgaaacccatgatcggtaatacagatttacccaagaggccaccggtccaggcgtgtttggctcaagaagatgtttagagagatcggcctgggttcgggaaggttcgagttgaatgtacatatttttattctgaagtgatgagggaaaggtcgcgatggatgaccatgcaccggaaccatgtttggcggcaaaatcgatgatctgaattcctccttcgccttttgaatgtctagcagttgtggcttgatcagatgtagagggcgcggatgaagaatcggcgttcttggagttccagcccattcgagattggacctcgcgcatgacgttcctcaagatcgcgtactctgtcggtaactgaccagccgcgaaagctaacaccagttcctttgtggtctccgatggcatcggttttaacggcaaggttgccaagtcaagggtcttacctttctttggcttaagaagatgtttgtttataggtttgatgtctgctcgagcttttttaccggttttaggaggttcggatagtaagttgtatggggtgttcactttaggtgagtttagaaagagtttatacgtctgcttgaacacctttgcgctttgctctgatggccgaaacagagaccagcgatcagtactttctgagcaatcaacacgcatgaagaacagaaatgtaattgaacctaccagcaaacagaacgtcgagtttgttttccaactcgctaggcaactccaccgttggcattttctttgttccaaaaactgctgccggacttcttctgtcctctcttctctccacatcctgctctggcacatcatatgccatgagcttagattcgtaggcttcatcaatgaatccatatccctgtttgctgaatccagatatcgacccgtctgaaggtatcgaaactgaaacagaaccatcggaagggttcgaagcgtccgaaactggttgagtgtcgaaggtccggcgttgagctagcagtagttgacccggatagtgatggacgtttcgattgaaacggaaggtcgagcacgatcgaggtagacgaagcattataacaagaacccgtctgcaaacccgacgtccaagctagatagatgcaatcaggccgaggtgagtgagcgtgtatgtgtgtatgggtgtgtaatgtgtgtgtgcgctagagtgattcaaaaagctttcttgccgactttcgagatattgcaccgctttctcctcagtaatacaaacttgccacaacgtgatccttttcaaatacggatagctcccattcgattaacttgcatacagtgttcattagatgtatagatcaccgaggtgatgtatgcgcgttgaaaacaaacggcgtttcatattagaagattttatggtattgaatcccgtttctaccccaattgtcagttccttgggacctcttatgactacggcttgtgcacactcagacgtctccttccctctctcctctctccttctacgatgattcccgtaggtgaccctgaagagacaaccgacggcacatagcctgtcgagatcttgcttaatgatggtttcccatgccccaagctcgaactagggttgatgtggttgatcggagagaacatgttggtagggactggcggcggcggcggcggcggtgagattccgtaaagaagcgtactgccgacaacgagagtgctaccgagaacaaacccgaatgtcacgtggttgttgaacaagacggttgaggctacaaacgcaagaaggatggaaagcgaggttgcgaagcctttgagaatgttgtctgagtacttgatcacgattgcctgcaagagaggaaagcaggatgacgtgcaggacaatatggaggagacgtattgagaggcagctcgatcagagtccatacaataacatggataaaatgagtaggtacaacaacagaagaaaatgcactaacagtgagcaatcctcccagaacctgaatccagattgttgtccatgcccagaaagtgaacccgtcgaacagacccctaccatttaggagtaacttgatgactggcaagccggcaggaatgagcgagaatgccgagagctgtatgtttctgatccaaagatctgctttggatcccttaagaacaaactcgaagtagacccctgcgagaccggaggtaaaacaggcggcgaggacagcaaagaatcctttgaacgcgtctccaccttgagttgtattacttgacctggacgagccggacgcagaggaggacgaggtaagactctgaacttgaacgactcctacacccagggcgagaacgaccagtgaaatccattgtttagatgacagctttttcttgaggattaaagcagagaacccggcggttgtcagaatcttcatctggtagagcacagagaacgtggcaacattcaagtttgacgctgcagtatactgtagtgtgttctgaaggacgtaaactgagaagagttaaagttttgagacaatgttaacccagattggcgcgcatatagtctagtcgaaggaagaggataaagacatacgaattgcaggaatcgacaatttccatgcatcgtccgagatcaatgccgccctcagcctgccaacccttgcccgccaaaacttcacctgtctgatgccaccttcgaggctaactccatttagcctaaactcctcgacaagtgagccctccttgccaggttttgccctacccagtgagccggcgagcgctgggagatgatcagaagatgtagaggacgagagcgggagatgaggcgaactcgatgaagcagggattggtgtttggtgaaaagcaacagcgagggagatgagaagcttgagaagctcattcaggaacacagctgtcgaggctgagtatggtccagatgaggatgcgtgcgtccgggagtatgacatcgttatgcttagcgacgcattctgcaaagcgagcgagaccagtctgtattcatcagggtttggggcgtgagatcagcaggaccgtccatccacgtctgatcgtattctgatgtacagcgactcaattcaagggcgtagaagatgtaagatacgcacgatatatatttgaggggaaagccaaagagctctggtgaaggggcatggccgtgcatacaagagaatacagctaagttcgttttatgtcaaggagaggagagacacgttgagagagaggcaggacccttcctataagactagaatgagaggtatgtcgaagcgagaagttcagtatcgatcgatgttattctatcctctgaagggagaatgtaaaaaaagaaaagaggaaagagaatgaagagtgaatagaccgtgtctggtttatcttgtagaatggacctggactattaaccgcgtgatggtttctgaccgcatcgtctccaagcagccatggaaacaaacgcaatccaaggtgtttaccaatcatcacaagaagaaagactcacggtgttttaattagatgcaagactgctgataggacttgactggtatgtgaggttatgaaggtatgctgaggacgaaggggtatgaggaaaaacgttgagccaaccagagaggatgaagttgaggaagatgttgacaatgaagatataggggaaagataaatcaagagacccgacaggatggatgatacctggactcaaaaaaggacgacacgacaatgatcaactgagataaggagagaagaagggaaagatcaatcgaagggagagggctgtagagaaaagaggatgggctggactaaagaaagcgaggaggttagattgttttagattgccatgtaattctctaaccgctcgagtctgggctttcggcctaaacgctggaatgatcatctcagatccttttttctcactaccatggtcttctttgttccaacctggcgtgcagcacaaagcagtttgattcatatgttattttagatagctgcatatattcatcatccaaatatggagatacctcaggacaatccatggcatgtctagtttgtcagactgaattgtaggacaaaagccgatcccgtagagcccgagtctgaatgtcctctgatctaccaaatcgattggtcttgttcagttgtccaccgtttcgactctctacttcctcttctccttctcttctctcttcatcttcttttcctgtctacgttttccacatgtacaataaaatgtccgagataacaagcggcacactgccgcgatatagatctgtaggaatgcatgagttgcgtcaaagtattgacgtgatatattagacaccatgcaatacggtataaaacaatacatatcgccatcactctgaatcaaaacgtgacgtgtgtgttcgcgcgccagacacccatgatcgagcagtgtacgcgtttcccgatcccgtctttagctcaactctcgaacaaacggatatagtaaccaatgtcgagagtgttatgatgctgatgatgatgatgctgataccgatgatgatgctgttatcgatgatcacctgagagatagtaaacctctccatgaagtttccctataaagctggccttggtctaaccgtctcacctattttctctatcgtttccatcgttcattcactactctaaaccgtcagcgtcagatactcgatctccccgatccctacaatgaatatttcgcgaaccgttcttttcaccactggaaaacaactttccttcatcccctcttcttcccgcgctcccgctctcgctaaacgatcatacgccgggtccgatcatgccaacaccagcaaacctacccctccggatcaggaatccaaggaacctcagtcgagctcccaggcaaaagcctggactgttgcggctgttggtagtgtctgtgtacgtcccgctctaaccctcgatccttccctttgttgccttctctttttcttctgacaagaagatttcctcttctctatataccacccatagggcatcatcttttacaacttcaatccgttccgaacattaagcccgccaatcaatatgactggcaaagagacctctgccgcatacgaatctcaagatcactcccaaggtgtcaaggggggaggggggatcggtaaagtcgtcggtggatccgacacacagaatagggagagtagcgcttggaaaagtactgctgcaacgtttgagaacaagaagtaatgggtcttgagctggaagcatatgaactgtatctttagacatgactctgattctctgttgatctgtgcaaaacacattgtacaaaaaggtctaacggaaagatacacgttgctgagagatacctcgtttagacgttcttatgtatatcctcataaacaccaaacattcctccttcctgctccgcctgataatcagccgttgtggccgatgaggaaggaatctcgaacggaagaggcggcgcctcgaaaccagcagggacagggttgatcttgttctcgatctgaagcatcgtgcagaacgcgagagtctgtgggttcgtgtaccacgcggctgaggtggccgatttggatcaacataaaggggaaatgaagatgagaagaaccagatgcaaagtcaatcagatggtttaagaagccggaaaagaaaagatagaacaaaccaggtccacccccaggctcgtccaccgctggcgccgtcttccagaacttttgccaactgcccacctctgctttccctctgacatttttctcctcttcatccttaacccagccaagcccatttgattcgacccagcgtgcctccttctcgactaaaagtcgaagatcactttcggagggtatgcgaaccgatggatggggctgaagggagaggaacggatgcatagctcgggtgatagcaagccagtctggatcaaacgtgaagctcaatggtgtgtcaggcctggccgaggcagtggggatttccagaatcttgaagcaaagagaaaagacaaatggagacgtaaatacaagagtcttgaaaagaagaacaggagaggaaagggagaaggctttcacctggaggaaatccttgttaggcagacacttgtctagagccaaaaatttggtcacataatctttactagatcctgtctgggctaccaggtcgggtctctcatccagacggacgacctcaacctctctctcctcgctctccttcggtgaccgatagttcacatgtccttgcccctgttctggctcttcatcatcatcatctccatcatctagaagaatctcatccggattcgctgatagtcccggttggccttccgatacttcggccaattccgctagagttgatttggtagatgcttcatcgatatcggaaagcggtacatgtattggtgtaggtgctgaaggaggggtcacatagggagtctgaccgtcccgaagatcatcatcgtcgtcatcatcaagaaggatctcgtctggattgatcgtcgtacttgaagaaggaaggagaagcaggatgtttacattcgcttcttcttttgcgtcaacatcatcctcatcctcatccagaaggatttcatctgggtttccttccactcccgccgctgattgaatagaaatttcggttggtagctctgctctcaattgctccgacacagccgactccagatgtttccataccgctgcaaacttgacatgcaagtgtgcgctaaaccaataggccggtcgaagtctctgcaaaagttctaatagcggaggcgagcctaaggtgttttcctcgatctcttgctggaagaacggtttccgacggagaagcgtcggtaaatctccgtgttttgagatcgtgagcggccaatcatgagagagaaaaatgtgtggaatttgagaggaagaggaggaagaaggagaaggtgtaggaggtaggaggaggagtttggaaacgctgtgatgacgaatgtggtatactgatcgaagagtcgagcgatcaaatggtaccgtttcaaaaaagcctggtttggttcaagatgtacaaatgataggcatgaagagagggagaagttagttggacagagcacactgtaacaagaacgagcggaccgcacctttacggtaatcatgagacttgaagatcccggacgctcctgatattctaatcccattgacgaggaccgatccggatgtaccaaggtaatatatattcggagccagccaccctccgtgatatctgtagaccattcaagatagacttttgagctctttctccatactcttactttgaaacgactacgttcaagaaggtctgaagaggaagagcaagagaaaggcagtaggtgcgtggatagatgggtcaggctaaacttacagctcccacatataattacttgcttcatggttcccaccgatcacgatcgttaaaagaggagcaaccttctggccagagtaatacgagtggaatgatcccagattgcgaaatttttgaggaacagctagggattcgaaatcgtgtgggtttctgagtgcctacagacaaagattacgaccaggtcggccaagggtccagcacaactacatgagcatggcaaacactgataaaaagaaagtgagaaatatgctgagaagtttattgctcacttgaaaatcaccacaaatcaacaagagatcgactttgatccctttctcccgttcggctttgtggatggacgcgtaaatggcatcaagctcgccatggcagcaaccttctatggcgatctaattttcagttgtaaacgtctcagcagagttgataggcttggagaaagaagcagaatcagtgatatgaatggacagacgtgcatcgtggcttgtagttaggatgagctgtatctgaactgggaggatcaactgattgttggacgcggtcgacgtattccagatctacgaacaatcataggggttttctcttccgtcttatatatttcaggatcttcacttctatggaatcaatgtttcatgtcattatagtcggcatttcaggctgccatctcgtcgaccga

SEQ ID NO: 2970 - DNA, 55159 bp, Xanthophyllomyces dendrorhous
  misc_feature (29359)..(29368): n is a, c, g, or t
tgttgttgttgttgttgttgttgaggagatggtcgtcgttgttgctgctggagcggttgctgaggccaggtcatcaacgggtatgatgattgattctccataggaaggtagttggattgcggatcaaggtttttcatcggcggctgcaatgataaatcaacgatctgaaatcctaagccaatagtaggttgtaacgttgatggagcgagtggtccgcccgtcgaggatgacgaagatgacaattcgccactaccaccagcagatcctcttctgatgttcaggtgattaaggtgatagccgaccagcgtgccttgtcctccgccatcctgaatacggctctcgtttggtgagggatactccgagtgccatggttgagcgcccagatggtctgacttaagatcatctgtgtggaccatcgtggacgaccaaggggtgggtgaggcaactagggcgctatcgaacgagattgaatggggcaacgatgatacggaagacgtagatgaatgtgaataatgcgagagtggagggcctagcgagccgcaatctgacagcacagccggggatggatgaaacatggattcagaatattgggaaagcgacggggtaccaacctgggggcctagaccggttggaaggagaccgatgtatggatcttccgatgatcctcggttgggacaaggcgtcgcgggcatgccatttgtgctggacagctgggaggatggtaggatatacggttgggaccttgtccggtgatgcattcccggtcgaccggctagtggaaaactcgaccgagggctggcccgataaggccgctgggagggaggtgagattccggcaacctcaagggtggaaaacaacgaggtaggcggatatcgtggggaggtggatggtgaggattgatagcttccgtacggggaatcagccgaaggagagtcatcaaggctgaagctagcaattccatggatcgcaccagaagtgggtgttccctcgacgacggttggtagagccgtcagaccacctcgcaggcttagtgaagagtttgagcttgctcgtttcctcagcgacttgccgccttcgtcccgttgaacaaaacaaatcccggcgtccgtccgaggagacgatccggcaggactgacggacccctcaatactacgaggggagtagctctggatacgctggccggcgagatctctaccagatgaggtgctggcgaacgagggctgtttgcgcaactgatgtcgatctcgaaaattttcgatccacccagtcgatgctttgaattttccgaccggccaggacagaacctgtgcgcagccaagagctttctctctgatctgaccatcagagaccgtctggccagacttgaagatctgatgggcccagtcactcatatgctcctcaatctcgatgaatcggaaggagctgagatagattgcatatgtgcggggagagaaatgaaaaaacatatgttttgaacgttagtttccatcaaggaagagattgctagtaagacaatacaagaaaagagttcaggatcgagtacttaccgaggaacttttggactgatgccgcattctttttcctttttcctctctgcaacccattctgttgggtttcctagccatctatccttgtctttcaaaatcttgctgacagtacttcgttcaattccaaactgtttggcaaggtcctcctgcttcttcctggggtactgcgcatgaattccacacagctctttcttctggatggctgtcagctttatctttgtccgggtcggcatggctgctgttgatgatgatgacggtgatgagcatgttacggccatcgttgactgtagagagacctgggaagggggataagaaggagggccttgggtaggtaaggccgagctatagggaatgacccggccgatggaagagaacggatgatgaccggcagcatcgtgaagatctccaggcagggacgatgactgatcgtacaaagggccgtagctggatccagtgtgagtgtttggaggatgatcagacatgggactgagcgttacggagcgaagagaacgggcaactcggtcgagcaaacgaatatcgacagagccgacagccaaccaaggagcgttgggttgcagatgggaggagcgagaatgcaagttccggatctacaggataaatctgttgacattcgcgaaaggtaggaaacagggagagggcagagtagaggaaaagtgtttccgatcaagatgtgttcggtccaaacgaataaagagaaagcatattaagacagagaacaaggttaagacacacaatgtgaggaagacagagaataaacagttttgagatcgcacctgatgatgtgttgattgagatgaaagcctgggactgaaagtgaatagagatggcctatgatggatcgagttttgggagagatgagccgaggtatagggtatggactcgaaggacgagatgtcggtattgttgacaacggccgagatagaacaaggcaagaaaatgaaagacaactggactcctttccttgtcaacgatggtccaagaacaagaggtttgtactgagaagaagatccgatggaagaaagagaaaagaggaacgagaagaaaaaaaatgcaagcgaggtgaaaagaaggccagtcgagggaaaccaggaatggtcagagatagaaaggaatgtattcagtcgttgctgctgtcgggttttctctgcaactcttctcttgaagcgaatcaaacagaacgccaggaagcaagacaacgatgaggaaccagggtgaagcaacgtccggatctatcgtctctcgaaggcaaaggagggaaggaaaaagaaaaagaagactgccgtcgtcggatggaagaagattgagcgggtgtacattgtttttaacggaaaaaaaaattcaaccttctcatcctgccttctttctgtctctctatgcgtttacgttcgttcttgcaatctcttcctatacatagatcccgtttgcttcgataaatagagcggataaacagatatggacatcgactcgatccccggtccatatggtcaatcagggtgtccggagggagcatacacgcacacgcatataccatgggaaccaagagatgaacgaaaacagtcgcgcattagcacagctttaagccgaatctacccttttttcccttgcatcctgctcatatccgtacaaatggtactctttcctccccagtattccaatcagaaggtccatccgtagaaggttggaaagcatataaaggtcaaaaagagcaggaaaacgagagatccatcccgaaaggatatcagagaccgaaatacggtgaatcagaaaatggatgtaaatacagatgtagaaagatcgccggtcgggcctacgaggattatattttatttaacgagaccgaaaacagcctctacccgaacattcagaagagagagaacgttgaccgaagatagatcgaacgctgagagaattcagaggagacccagcgttacacgtataacatatacatacagacgataaacaaagacgagaaagaacatcgcccgaagaggctaaatggttgttttgagtcctaaggatgcagagttcaaaagaacaaggtggcttcagataaccattagcacccttattttctttcttccttctcctctaaaaaatccctctatgctgcaggaaaggtgatcgacgaatatacacaagaagacgtcaattgatcgtcaaaacagatctaatcagttagagattaccaccgttggtctcgaacaggtctcatcgttcagttgccgagttggccacagtacgtacaattgcacacacttgcattcacatcataaaccctacgctggctcaccatgcaactcatgccacctccctctcatccgctcactcaaacacatacacacggacatttcgacgacgtcttagcccatcatcaagtcgtccccttctccatctcctggattctccccagcaagagccatcaacctccggagttctttctcctttcgcttcttctccgccttcaagttctttcgactgtttggattcgtcatcgacatatggtccatctcggttggcgtgaacagcttgcctagctgggctgtcttgacccgaggaagggcagaagggttaggaaactgaatcccgctcgtcggcatggtcggccgcctaggaagtgggggaaacaatagtatcgatcggaattaattaagcataaaaagggcatggtcgatccatgaaagcggaacgataagcatggtcgtaacggtgagatgtttttgggccccaatttatttttgtattctccacgaatgatacatatcggttcgcatatgtgggggggggaagagaaagagatggactcacgaagcttctcgagcgatttcatgttcaattctggcctgctcgatcgaggctactttgtcctcgataacctcttcttccacaccacccttcaataagcccatcccgatatagtcctccagaccaccccaagcttcgtcggcctcgtcgtcaagctcgtcatccatcatgtcgggttcgtcttgagccatatcttgcctgtctgcttcgccgtcatccatagggtcctccgtcataggttcttcctcgaacacttctctatcggcggcacccatcaaaccggccagatcgaacgcaggagcaaacgaacgaacgatggcggcatctcccgtctgggtacctattcctgaccccaaagttgatccgagtccgccgttggtcgtttccgacatggtgttatcattgacgccatcaccaatatcaccaacaggcacattgggattcttcgttgttcgaagaatcgaagaatgatgaaccgcaggagggactgtatgatacgcaatctttccagagttccaatctctgagaacctggacggcagaagattctaagtcaggcacacctcctttacctagccgacctcggaccaacgcgatggacaccaggaactgagtcgtcgtctcaaacggtggaatcccgtagagtttttcgagttgataacgttcaaccttgctgatgatgatgtccactgtgagatgaacgtttgatgaagatgacatggttgatcaatcagagaccacgcaaaggaatgagagaaggagaataagatttgaaagtaaaaatcgaaaacttactaggagaaatcggatcctcgaccaactctggtttgacacaattcctcaaaataacctctcctctctttttccttcgctcgtgctcatccaacccttcaaccgagccagccgggtcaaaaacgatacctgggcaatccaagatcttgagcgacttgtcaagcgcaacctcttggacaaccctcgtctttcctggcgtagccgcgacaccacaggccttgctcctcttcaacgaattgatcaacgaagattttcccacattcgggaatccgaccacgccgacggtcaacgactgacccgtcggtagatgtcgggcgtaccctttcaaaagttgaatcaacggagccgaaccgagcgccagagcggtcaccggagtcgttaaattcgagtcgtctgtccttccgccagtctgattttgcgagtgggacgccgatgaggatgatgtcggcagatggagggaagagatatgattcctttgagattgggttgatgacttgaagggtaaagtagggaaatcgtgtcgaaggtatcgaagccattgctcgaccgctggacgaggtaccaagtctgatgattcgataaagagaaaaaagaaatccctagtcggtatatatgtctagttgtcctcctcgagagaacaatagcatgaacgtaccaatcttgttcatcaccgcaatcaaacgcttgccgtctccttcccgacgtctcacctcatcctcgacgtatttactccttccacctaacgggtctcttgcatccaacacctgataggtagatagatatatgaagaaaaaggaaaatatcagatacaacctcgggctcgtgagctcttaagagcgcaaaagagaagaagaacagacctgaatgatcacatcactttgatcaataacttttcgaagatggttcataaaagcctttgcactcgaatccttcagcatgatccctggatcaagctaagaacaagacgagttcatatacgtttgatgatgacaatcgatcagcaattgtatcagtgacctgttgcccaagaagatgaagaaacaggttcgctaacctcaggataatcagccgtctgaatatcgtcggtgaatccattgaggcctgaaccagaaggagcgtctggatcatacttcaatgtcgaggttgaccccatgctggcgaacgtttgaggttttctctgcaaagtaaaacaaacaggaaaaaacactcagtaagttatctctgcactactcttcagagtcagagggtgagaccgagatgagagtcacgcacagcagccgctcggtctcgatggacttgcttctctatggccttgctctgaactttgagctgctcctttcgagcagccgcctgggcaaacttgggtactcccggatcctttctcttttctagaagtagttatttatcagtcgaatcatgtggttagctaccaggaggagtattctcatgaacacggcgtaaaccaggaagtctcaaaaatcagttcacgaactagctccgggtgtaggaagagcattgacttctgttgagagtgtgcatgcgtaggtatgtcagatcctctccttgtctttgataacagctgtgattaaatagctaataaataggatataaacagatacgaactgttccttcccatctttggcatagttgtttgataggatacgagtgtgcgtgtatgaatgagttaaaagtttcaggtataggattcctcgttgatgatagtcgagtgtggagggcaaccaaaaaaatggttgtaaccaaagcacgtggcaggtgtatcgtggcgtctacatattcgactatatgtctaacctaacgctgttgtccccacaaacacaccgaccgagaatccggatcaaagctgtgatggtgatgttcaacgtaactaatctgccaatttggatttcccgaactggccggttgtttcattccagcccaatcagaaaaaattatagacagccgaccttcaacgactctcttcttctttctctgacctactctccatccaattattctgtctcctcgcttgtagacatattgagaaggaaacatagaaaacggaacgaaagagagaagagaaaacaggagaagattaaacagacggtttttccggttctctttcttgtgtaaaaaaccccctctatctcttcggttatcccctcgcttttcccacctatcaatctcgttcgtcctaaaagatgccttctcaatcgttggagaccacaccccttcttcaaaaccagaacgctactaccgtccacgctagatccaataagaaacattctcagccaaatgcgcacgcggacgagtccgcattcgacttgagagctagagaggacctcgaggtgcttgccttaggtcttggcgaaacccacggtggaaagagcacatttctacaagctgttagtacactgaaatccaactgtatcgtcgcttttagaatacctgatttacaagaacattgtcattcgtgttcttctccgctcccatccagctcttcaatgttatcggagatcttgttggcacgggtttgttagcctctccattggctatcggtaagtcctttatgtgtttcaaacagagacaagcaaatcatcaacaatcgctccctcactcactcatgactcacaccctcgctcaactttctctcagcttactgtggatgggttctcggtccgattcttctcatcctcctcgcctttatcactcaccgaacgcttctcgtcatggttcagttcacgttagacgaccctaccgtgtacacatacccagacatcgttggcaaagcgtttgataaacgattcaacgtccgaccctggctcaccgggttgtttgtgttcgaaatctttgcctggaccatcgcgcttgtgatcctttactccgacacgctatccgcccttctcccgttcttctcgtcgactgagtggaaaatcgtttcattcttcatcattgcacctctatcgttcatgccgctccacttcttgagttatacctccttcctcgggatcactacgtcattcatattgatcgccatagtgcttctaaatggtttcatggctactagctcgcctggatcgattcttcacccggagccgacggatatttggccggcttggggacttgctaaagtcggtgtcgcgggtgggctgatgatgagtgcttatgttcgttcttctgtgtccccctcttcctttttaaatcattggtaacaatgataaacacgtctcttggatcctgacgcaacttctttcggcgcgtctcgatagggtggtcacgcggcttgtcctgttattgtttctgacatgaaagacactacgaagtggagaaagttggttgacttgagttacgcggtcgcattgtctgtctgcttgggaattggctcggctggatatttgatgttcggaagggacgtcagcgacgaagtaagtctgattcgccatctttttgacgtgagtccataacgttcttttgctgatcggtttgtcttggatcctcctcgttcagatcagtctggatatttccaagatccctggattctcttcattgattagcacgatggcactctatagtgtggctataaaccctttgactaaggcaagtcaacctcgccactatactcaagcatacaagccgcaaactaacgtgactctgtgcttacatctaggtcccgattggtatgaaaatggtgagtgttctgttttctgttttctgttctgttttaaagaaatactgattagggtttgttttgaaaccccactatagcttaacgatatggttgaaatcgcgttcaacatcatgccaaagccaaaccctgcgctctctgctcagcagactcctagttcgactcgacctccctcgcccactcttcaaaagtcttatgcgagcgttgcagccggctctaccggagatgatgatgagaccgttatcaacgctgaggcagaggctcaggaggaggacattgtcactcaggtcaaagcctggcgaagggcagagatcaggaaggcatggattcgaggaattagcaagatttctcttgtaatcagtatcgttatcatctctagtcagttgtcattaacttaaatctacggattttcattaccgaagcggaacaatgttcttatcatgcgctcttctttctttcaatcattgcttttcacagttacatttccttcattcgagctcctcttggcattcatgggttcggcccctgcattccttgtctcggtcatcatccctcttgccgccaagaaggtttacttgtatgatcatgtaccagccgaaccgacctcgatgaccacctcggtttcttctttagtatcgtccgctccgggtgagttgtcggaggaaagtcgaatccgactggaggaggctaggaagcgagtaaattggagtgtggaaggttggtttgactggtcgttgatcgtctttggggtgtttggagcggctttgggcgcctgggggacgtttgtttgatgtccttcgttcctttctttgttttttctccctcttccatttgtgtcatcgttttccaaatattccctttgtttgttaacctttctttctctactcagcaatttcccatcttttctgctcactgctcgttctgttttccttctttctcgccgttttgcttattcccttcaagatttccgcttctttcaaatccctctaatatagactcatccgtcccaacaccacacaaaaagatcttttctcactgtcgttctcttgtacgcttaagtggttcctcgtttgcgcatgctatggcgcaccagatagatacttcattcccccctcctcccctctttcccgtctatctcgacgggttcgttcattttactgtttcctcaagtagatcttaatgtagcaaaggtcttcctcgtgagacgtaaatgatcttttatcccagaaaaagccttcgtcttaagttcacatctagggagagaaagggtgtacgcgggtatgcgagtgtgcgtgcgcatgtgtggaaatggatgtgggcgtggatgtgagaaagtgtggtgttaaactgggcatcagttgcaggagtgtcatatggactgccacaaccgcttgtgatcgagggaagaagcagctatattttctcggctgcctgcctgaccacggcacagatctgttgattgattcaatcatgtccgattctctatccctatataaggcgttccgcgcagtttcatctgattaccacggatccagctccggcggatgagctttcccatgagagaaataaaaagagtcagttaaatagaaaaagagagaggtaggagtgggcaacagaggactgaaaagttgagtatgtgcgcgggatggagagaaacggagaaaaatagccttcgacggttgaggtctcaaccggtgcgggatgacgtcgcgtccgttcgtccgtatacctaccgactctctgcgcccaacctcgttctatttggagaaatctgagacgccccgatagacatggatccaaggatggatatatatcagcctgggtgtgcctagtttcttcttcctcttcatcgctcttttccttgaaccacatctggactgaaccattcgatagtcgaccgaaccaaatcgtgcgcaagagtcattcacgatgcctgataaagtaagcatccttccgcttccctctttaatccttattatcttatctgtccattatatccttcggtcgtccgttgctcctctcccgaggggattcaacatccgtcgggagaaaactcatgagtagaaacagtgaagctcattctgtcttgtctcatcgatccggttgatcaaacgatccaggcttatactcttctggacatatcacccaaccagtgcgttctcgttcctcccctagtcttctttaacctcggacttgcttcccgactccagctcttattccgagtagtttagcaaactgaatccaatcttcccgcgccgatctggatggcgccggaaatccagaatgttgacgcttacagatgcggataggaactcgagatcggatatcccgctgcctgacggaaagattggggaaaacataagagaggaatttatgaacgggaaggatctgacgttcgtcttagttctctattcttttctctctatcactctctttcctatcttgccccctatcttctttctttctctttggagtttcagttattgagagaagatgtctgattatgtgcgcgctttttcttgattgattgggggatgctgtgtggcactgtggtttgggctgggctggactgaacagcgtgacagtttccgttgtagaagggaaaatccgagcgtcgagctttgcagtcaattgaatcatgagagtgcgtggtctgtaatgtacgtttacgcgtccccgactatatggatattcatttcggcttaatctcgatgcatcctcctttcttggttctaggtgatatcttgtgtttcattcatattctctttatgtattcatgtttttttatcactcgtctttcccttcgtcatgaagcggtgaatgtacttctgttcatgtttcaccaggaaacatctctcccagactcagagtatgaaaagagaggaaacaggagaggcccaagcaggataagacgataaggccatgttgaatatctgtgagttgagtagaagcgaagcatatgactgtatagataggattgggggctagggataaataatggcgacatcccaagattatgaacaagcgtgtggtagtgaaatatgcaagaagagagtctagttaagaaagaggaagagaacattttattccgttgtcggaggggtggccaaacctgagttgatggcctcagtagcggcctcctgaacaacggtctttaccggctttcctgccggtcgaccgatgatgtgttcgatttccttcaacagatcggtcggttccggatcctgggccaagaaccaaggcttgcccatgtagtttctgattccgtcagcgcaaagaacgacgacgttcgcgttctcgttagaaccaaatcgctcccaacccccctgggggtacggccgggtatccttgagccagtcgatcgcagagtagatggccgttccggatgatcctccaacgaggagtcctaagaaaagagagaatgaagccaatcaatgtaagcgcttggcgtccctctttcaccgacacataatgaacaggtctttaccttccaatcgatgaactcgcttagccatagcgaaactcggtccatcgatggaccgcatccagtggtggatcaagccctgcccaggcttcaagactgtgaataagagaatgaaaagccaaaattgagtacatctcgttgtgaagaaaagggttagggcaacgacaggctggagcaagagattcattgcgttctaggcatgattctcttaagcgaaagtcgacattcaggtgtatctctattgggttcgaattccttaaattaagaaaaactgagccaaccttcctaataccaattattccgaagttagccctctgcaaaagaacgagacaagaaaggtgacagcgatgaaaaggggacttgctgggatgaaatcgtaaccaataccctcctaagaatcggaagaatggtgcgagccaggtgaaaaatcagcccagggaccacgacatgagcacacacagaagttgcttacaacttcgtatcctccgacgtcaccctctccattggtggctaagatacttccgatcgggtcaataccaaccacgacaccgaactctccctcggcccatcgggcgttcgtgctctcatcgtccaaccctccggcggcgtttctcatggcggtagcgataccagtgatcgttcctccggttccgctgccggcaacaatgaccgagagcttcttgttgggcaaatttgaggtggcgagcgagtgaacgatctctgggtaggtcgtgttgaaatgagctgacgggttcgatgggttcgagtactgatcgaggataactccgtgcggcagttgctgctcgagcaatcgagcaagcatgatgtgagacccctcctcgaatgagcccttctcagtaggtgttctaacgatctcggctcccattgctcgaagcgtcatctccttctcgagagacattttttcaggaagggtgatgatctgtgatcggtaggagcccggaatcaagtacaaattattaaggaacaggtggcgattagaacagagaactgaaagaggaaccaaacaagagccaacgtacgcatttgtagcctcggatggcacaagccatggccaaaccaattccagtgtttccagacgtcggctcgatgacgatcgattttccagggatcagccgaccttcttgttcggcacgaaggaccatggctctggcgattcgatccttggtagagcctccggcggaaaagaattcggctttagcaactgtgtgaatttgatagaacgttttagttgagtcagtggagctgaccacacatgacaagtgtggcaaaacgaagggaaagaagtataaggagcggatgaaggagaaaaggatcaggtcgacaaggaagaaatgaaaacatactgaggttgcacttgagttcctgatccttctttaggttgttgagcatgataagaggggtctgtccgacggcatcaagggcagaatcgagcactccgttagaaaagttggtagtatccatggcgaaaagtaaatgtggatgggtgagtggttgtgcttcaggtgttgttggttgtgacggttcaaggggaagaaatttgaatgcaagtcagagggtggacacaacaagaagggagaaggaaaagcctgagggaatttcagaggggaaaattttaaagccaaggggagacgagccaaatgtcagtcagccagaaagctcgatgaatacaatccagcaagtctgagtaagccctcgaatacaactctaacagtatgttacacaatccaagcaaggcaacgaggcaagcgcacacgttcagctcaagtattgaaccagagagaacaagacaaataagagaagaagaatattggcaacgggcgacgtatggtgccattcagcttatgtaagaaaacagagagcagagcatcagagcatcagagcaggaggtcaatcaacattgatgagttgaagagaagatccatgtcgtgcatgtatgtgtgtgtatgtgttctcagaacagttttcctttccttcctttctcttctttctcttgaggtttatatactctgagaggcttatcatctattcggattaacaggtgcgcacaactctggcgtcagcactgactgggaatcgtctgatttgcaaatcttttctggcgcttagtagtcgctctgcgtcaattgtaaccctaaacaggaaggaattctataagttgacatttcataatcgtatgatagatagctagctagcaagtaagccagccagcaaaagagacaacgtgttttcactcaaacagctacaggtgcacgacgtcggtacactcggagcatatgtctataagaaattgagagagtgatatcgttgttagctatcggtcacggaagaaaagaagaaaaggacaggatttgagcaaaataacatcaaccgtacctcatgttttccaacttgacggggtaacccttgcctactccatctggcaccctgaaccatcgactctcactcttcttgacgacttcccactcgcctctcgagcccggtccagcatcctttccaccggccagaacgaggtccagtaagaactccaacgggaacgtcttctcagatttgcctaccggcatggcagagaacgagccggccgactcaacgatcatcagcaacgtccccggttgggcctgtgccgtcaggttggacaaaaaggcgatggtcgtcgacctggaagccgtcaatagctcgtgagtagtgtagagaagagtgattaaattcgctcgggggatgtcgatccgagtagcatccgccggcttgaggatgtcgtgttgaataaagtctacctcgaaccgacttttcggaaggttccactcggtctcgattccggatgacatctgagacagaatcggaccccagtttccagagtcgactgcctggacgtgaaccttggcaggcgtgccccgttcacgggtggtagctgccaaagcgatgatctccgatccgggcccggaaccgtagcagagaacgttgatcgttcgggtcgggatcacctcgggaaccggctcattgccgttcgaatcggaaggaggactcgatagatccaacgtggctaccgcgtcctccaacccttcgtccacgtcactgtcgttctcgctatcatctccctcctcttcgtcgtcctgctcctcctgctcactctcaacctttgtaacagcaaacctctgttctccctcaagtggctcaaaaagtttgccaacagccttgacggcgcagcctccttcgtactcatccagatcacctagcatagctcggtagccgagcgctcgcccagggacccatcgagcaacatacgcccagagccaatccggcttggaccgactgccgaacgcccggtcgtagtctctatcgaacaatgcgcccttgacggcttgtaaattagtctggtacttttccgagctgatcgtagaggcagaaagcgagccgaggaaggaaaggatcgtcaggtatggtttcggatcgatatgaacatttcgggagctcggaccgttaggctcagcagagactgcctgtcgtccggtaggcgcgttcaacactcgttcctgcttgactgtgggcatgggagtagcgagtgtgatacggatgtggtatttcacgagcaagagacaattacagagagaaattcagagaaagaaccagacgaaaaaatgtagtcagtattcaaagacttccagagaccagagaactagccccaatttttgggagcaggagaacgttctctcaagacgctcaccgcacctaatctctccttttttggtttagcatcccgctttcgatgccgaggcgctccgaggggttcctgcttgtatgagaaatcaatttggtctcttttgggcatgttgtatgtattcttgtataagaagtatatgtgtgtgtttgtgtcgagcggtataccggataagaagtatggaaaccgcaagttctcaaaaaatgtgtacagcttttgatccttgataatatcgcacgaggaatgctcaagatttaaatttgattgatcgacttgaatagagcgtattagaccaaaagattggagcggcataatccgaatatttgctcaacgtaatcaatgcatgtacctatacatatatacataaagtattacagaccttctaatttgaccattaggtcaactatttgagacttcagtctgtgccatctctgatctcttctcctctgtctatatgaagaatgtatcctccttgcccgtagctataatgcagacgaaaatgagcacgttgctctagcagggagtctttccgtttcgaggcatagtggtatcgaacaaatgaagtctatagcatgatgttcggtgatgtgcccccgagaaagagaagatcactatattttttacgccttttgtcaatatatctcggtatccgacggatggagcgagcagcgggcgtctgatcacgtgaatagtcacgtgtttccgttacatgtgtcacgtttcgcttggacccctcattttttctctagtttttcttttcttttctttttttctttttttttccttcttctcgccctttgaatcctttgaagtttcttagaccattccccttctctctttttaactctgtaggtcccaacgtttctcaataggccccctttctctcgcctctccatcagttcgtcctcccagtcaatagtttcaccgggcatttctattttgccgttaactggggaagattgaacgagaatggcggatgttgcggaacgaagggggaattcatcaagcttttgcctaggattgcctaggaagttttttccactacctgatactaatcagaagccttcttttttccttccctcaactctcatacctacttgccgttacgttccccgcttgcccctcctttccagtaaaaatgtccgacactgagcacgatcacgacttcgttggaggatccgccggagcttccctcacctaccccatccaggtcagtcctttttctctttctagctgcgaccagcttctttctttttcgccttgaactcagtacaagaaaaaccgagaggatcaaaaagcttagacagaattctctactattcatcttgtttagtgctccgccctcaggaagggaggacacgtcgtcatcaagggacgaccctgcaagatcattgacatgtccacttccaaggtacgctttcttccctatcgatttgaggcttgacgcagactgactgatatctttcattgcattctttgtttcattcagaccggaaaggttagcttttaacctcgttaagtaggccttcgggccgtcatcgctcagaacagaattggcttactgaccaggtcaatcttttgttccttatcatggtaatcttgcatcccatccgacaactctcgcctactcgtcttttctcggcaccaatagcacggacacgccaagggtaagccaggcttgcgtttatgaatgatcggaaagaacaaaaccctcatctttccttcttttcatctgatatcaattcctatcagttcatctcattgccaccgatgtaagcccatacgtctattctcgtgagctgacctgtgatttggttcgatactgataggtggtttcgttcctcatctctttagatcttcaccaacaagaagcttgaggatatctccccctccacccacaacatggagtctcccagtaagtttctttcgcttttcgttccgaaattggatcattgttagctaaccgtcacgccgtttctccctctttacacccagtcgtcacccgagtcgagttccagctcgtcaacattgacgacggtttcctcaacttgatgaacgatgagggagcttccaaggatgatgtcaaggttcccgagggaaaccttggtaaggagatcaccgacctcttcgaggctggtaaggagctcgttgtcactgttgtttccgcccttggagaggagttcgctctttcctacaaggacgtcaccaaggccgtgagtttcatatgttttctcaaatctgaattgaatagaacagaccgagagcacgcaaactgacaaaaatgtgttttcgttatctgcgtatgccggctttgaccgccctttccgttcatcctctttcccttcaaaggattaaacgtctcgaacactggttgtctttgcttctttgttatccccccttgctcgtcctgctcttttgtgtctcatttttctcgctgagtgccgtcctccgctcggtttagtttccccaactatcatatggtttgtaaaggaaacggtagacgaaacctcacgccgtgcgtgctggatctgtattgagaggttgttttgagtttctgaagtgaaagagagacctggattgagaatgtacatgcagtgcatgtatatatgtcgagacgtgtcaaataagcaaccaaatgcaagtaagagatgaaaagaatatagaaagtaccagaacgttttttaaatcaaatcacatcacagccacaaagacttccacgctggaagtagtaaattctgtaaccattgtcgtaaacactcaacgtagtgagagcaggccgagagtgttgattaagcggacgaccctcgatcggcctctgctgtcatttatccttttcattctccccatcgaggtttccagtctcttttctcttccccatcctgcgtcctttccttgtttgtcttgttcctaccatctacagaccaacaccctcgaacatatacatactcatacatactcatacatactcatacacacaaacacaagcacaagtacacacacacgcacatacacactgaatgtcaacagtcgttcagtccgttcccaagtctgttcacataaacactgctgctttcgctcccacaaagcacactactccttcgaccgtgccttcagcctctaatccgacagcgattgtaccttctgttcctgtcgcatccgcctctgcctcgactgtcagttctgtagacaccgagtctatcgctaacggacacaagaagcgcaaacagtcctcacccagtccttcctccttgaacgggggtagcgactatggaggagacgatgatgagcttaccattggctctggtagggcaggtggtgggcctggagaaaggatcggatcgggaacaggacctggtgaagtcaatgagcccggcatcagcgtgtaagttgttattttttctctttcttccttctgtcgtcttttttcttctacctcagctgtttctatcgtcccctagtcgtgtgggcatgcgtatgttgacgaaatggcatgctgatatgatgcattgtcgtcccttctcgattttcttctacctacaggagcgaatcgagacgaagagctagagtgcttcgtaagtatctagtctcctttcttttgaccatatcgctgtcatccaagcatctcaagtgcatatttctcatcagtctttcctttcttctctttgtcaaaaatcactcaggtaatcgagcctcagcccaacgaagtcgggacgccaagaaaaaccatcagtctgctttggaagagcgggttcaagaactcgaagcccttttggctgcgtcgtcccttccgggatcttctgttcctgtcaaatccgcccctcagccatcgacttcttctagtctttcttccgagtcggcctccccactggtcgttacttcagtcagcactactacctctaggcctacacctgactctcttcttcttcggcaagaacttgaaaacgataatcttgagcttcgaactagagtagtcaaactcgagggtctcatcaggggcctcgtcggatttttggagagaggaggagttcaggcttcagctcttcaatggaatcctcccgccgccggacctgtttccgccgttgacaagtccaacaaggacaaggatcaattccctatcttggacttttcctgggacggacctgagcttgtccgggatcagggcacttcagctgccgatttctccgtgtctttgacctccaaggaggaggagctcgtcaatgatcaagtttctcaaccgccagcatcagctgctcctgccctttcagacttttcattctcccctccgtcgtcccctttcgactcctcttttccattggcgaccatgtcctctccaggtggttctccggacaatcggtcccgatcgttcctgtcgctctctccatcagcatcgccttctcaggctttcgctctcttcccgactctgtcctcagaggccctcgatccgaccaggcctctttctcctgattacgcctcgttcctaaaccttccgccatcacaaggaacgcccatcatcgaacctatcagttcaacgtcctctcagaatgcatcggtctctgtttctacttcactctctcgtcagcgagattccttctcttcggtcgacgataatgactttcttgatctctcacctatgtcctttgcctcagacgactttgcttgcccatcttcttcgacaacggctacgatcagtactccggcttcgcttccttcgtctgctctaggattggatacctgtctggccggtcgaacgcggtctactgtcacacactctctgcccggacgattaggcaaggggatggaaaccggagggtcgtcaatggaagaacaatcatcgatcggaaacacgccatcagcacggtggcattcccagcagcgggtttccacactcgaatcgattgttccttcttcccttccgtcctcccaagttgtcactcctcttgccctgccgtcttccctctctgggccgacgaccaagacaaggtctgccaagacaacaccttgtttgagacctggttcgccaatctccccaatctcccttcccccatcgatgacgacctcgccgtcttgcccgacttcctcgccttcaatgcccccgtctcctttgatcctgcctccaccgagatcatcgatcacgacgctcaactcattctccactcgtcgactcccgccgtcactcaagcgactcccatccatcacgctgaacatcagtactcccggatctccggcatcccaaccagtacaacagccccaccggcctgcgagcccgatggttcgatccaaaagttcttccagtggatcgaccaaggagttgaacatgagtcgacttcgaacgtcagctcatcgatccggcctaggcagaggatcccggttcctggccaaagttctccagggcacggtcatccccggtctgccaaacgaaggaggacaagctatgctgccccctgcaacgagcaaggttccttctggcctgtccaccaacaccaagctagagattgttcgtccgtccgcccggtatcatcttgtccctcagtctctattagctatcggccaagtgacacccttggccggaccgtccagtggcccatggagcagaccggcatccaagagcccgcagcctcggttgggcaggacgcactcaaacccgttgcttacgctcccggaatggcaacggattgcttcggactcgactggtcccacctcaccctcgatgactccttctgggccgagctcgggctcgggctcgagttcgggcaccgcttggttagtcaagagggacgagatgaatccctcatttggcacgatcggcttcggagcaggcaggacggctgcggcttgttaggcgaagacatagattggtccgtgttgaaaagcgtctgtcaatgggtttagaacggtggtgttggcatatttttgttttgctcgtattatttttctttcaggatgagaaatcaggtaagcttcgtcatcttttcggcttggattaaccaacaatgtttgtttatccattcttatttctaaatttattttgatcatcgaagatcttagatcaagactcgggatttttatcctctttatcataccttgaagatattcttgtttccctccccatggttccgtttcctcattcatattctttcggaaaccttcttcctttattcgtggcgcatcatcttgaccccaacgtcgaggagggagacgaggggcttttctaggtaggataactgctggatgttatcgagtatatagacggaggagacgttatgggcgatgagcggtctacgattcgactgtggaagggatgccaaggatagaagacgaggatggtcgggatgatgaagatgaaccgaagacggggatgcagacaaagaagtagattaggaagcaggcctaagctctcgtacttgattcgtccattgcgtccaattgagactgcttatgttgatggaacgttctgagagcttaggccttttgttcctttgtctatttttcttcgtttttctcccttccttgcgttcttgtttatcactcttcctaccttttcttttctcttttgccctcccctgtctctttcgtttcggatagacaatcgcatctaaatatctccttgtttcaaaacttgacaccgcctccatgtgtccttcttattcttccctcaatgtttcttggtctcttcgtctttgggctgtttccagattatcattctccatgcttcttactatctcaaatttattcacgattcaaaatcccagttctacatttgtttctttcctctttgttcttccttccgcatcacgacccctcttaatattcacttttcgatttatttccttctttaataccttttttcctcatccattcccttataaaccacaaccaatgtattccctagcttttctctcactttccattcgttcctttctcctccaacctttcttttccttccctcttgaatatctcacaccagttcccccttatttcttcctggcctagtagacttggatatatatactcgttcttcattcacctccctatcttctggacgtgctctcacaactttggttctctcaggcggagaatttcgctccctctattctgtttttttcccattgatgacactggttttctcaagatcttcttacaagtcgatctctgcaacagaaacacacgacgggatttgtaaacccagagaaggaaggcatgaacaggatatgtttgtttaagagaaggaataaaaaaagaggaggattgggttggaaatcggttgaaagagaaacggaaaggatttagaagtctagatccggagaagacgggaaaaaaagcagcagcaacagcagcaatgataacaaagagagaagcaggccacgggatctttgaatgaagggcggaggggatgggaaagaacaaggaccatagagatgaaccacaagagaacaacagctgagaaaggagagaaggaaaagatatagaatgtagaacaaaggacacgtgcgagacgtcaagaacgcggatgtggctgaggctaagaaggagggtgatgaggaagggatgaaaggaatatgatgatacattcagtaagaaagagagaggaacgaaaagaagaagaaaatgatcgcagtacaccgtgacgcgaagaggggaaaacagaaagaaacgacaaagaagggaggtttggttgtataggagaaagaaaaatcagggcaaagagtcgaatagtttagaccataagagagcctgtgttttcgtttttacttttaatttcatttcctttctccgtttaagagaaatgagcgaatctagagggatggataatgaagagaaggcgagagagtagaggatttatgcaagagttctagtacagtcaatataatagagcgctcagtcaggactttgatatttgccttgttttgcacacacaagagagagaacagagacgtactcgaatcaaagagccaagctaagaaaagtgaatcgaggaagttgactagaaaactagaccccccggatctatcctgcccctgagaggttcagctttcgtcctcggtttctcagttgtggttatcgaaattcgaggccgaccaactgaatccgtggaactgagcctgaacggtctctgatagatgcgagtcgtctacaacagagtccattggaagttccgaggtaaactcctcgtcaaagttagatgtgtcgattgcgctggcctgtttgttcgtttgtcgaacggatgataaagaagaggtggacacaagcaggggtggaggataaaaagaaacgagttggcaaccgatcgaattactctgcaaaatgacggaactgtaaaacgacttaccacagcgggtttgaaaggcggttggattttcttttccacaagtttcttccagtcgatgtgcctggcaaagaatggatggttcttgatgtcctgagccccattgcatcctagtcgatgagctgggtctcggtttaacaggccaacaaggagcgaccgagcctcggaatgaacttcttccgggaaccgaagaggctcctgaaggatcttgcgatacatctcgttcgtgttctcatcgtagaacggaggaagacccgtgagctattgggttgtggtgatgatggagatcggcaagataacattgagtcgaattcaacagctgttccatccaagagctgacgaagaagatgctagaaagacgaaccatctcgtagagaagcacacctaacgtccaccagtcaactgatttggtgtacccgtgtccggacaacagctccggagctaagtactctggtgttccgcagaaggctgttggttcaaaatcagcgcatgtggtagaaaccccgaattagaagtctgctgaggaagcgattgagaaggtttatgagaaagacgcactgtttgtggtctcagattcagtcatattgagcttgcaaagcccgaaatcgcacaaagcaatatggcctgtgtaatcaagcaagatgttctcgggtttaagatccctgtaaatttctcacaggaacgcgactcgaacagattagcgagcgaacgtcatgacatgacatgacatgaggaaacaagaggggattctaacgtaccgatagaccacattaaacccgtgaagatgctcgagcgcgatcaacaactcggccgcatagaatcgacttcgaacctcgttaaactttccttctctctgcagatggtggaacaactctcctccattgacaaaggcgaggacgatgtagagcttttcggtcgattggaatgaaaacttgaggggcacgatgaacgggttgttcacctgagcaagaaccgttcgctcggcgagcgtgtggatgacttccgaccgggacacgatgtgcgcctttcggatcgttttgagagcgtagattcgaagggtgtctcgtttacggacctgcatcacctttccaaatgaacccttaccgatcactttgagcagttcgaacgagtcgatcgtgagcgagtcgttattcgtctgtggcttgaagccgacctgaatgttaatatcaccggttccacccgtgacggcgtgccattcgtcgctatggggcttatcctgtgagtgttatcacaaaaagaaaaaagagttaaattgacaagcggagatagacaaaacattggacagagcagaaacgaacggtaaaatcgggcataaacttgacaccgcctaggaagatatctgagttacccattccagattcgtccgatgacgaaggcgggcttgatcggaggtaggtctggatagagatctctgatgctcgggatacatcgctaagcgagatcgatacgtgattcagtcatccaatgattcagatcgtcgattccagaaaagatactcacaatgttgcggtgtatctccaaacgggtccgttccactctcctccaagcgcctcaatcaatacttcattcttatcgaactctaacacgacatagggcagccaccagcactgctttctctggacagagtccctattggactttttcggaagagatccaaacgaggatgacactgaggaagggtgtgacttcagggcagataatatcggaggaggaagatcgactgtgtcaagagaatcagatgaatagaagagatgactgtgtcagcatagttggctgtaaagccagggaagcctctgctcagggcacgttcttgttcgctcttctctcttgaccagagctaaaccctgatggaaggtattgagaggacgtacctccactaggcaagctcaacgacttggcggcgttaacagtgatcttgagcaatccagtcttggcgactggcttcgtgtctccaccattgctaccaacgggcacggcctctttggggtgcccttgtgggtttccaggggtaggcgtggtggatctagagatgtcagccggcgagggcacggttgagtttgaccgagaggaggacgagaacagtggattgacttctttgagctctatatggaagtgaagaatgaaggagacatgttggaattagaatcgtcagtcaagatcgtcccgggggggttgacaagaaaacaaactgaaacagaggccgaattgacagagaaacccaacggagggagagatgtgagagaacggttcgaaaacagaagagcacaacacatactttttcccagtttccaagacatggcgaaagacgaactgaacgatgattgaaaggtggttgggatgagaagagaagaaagaagacgaggtgtaggtgactgaagggacgaacaatgaagaggagagtcaaagaagccgagctgcgaaagaggagagatggcgtaaaaaagtatgggaagagatggtcatcttttctgacagtctgtagtatatttgtattcttttgtagtcatttgtgccgatatatttccgtattcagtttattaattccaagcgattcgtagtttggcatatacactgttttgtagtcatacgtgacaggcgaatcgactacaggattgagtactcacatttgtattcagtcgactgcgcatttgtagtatcttttggtcgatcgtcccattcttttctctcgtcgtcggtaaacacgaccgccagtgtttttcgctttttctttctttctctttccctctgtactccttctccctttacctgcttctctttcctcgacctcttcggcaggccgttgaagactcgtttactcataccccacatctcgcatatatcactttcctccttccagaacaagttctgagtcaaccgaaaagaaagaaggcagaagaaatatattctagatgtccatgcccaacattgttccccccgccgaggtccgaaccgaaggactcagtttagaagagtacgatgaggagcagtacgtatttcttctatagctgttctatgagacaagatgcttcggctacaaatccgactgtcgggtgctaggtcttactttgatcatgcttgctgaaccaatgctcctctcactcttcaccccacatagggtcaggctgatggaggagcgatgtattcttgttaacccggacgatgtggcctatggagaggcttcgaaaaagacctgtacgtgctgtcgccctttctccgaacccagtttcacttctatggtaccggacaccgtgaacaacctgagccaatccactaattggctttgattccttctgcgtcgtttcgatgtacatacatatacgtctggaacatatccgtgctatgtaaccaggccacttgatgtccaacatcaacgcgcccaaggacctcctccaccgagcattctccgtgtttctcttccgcccatcggacggagcactcctgcttcagcgaagagcggacgagaagattacgttccctggaatgtggaccaacacgtgttgcagtcatcctttgagcatcaagggcgaggttgaagaggagaaccagatcggtttgtcccagactttcctggtatcaagacagattgggtgcatatatcctgcttacactatatggccttttctttccttcattttctcctcttatccttcctcttacctggtggtatgtccaatcttaatcggtaaggtgttcgacgagctgcgtcccgaaagttggagcacgagcttggcgtgcctacatcgtcgactccgcccgactcgttcacctacctcactaggatacattacctcgctccgagtgacggactctggggagaacacgagagtaagtgggccttctttttcttttacgatgataataaatagtttctctcggttggcccgactaaaatatatgcttttgtcgcgcatgctcctttggaactctctgggaatctgtagtcgactacattctcttctcaaccacacctacagaacacactggaaaccctaacgaagtctctgacactcgatatgtcaccaagcccgagctccaggcgatgtttgaggacgagtctaactcatttaccccttggttcaaattgattgcccgagacttcctgtttggctggtgggatcaacttctcgccagacgaaatgaaaagggtgaggtcgatgccaaatcgttggaggatctctcggacaacaaagtctggaagatgtagtcgacccttctttctgtacagtcatctcagttcgcctgttggttgcttgcttcttgctcttctttctatatatcttttttcttgcctgggtagacttgatctttctacatagcatacgcatacatacataaactctatttcttgttctttatctctcttctaagggaatcttcaagatcaatttctttttgggctacaacatttcagatcaatattgcttttcagactacagcatcttgagaaatcagttacgtccgaatctcgaaggtgctcaactgcactgaattgacaatttgaatgaactaacaaaatactgtatcacacgaccatcacaggaacaacccagaaagaaaaaagctgccatctcgtcgaccgaccgaatccaaaaaagtggaaagcagccggtcgacacaaatgggaaggtggaggtccctgacaacacaagccggcagtgcagtggcaaggtcatcgtgtccggccgtcgtgcaagcagaggatggccggacgggcaaggcaaaaagaagtaaaccagatgggtccggtggacccatataagtggttaaacttataagaacagatactacacatgatctaagccaaaaggccagagaggatgaggaaaaagaagaaagcggccatagaccggacgaccgcccgttcttataccttttcccatctcgactttcaccctcgcgttttcaccgtcacgcttgtcacgctgccggcagatatgtcagggatgtgacctgannnnnnnnnnaggagtgataggctgacatcgggagtcgttcaggtagatgacgcgtatacatgcgaataaaagaagttctcagaggttagctagttgcagaaccgacatgaactgtgtgtatagctgatgttgtctgagcggctataaaatcatatgttcctcctcttatcgaatgaagaggagggaaaacaagtaaggccctatagggacaagatgggaaagatcgtgatcgcactcattggagcagccatctcattgataacatgaagcaatacgctgaacgaacaccaggttcattagctactctgtttcatcatgaatcacgttctgtatctcgaattcatgtacatcttcacaaagtgaattttggtcgtgtaacagttcttaacaaagcagctcgagaatttcaaaatgccgagacttactgggacttgacatcaaatatctcctgttcagctgctcgtttactgcttctactatacggagaaacatcgaattcatatgaaagcgcacgcatgtaagattcgatggaactctttccaaagtttctgatgagaagtgagttccctaagatctgatcgaaggtgagagtattgatgttaagaggaaagatattcaagtattaagatgacttaggtagcgccaggacgacagcaagcacgctaagccatctagacactcatctcctcttcaacttcccatcctttttctatacatcactctcaacagctctttcttactaatctcaatatggactacgacgagcttgaagagcgagacggtacgtgaagcttttattatctaaatctgtcgttgagtagatttgccacatatttggattctgctcataatttacgattcgtcgttttgctcttgtgtccgaacgaactctgacttttccatctctttcaatgatgccctctgcgatcgttttttcttggttcttctccctactccttttccgctcttctcatgaaaccaattttcgattaaataggagtcaggttctcttggaacacctggccttccagtagactggaggccacccgaacggtcgtccctgtttctgctctgtacactccattaaaggagagagaagatctgcctgaggtcaagtacgagccggtgacctgcaagaattgcagggctattcttaatccttactggtccgttcttctactcctgaatgcttgaaaatgattcccctgtgagattagacatccgtcttctctgaacaaggaagtttgagtcgtgtcgtgtgaagatcatgctgatagctcatctatatatttgcacgtgcctccctatcctctcttcctgcttgactttcgttagcactctcgacattcgaagcaagttgtggatctgtccgttctgcttgcaacgaaaccccttccctgctcactacaaggacattgctcccaacaacctgcctcccgagcttcttcctgcctattcgaccattgaatacaccctatctcgaccagctcaaatacctcccgtgttcctctatgttgtggacacttgccttgacgcggatgacctcaaggcacttcgagacgtgttggttgtcagcttgagcatgctacctcctcatgcgctggtcgggttgattacttacggaacgatggtgtgttaccgtgcctttattctgtcttctgttcagtttacttggaatgccataggactacaagaaagacagttctcactcacttgatgtctgaactttatatccgtcccgattggcggattaactgttactttccagaccaacgttcacgagctttcatacaccacctgtcctaaatcctacgtcttccgggggtcgaaagagtatgctccaaaacaaatccaggacatgcttggcctgaacccgtcttctcggccgactccccgacctgggcagtctatgccgcctggtgtggccgggttcgctgctagcagattcttgatgcctgttcaacaatgcgagttccagctgacaagcatcttggagaacctccagcgagatgcgtgggctgtcgctagtgataagaggccgttgagaagtacgggtgttgcgctgagtgtagctgtcggcctgttggaggtttgtgtgctttcaaatacgcgttcttttagacacagatatgtctgactgattgatttcgatctcccttctctttttttctctctcaaagacctgcttccccaacaccggagctagagtaatgctctttgctggaggccctgccaccgagggtcctggaatggttgtcggacccgagctcaaagagcctatccgatctcatcacgatatcgaacgagactctgtcaagcacttcaaacgagctgtcaaggtatgctcctgtgtctactttgaagctgtattcattcaatcatgttgttcttcgtgttcatttgaccttctggttctttccttcttgttgtcgttcgaatatcaagttttacgacgctcttgccaagcgagcttccaccaacgggcacgctatcgacatttacgctggttgtctcgatcagattggtctactcgagatgaagtctctttgcaacgccaccaacgggttcatgattctcgctgatagtttctcgatggctatctttaagcagtcgttcttgagaacgctcacaccggatgccaacggagatctgagaatgggtttcaatgcgacatttgatgttcaggtatgtcctctgaattgtttgggaagagtttaggtgaaaaagggatgcgttcattcgctgaaccatatcttccatttctttttcatttctctccggtggcattcagaccactaaagacctcaagatctccggagtcatcggtcatgttatctctgctgccaaaaaagggtcgtgcgtgggtgagactgagatcggaattggtcagacgaccgcgtggaaggtgtgctcgctgacgccaaagacatcgctcggcgtgtactttgaggtcaccgcgccccagggccaaccaacttcaactcaggtagggctcgtccagtttgtgacgcactaccagcactcgtcgggcacgttccgtttgcgagtgacgacgtgcgctcgaaactttgctgagccaggcggtcaaacaatcgcccagtcattcgatcaggaggcctcggcggtgctcatgtccaggatcgccgttttcaaggcggagattgatgatccagcggacgtccttcgttggttggacaggatgcttatcaggctttgtcagaagtttgcagactatcgaaaggaggaccagagtagcttcactttagcgcctaacttctcaatctacccgcaattcatgttccacctaaggcgtagtcagttcctccaagtgttcaacaacagtccggacgagacggcctactatcggttcgtctttatcgttttatcgggttttttttcctgttttttttctgtcaagtcaaagttgaccccgtacgttctacgcgcgtcaattcagtcatatcttgaatgcggaagatgtgaacaactcgttgattatgatccagccgacactgatgtcgtacacattcgacaaggagcctcacccggtgttgttggactctgtgtcgatcaagccggatgtcatccttcttctcgatacgttcttccacatcctaatttttcacggagagacaatggctcagtggaggaaggctggataccacgagcaggagggctacgaaaacttcgccgagttgctcaccgctcctgtgacggacgctcaggtacgaaaatttcgagttctattctcgtgaagttgtatttcagcccgactaagagtcgattcgctgtgtaattttcattgtcttttgctgtatatgtctatcaggatcttttgggagaccgacttccaatcccccgatacgttacttgcgaccagggaggatcgcaagcacgattcttgctttccaagttgaacccgtcgacgaaccacatgacgacagggacttatggcggtggcggtggaggatccggtcaggctattttcaccgacgacgtcaacttgcaggtcttcatggagcaccttaagagattggtacgtttttgtcctttatttcttctttttggtcgtgcattactccacggttgatctggggatgttgtaggggtgttgatgctgacaatgttatttgtggtttctttttcctcaggcggtcggcccttcaactagctagttgagtagtgatcaagatagattccgtgtttttatcggtcgacgcagctgtttcttttcgatcttatactttatgtgctcaggcttgtcggttggttggttttggccacaccttaaacagagaaataagaaaggtctgaggaagatggaaacaagtgagagatgcgtgaaagtcacgcagtatgaatgatctgtcttattgatatatatttaaaagccggggcgaatagcaaagtaccgacatagcgaagcccgggcgactacgaatgccgaagatgggaagaacgcggagggtatgaagaatggctgttgtcttagagataaaacgcaagatccgagaacctatccgcgatgatttcagaaacaaaggcttatttcatccctgtgatgaaatgaatgtgggaagggatgagcgtggtataaaaacgccggatgatctgtctgagctgcccggggttggaatatggattatatgaatacccactgcgttctgcacctctcgctcaattagcaaatcggttacgtcactaaatctgttcaagccaatactcccgtcagctggacgcttcccatgtcggatcttggtcgcgtccatgcatgcctgcctttctccgccgttgttctgatctgtaactccgagaagtcgaccgagtctgggaatgtttattttttgacgtttcttctggggcacagggagtcgccaaaatatctcgtcaccccttgcttgcctcgttgtcgttgtcactctgctttgtctgcatgcacatgtatgtaattaactaacctttgtcctcttcggaagtggcgaggatcaaacaaaagagatgcattgtccattctaacagtctgtatgttgaactaatctgtacatttgtgtgatgcatacaacgctttatttttgaatgaactcatcgtcccgttacttagatttcgttatggatcatcgttagcagtatcatactgtcgatcgactaggtgactctacactttattctataattaacagatcaaataacaaattaacatcctacccgttcgaaggccaagaagtgtcgtctacccgagtagtagtagctattctttaaccgggcaacggtcagtctgaccttgggatccatgggacttggcgtattcgcctcctggcttatattccgtgatatctcgttctccctgctctcctgtagatcgcctgtcttctcctaacaattttgccgtgtcagtctcggaaaagaaccctttccccaggttttttaaggatcagatcaatgaagggtatgaaaggttgagctcctggaaaatgaatgcatgtatgcatgcacatcctcttaccccagacaactcgcgtgccatccgcttcacctgtgtgatgctttcatatgttgtactcaccccttacctctttgctgttgctccttgcctcatgtttctctttgcccgtcggccaatctgctaacccttttaaaggatgacggctcattgaataacatcttctccatttttgtatatctcttccatcttcatcctgttttgttcatttgcttgccaaacattcttccgttcagctctgttcttcttcgtcgtcgtcgccgtcgtatccagctcttcgccgctcatctcggtttccctatttgcatcgctgctctgtatctgttatcgtcacacaatctctccttattctccccggtatcttaatctgtgttcatcatgcctgttgcaaagtccgctgaatcgctcgccatgtcatatgagaccaccgatgccgtgtcgagagctctgagctcgaatgaactttcttactatcttcccagcagagctaccggtgttaatgacatgtgggtcaattgagtctcctgtttgtatcttgacagtcaagatacttctggttactgacttaggttgtcgttgcgcggacatgattcgtataggtacctgcaccatcgcttggctaccttcgagcctcaccgtttcgattaccaaagaatcgttgtcatttgggctatcctgactggcagacatcctttgttggattcggctgtccgaaagacctctcaagagacctacagtttctggtgcgtccatattgatcggctcgcatgtcgtttttctggcgagcgcacaagctccaaagctgataggtatttcttttctctgctgcttgatggccactgcgcgcttgaacacagctacgatgcaccttccactgttgacgaggctatcgttagagcttcccaaaaggtatctttcttcgagaaatcgaacattggtgagtctattgccttccattgatctcatcagcctataatggactgacctcggaatccttctctcatcttcccgtgtaacagatcttgtcgctacttatcttaatggtcccaggcagctctcggcctcccgactggctcaactcaccgtcgcctctgacaattctggacttgctcctggtcaaccgagccaatttgaagttatcctctgtaccactcattatgtaggagacggcatggcccttcacaccttcatgaacgaattttactgtgtcatcggtggtgcccttagcacggaggagttgataaacttgttgaacacagagatgcaagaccgaagaatggtgagccctggaatccatctcgtcgtatatgcgcttaggggcggccatttagataactttattgaaacaactgccttatcactcgaatagcaaactcctttccccgtctcagcagaagaacgcctaatccctgcagaggtagactcacaagccaaacaaacactcaaaaaagtcgttgacaaagtcgccttccgaaactctgtgtctcgctctatcggcagccaagtccttcctcgagctcctttcccgaagaatgccccaccagaagaggaggcgatcaaaaccatcgtttccacccttgcgttctccaaggaagacaccgatcgaatcgtgaagatctcgaaagcacagggtggactaggtgtcgctcatttcttgtttgcagctgtcaacattgcctggattcgatcgaaacagggattgaacgagaaggaaccgatgctcttctactctgcgctttccttgagaaactcacttcgaccgactgtaactcctgggtcgtactttcacctcgctctcggttactacaacatcacccttccgtccttcctcttggcctcggacgtcaaccggacgttctggcaccgctcaaagtcagtcaaagcgcagacactccaagcagtcaagagcaagttccttgtcgggaagagcttggtcgaatcggacgagagacgggaccgagctatccactgggcgaagatcgacgacgccgaggctgccgtggccactgccgcgatcaaaaggtcaactgcgctcgcatcgacatcgtcagcagcagcagagtgggctatggaagaagaggctgccgagaaggatatcgattcggattcggattcggattcctcgatggccggctcgccggctcgaccggctgtggcgcttccgttgacagcacctcctacacccgaacagaccgttaaacccgtgatcgctgccgctcctgccaccccaagcaacagcccgttccttgggttgtctctgttaggcaaccttgactttatgtatcagcatgctcaattcccgtcgattgacctccaagcgttgacgaccgggtcgagacaacgtcgaggggcgagtttgttgttcgggtacacccttaaagggaaactctcgatcagtctgagttgggaaagtaaaggactcgagaccgagcagatcgaaaagatctggaagggagtcagagaagtcctcggcgaagtcttcttccaggaccctatcagaggagagggtgagggtgaagttagacgttgtgaatgtcgagtttgagaactggaccctttctacttgttatcgttgttgctaccaccttcggggacgtaggtgtgctgtccaatcattgtttagaccttctctaggttcatctttcgcccttgttcataatctcttcattcatatcttggttttctggtcttcactttgtcttgcttttgagtcgctcaattttactttgcttgtctgtatctatacgttccaaaccttgttcgtctcacgttgacactcctcgcttccaatttttattttcgttttaatatacctcttgtttcgctttagttgtcctctcttctgcttccgcaaacggacaagcacttttcggcctatcatctgttcccctcttgttatgaactttcattcaacacaaagaaaaacattttgtgattcttgctgtctatatcatcaaggtttttatgaaataaataaaataaaaacctcttctcgttccgttctatctagttttcatcattcccttctcagacattctcctttctcgatcatgtgtttaaattgcttcatgcttcataattcgtgcttctcgtctctcgttatttgttgtttgttctgatattttggtaatgaaaagcaaacgagatgaatggcgttcagacaatcaagagggttctcaaggtctcttgttctctttttcttgtagaccgcacgggttgtgtgtgggaggttgtttcaaaagaaaagaaaggagggaaaaaaaagaggagaggaagataagatagaccaagatgaaagaaagaacgaaggggcgattgaatgaacgatcatatagcacaaggtgaggataacaaaccagaaaagatatcatgagcgaaagatgcaaaagaaaatagaccagaacgagcacaatcacaagcacattcgagagtgagacaagaaaaaaagagatcatctaatccttctttgccttcttcttgacaggtccgtcatcgcccgactttttctttttcggttcatccatttctacatcgctctccgcttcttcctttcctccaccagcttcagcatccgagtctgattcatcagatgaggacgtagcggatcctccatcagaagaagatgcttggaagtcttcgtcttctataaaattgaacacgggttcccaaacagacaggtcagcccgaaatcgatacttggagatgcactctcatgaaggcttgagaattaaaaaaggaaccgagaataagaacgaaccggactcatcctcgtcgtcgtcccctccaactggcgcctttgctaaagcgaccggcttctttctcttggcctgtccatccttcggctgcttcttccttcctccattctcctcttcactgtcctcactgtcctcgtcactctccatgtcttcatcttcatcgctcagctgaacagtcaacacgtcatcttctgtcttgtctttgactttaactttacgttccatcaggaacgctttgatcggttcggcgtcatcttttgagagcgaggtgaatgagtagtcagatccaccgtccgttcggttcttgagtgagatagacatgtcgaatgtcttcgatgatgccatgtttccgccaactctgtaagaagcaaaaaaaaaaaatgagaaaggagaggtttggcatcgcatgaggtgaaaggaaaaacaaactaggaatgaacacaaagaaggaaagaggacacaccgagagaaactgagggtctggatattggcaaattcgacgaggagaggttgtttggcaatgaatatcatgctcttctccaagaaatagagttctccctgattcgccttcagattgcacttgacgacgttttgaccggatgtgctgttgatcagaacaaacggaaatcgaaagaaaaaaagtcagagatagagctccgaagaaaagatcagaaaaagaggacacttgcctgacgaaagatgaaggggggatgatcttcttgccagtcaacgctttgaagacttgactaacgaccgagaacgcaggtgcctcgtacttcctcatcaagttgttctccttcaattcctctctacattcggtcagatcaagagccggatcaaatcagatgagaaacaagaaaggacaagagtcagtgtacgctcattcacagggatgcgcaaaggagacataagactggatggtggagattatcaattgaaagtaacttactcggtcaagttgagctcagcatccatctcctcatccttggtgaattgcatgactaagtatgggtatcgagtttgaccttgcctgatagcagggtccaaaccaacctaagtgaatcaaacggaaacagagcgcaggaatcagatttctactgaagagggtttccaccacatcggtaaggtaaaaaaacgagaacaagagggggacttacgacaagctgtacatggatctcatctgctttaggtaggagaaagagcctggtgacactggagtgcataattttgtagtcgtaagtctttcctcgaagtcggaaatgagtgaggaacatgtcgatgtcgtatcgaccactatttagcggttcgagtcaagatgaagacggaaataaatatctatgagtggagaacgagcagaacgcaagaaagaaggggacagcgacaagaagaaaggtctgtacgaaccgaggagtgagaacgagaacctcgttgaacacgaccacgccctctccaccaccctcggtaatctcggctcgttccttgatcatatcatggaacgcctgagctttactgatttcctcattctcaccttcgctctcgcttccactctcttcagcctggccggggatatggaatctaagttcgaccagttcgtcaattgggcgaacccgactcttgccaccaccactagcctgaggaggctggactggcggagtaatctctaaagaaacttctgtcttgcctgcaatgttggagttggcgatggaggagagaggaatggtgaaagatggtttgtccgagactagaaatgcgaggttgggacctgttcaaagataaatcgatcataagaagtcgagtgagctaaagaagccaactaggcggtaactgaagtctagataaaaaattgacatgattagaaaaacggaccttggacatcgacttgaccccagttccatcctttgagcgaagtttctttgtgttcgagattaatgtcccagtgctgcttgatgtactttgcgattcggtcatgatcctctcgattgatgccctcaaacaccaatcgttcatcggatgtttttcgacctatcgaaatttggaagtctcgggcgacactgaaaagaaggtgaagcgtaagtttcgaaaatgacactaacggcatacatatatatgagtgctcaccgggtccagctaatccaactgatctctgcagcggtcaaggtgaccaggctctctttgtcatcttcgatagatttccagccaagacctgtaggagcgattcgaagttctaaatagacatggattggtgataaacgcgatgagttctgttggtaatgataacaaaaaaggctgagagagtgcaagaagaataccaacttcctaactttgaggttgagccaaggaaaactgaatcgagagagagagatcagttgaatgtaggatcgtgacgaaaagagagtatacagcggtaagaacatggtaaaacgaaacaaggcagcttaccctcatcaatctgtgtggtcgaggacatggtgtcagggtatgtgtgtgtgagtggttgccagtgtatatgtatgatagatggaatagaaagaggaaaaagagaatgatgagactgatgagaacgaattgttgggttacacgtcctcgacgcgtcagttgcgtaggacgcgtcgaaggctacaagcacagctgcgctccctgttactgctcacgtgtgcgacgcatatactactaacccccccggcgtgtgtactatctgccgtctagtcgattactcttgtggcgttgtcgcctgcagccctacgttctctagttgttttatccacactgcagcctcagcaggtaggacgatagacttacgatgatcttgccaatgcgtctgattgttcctccaaagcagctggaactcgagaacagtcttaacggaacagagagaacacggagaacacgggagaaagacacaagaaacccgttgagcacgttcagcatgtgttcgtttggccctggaatgtccattaggtttgtggtggatttgtaatagaatttttcctaatgacttttagtaactccgtattcttaagtttcctttccggctcatctcgtttgctgccttcgctagttctacagttggttcttacccaccacccaccgtcaacatccatctgagttctcatccagctagacacttgaatggcaatccaggaagggtccctcccgatcaccatcccttgctctacatctagttcaaacaatcaatacgacttttctccttcttccgccagacaggagtcatattcttccgttctgagcacaggtctactcggtcctcaagctgccaccaacgttccttccgctgccctttgcgatcaagcatccaaacgacgtgttcctttggcatccactgggtctcactcgagcatagcatcctcgtcctcgtcctcgtcttcttcggctgtgccttacagaccaaggtcatacagctcgtttggtccgggagaacatgttcatcctcctgacagcccgaatgatcatcaacgtcacagtccatcagccgacctgtcctcgttgacaaccccgaccggtgagattcagttggaacccgtagcgatctccaccagagcttcctttcttgccgccttttcttcctttggccttccccctctccctacattgaccattccagatggaaactctcggccagcgcccgagcccacctcggtcgaaccctctccggcatcttccttcctgagctcattttcctctcctaccatctcttctcaggtcacatcctcctcctcatccctctcctcgttcagcgcactgcttccatcaatctcatccctcgatgatttccctgtgtttgatgacaagttcatcggcagaatcctcggtaaaggctcaaccggctccgttcgcgaggtcctgtcgtttcctgctaaggaacgactgtcaccccctcaggcagtcaagatcgtccttcttcccaaaccaaagctaaagagcgctcgcaactcaacgggcgtacaagacgatgagctggcaacagagctagaaacagaaattagcctctgggcttccctgccttcccatccaaatatcctccctctcctttcttcggaacgaacacaagacgcaatctttctctttatgccctacatggtctctggatcgctctttgatctcgtccgtcgacatcgagagcacgaccgtggtcgtgggagacgactggtctctagtttccgatcattcagtcatgcttcggccacggacaggtcgaacggtcagtcaaatcagacagagtgtgcaggcttagtcggagttggtcggtcggctacccttagggagtcaggtgttggtggtggacttcggttcttcccagaggatgacgctagaaagctgttcagagatatcgtggctggtttgcaggtccttcatagggagggaatcgttcacggcgatctcaaatctgaaaacgtcttggtcgatgaagaagtaagttcataatattgttattcctctttcgatgaatgaaacaccaaatctaaagcaaatgcgtctctacatttttccttcttagggccactgcaaactgtctgactttggattttcccaccgattggaagtcaaccagtctccacaacctattagcatcaccggccatacaaatgccaataccgttctagccagtcttcaacctcatgggtttccatctggaaaaacttctcagaaccgacaggcttcttcacctctccctcggtcggccgctctgttgaggatggcacaatcgaccgcccctcccttcattcctccttccggtggatccatgccttataccgccccagagcttctccaaccagtacagtcactctctggcgctcaacaaaggacaaccttgacgaccgacatgtgggctcttggagtgctcctgcacttccttctaactactggctcgtttcctttccaagacgcgtttgaacctcggttgcagatgaagattctccggggggtatggtccttgccagaagaagtcggtggcggtcggttaggcagagaagcagagagcttgttgaaaggtttgttggaggttcaggtcgacgaacgatggacagttgacgaggttgggaggagcgaatggttggctggttgggcagaagtcagaaagtctagtcggagtcgaagtcggtcgagaacagctttgggtgtgcttggtcaaactacccggagaagatcaaaaagtacccatcgatcggcccggatcgatgaaaatcctggtgggccatcgtccccttctctgccctcaacctcctatcaatcagcttctctatttggttcctctctagaatccttctccagcgttgacggccatcaaacccaggccaacagttggtcggatcagacctatctccctccaacaccacatcaatcgctttctcctcccgcaccacaccaatcgctttctcctccattccatcactctacggcttcgggctcgacgatctttccatcaggcttgaaggcatcaaagagtagatctcggtcaggcagcagggatactagatggagaagacgaccatacgtcgagtcggcccacactcagaatcaacccggacagagagcagaaccaaacgaagggtggggaacattgggcggtcagatgatcgtggaggtcgaggaacctgcacgggaaagaagggaaggcactagcgagaggaggagcagatcgcgagggcgaaggagagaggccaatgtcgattgagacgtgcgagtgatacctctgttttaaacccttcctcttttcttcctcttcctcttccttttcttctttcatgccttctttgccttttttgtttctttttttgtctctcgggtatactcttttgtattttcttcgtgcctgccgatgctaatctacctactctttcccaaacgcaacaaatatttccttcttacccacttctcatcaaaaaagggaacatgtattcattctctgtctttccaattttggacactatctatccgtccatttactcatccatctgtgcctgtgcttatgctccagatcgtggtacatgtatttatatacttcgcgtattgttctccccatctactcattgtttggaaacccatttactctacatcgttttctacccagtattcttttccccttctggtctcgctttctcagtctagaacggggctttggtcttctggttgatctttatgagatatgatgaccctttgcgatcgtagcagtatggtatgtaggtggaaaaggaaaaggaagatgaaaatgaaaagaaaagcataaacatctgaattcctttttttttttttccttcccgcctcttggttcttcgatccggtggttcgaaagaaacgacaaagacagataggaacaaaagggatccgaaataaagtagagatgagtagaccgataggagtagagttgaagaaagaatgaaggacaggaggtagatgtgatatgtcaagagtgagtggtgaaatgaaataactgggttaaggaacggattgactctattgaaggaaacaaagaagaaggagaacaggcaagtcaagtgaaatggtctaaagatttgaagaaagagaaaaaatcgagcatgaatgaaaggagataaaagaagacaaatacaaaagtattaaagaaaagaagagatctaatgggtaactgagatgaaggaaagcacatggacgaacagaaagcaaagaaaaaggacagaaacgaatctataggatctggaagaatttgagatcaagaattgatagagaaagcatcacagaaacgatagtgacaagcgtgatagacgctcgaggagagaatgacccagcaccgctgcttgccggcctgtttcgttccgacattgaaggccaaagatatcaaatggtgcgaaagaaaatgtagagaagaagaagaattgaaggttcagcaacagcaacaagaaaagcgtcaaacggaagaggacgacttacggataaccagtgatcttgacggtcataacagcaacgaggccgtcgatagccggatatccatcctcctcgacagtgtacatatggtcttgaaaatcagagacaaaatagcaaagatcagcaagttgaccgttgtggtccgaaattgccaaacaaacacagaaagtactcactaatgccctctgaagaattctgaagaaggcctgaaacatattggacggttgtcgtgtatgtatagctagcgacgatagaaagattccgcaaacatcagttttcagccagctctaggccagatatttgataggagatcaagatgggatgataggtagatagaggtactcacttgttgtaagatgtgctgccctggaggacggttgagttggtgacatttctcgagacaaccgtttcagtcgttccaccagtggttgcgtacccgacaataccatctcgacccaggttgtagccgtttgagacgatgtcgtgtccctctttagattataagagtatgaatattagctcaaactcgagaatgtggtcaaggagaactaaagagaaaatgtaggacgaacgggcaagatccatctcttcggaagcactatttagatcaaagtatatatcaggatctcgtcaagagcaaatgatgagaaaatttaaagcttgaaacacgaaaggacttacgccataaagatagctccagtagtggcctgtgtccaatacctgaaatggttaccaccctggaaagtttctctgcatgtgccgaagatagcatcgccgaagttgtaacgaatctcggccgtttgaataactttcgtatcgagaaacagagaaacacgaagatgagttctgagtcacccataacaaaagcgagatcgtacacaataaagcgagcatgatagagaatacggaggaaaacaagagaaattgaaggtgcgaagaagatacataccaacatccttcccatcgcctaggtttgcatactgtccgcccgttgatataatgttcaagcaatttcctgagaagttcagactcctattatgaggggtttttttgtccagtgcgagttaatggaaggatacagaggatgcgtcagatatatgtttgtttcttaatgagaaaaaagactaaatatgaaacgaacagataatagttccttagtcccccattatctgctgaatccaccctattgaacaccaaatcaaaagggcggaaatttgttagcgatgcatccagcgcgcagacaggagaacccgatttaaatacatgatatccttgacgttagaaaagacatgtaaggaactttcttacaagacggcagcatcagagttggcagagataatcatgttcaacggctctcccagacctgctggatatgtttcattgacgatctggagaaaggaaatgtccagagaccggttgcccagtcgtgcacaaaaaaatgacattcccaaaataggcgatgacgacaataagcaggcatgtaagtttcaaaatagatgggttcagagaaaagcagtatagggagtgagtagttagtgttagtgttcgaatctacaatgcaaaagatgttctatagagaacaccaggagaatactagaagaaatcaagacaagactagaacgaaccgttaacatttgacctccggtcagagacgggtttgtgtaacctagagatgatgactccctcctgtccatgctattcattgtcatatccactaccggaccacttggtggtttggccgaatatccgaccatgtaagatgatgaagcctgggagacgctcggcggtagttgatttgatgaccagccagaggaaggcgaacgagggaaggatgctggtggaggagaggaaggaggttgctgcgtgctccgccctaagcaagggctaaaagcgtggagagcgaggcagacaaatgccaggatcttccaatgggaaatgtagaaggtcatctttataggtgacattttgattcaagaggagggagattggagatcaagaaactgccagtttctttgagagggcaagagggaagaaaaggctgtgaacgtatgctgatcgatacgaggcgaaataagcaggcaagagggtgattctaacccggagaggagagtagccgaagggagagaaagttagttgagcttgctgtactgaataaattcgagagatgcacgaagagcatgaagagagaaaaagggagacccaacgaaatggtgggtggcttaccagacgatagtcttctcaaagcacgattactcgctccgaagaaagaggagtaggaagaggactatttgaaatgctggatttcaacgccgagacggtcgattctttgcactctgtgttgtttttgaatgaataggaccacctgccttgttgctttccttctcctattcgttatttctcttcaggcgttgatcaagtgaagggtggaatgagcgaagctttgtcttgagttgttctcgttgtttaagtgacgaaacgagtggaattggccaggatccgattacgtaatttcccgcagccaagctttacattacgtgactgaatccggcgaagttctttttctcatcgatctgatcgtgtttctgtgtggagtcttgctttggattatgtgtttactcttctggttgttctctacacacttcatcatatcgtaactctgggctacatctaagcggactcagcctccttctcctcttcctctttggcaagcttaggggtatcgtattcctacagagaccacacacagcatcgtttcagcactcattcgatatttgagacggataaaaagaaagggaaaatcaatcacttacaagagctttctcctcagactcagagacctccttctcgctgacttcttcggtagactgcttctcctcctcctcagcggtctccttttcgggagcctcgtgtcctccggcttcatccttggcctgttctcgagcccgggcagtgctcttgtcctgttgacgtcatcaagtgagaatataggcgtcagttagaaagacgagacaagacgcattagggaagagtcaaaaacgtaatcataacatccttacctcagcgctctacatggtcatcgttgtcatcgttaaatcaaaagtttacgtgagcaaaagggctctcaagcagaaaatcggtaaccgaatcggatacgaacaatgggggtaatttctccagactgcttaatcgagctgggctcgtcggtgtcctcaccctgagccttgacatcgctgtcttcggtgacgtcgttcgccgggtgctcgtcgaacttgtgctccttctcttctgaagcggcgtgctcgtggtggccgtgggagtcgtggtgctcaccgtgagcagacgagtttcggactaagttcacagcccatccaatctttttaccagagatgcagaaagagaagatgaaggaagatgagctgatgagataccagaacgtgcacgcgacatatagtaatgcgaatactcaccatgggaccgaaaatagcagcggatccgacctacatttcataagtgagcatggttcagatgaaaatttagttgatgaaaccaaagagaaaaggaagagaagatagtttagatcagtaaaagctttctttgcatctccttcgttcaatgcggtgagatgggattttaagactcgaaggaaactagctgagagaaaagcacggtgtaaaaaacacctgtgtaaatttgaagaaagaaagagacgagagaactcacaacccaagggatatcatccctcaagctccaagacttggatccgtagtcgacgttgccatgtccagaggcgaaccgcttaccagcaaaggaagcgttgcttcctcgggcagctcgggcagccggccgggcagctgttcgaagagatcgaaagacggtagacatgtttgaatacgtgtttttatcttcttcttttttttcttttacaacggaaagtctgtaagcgagctgcttatacgatgagccttgtcgaatgatgatggaggttggcaaagagagaaatccctaaggaaaaaaaggatacggcaagcgtcggagagacagacttagatgatttctgaatctaagttacgacttagacaacattttcggctatactcgaaacccgactgttcatcattcgcgtcatctaacatgatcgcttggttggcactctcgacctctacaacatgtctagattgcctttctctgcgtccactgatgcctcgtctacaacagtttcggacttaggtctcaagttatcatcaacaacctcaacaccctcgcccgcttcgacgaacaaagcggccaccggcgctttcttaacgatgccttcttctagtttcaatcacccgttccccagtctgtcgagtgtttcatcgtggacatcctttgggagcagtagaatccatgctacttcgtcaagctctgactaccaggagatcaaggagtctatagaaccacggttgagaaggcttgtgtggcaagctgggttggacgaattgtacgttgtctgggatccttatctatcaccgagcatccaaaatgataacgtctcaagagaatctatagcggaagacccatcatctgcttctcaatagcatccataccagacccgcgctcagttgatcttgagaaaatattcagaagactggtatcaacccttcaaccgctaggtaggcagaatgcttcgtttccttcttagagttcactcttatgtatcatgcgcgctgcagaaatgcttatttcactaccatgtatgcgcaaacacatgcatacatcggtcataacgtccttatagtcgagaacgattacaatctcgtcatattcgctgccggtggaagttattatccttcgttctcttggatatggaaagtatgggctcagcttggtcggccgttcagaaagaatctaaaacaacttgttcgttccgcttggttgtatgtgctgagaattgtctgcggattattacatgctttggctgacacaagtcgcgtgtacaactgttccatgcagttcatcgtgcatcctaatttcaagacaaaaggtatgattcattcagacgagagtctcggagatgcgagaacgaaatttctgatgacaggtttctaatttcctcttccgactgatgaataacagctatattgacattagcaactccactaatctcggcgaaagtcttccggaagatcatctatatccaaaagctatccttgttgttctcccatctacctattggcaacatcttgattcccccagagacagtcaggtaaggaaaacgttccttcttccgcttaaaaaatggttacataacattgagaattgtttgtcgatttccagagagaacctcgcgcgcgaacctagctacttgccctctccgcttcccccccgtacactcaacacacaaatctcgcaagaattccctctctccactcaatatgttctcccatctgttattcaagactctgtccaatatcttcgttggggatatagcgaagatgttgactactatggtctccgatctgtatcctcacctccaagcgaggcactcaccacttcaggcatctttcgcaaaaacccttcctcaggtgttcaacgctgcgtggaagaagcgtaccttgtcgaacagccggtgtcactcactctgttcgatgatccacatcttgctgccggtctaatcaagttgttcttcagaaagttgaaggagccattatttggaaagaacatctgggacctcgtgacaaactgtccggattgtttggacagtcagcctggagagcgatacttgaatgacattatcttggggtaagtagttaactttgtaacgtgtgttttgtttgatcggaacgagcatctgggcatttatactgatgttccttgcccatgtgttcttggttaggtcgttgaatccctacaacaggcttctgctaggctatgtgatctgtgagtaagaacccctgatacctatattcattcgccagcctaactgtgtcctctgtgatttcaataacagatctacttcacgagacaatgttatgtaactcattgatgacgtctcgaaacttatcgattgtcttcactccaaagtaggcaggtttctttgtgaagtatatggtctctgcagttcatcggtcctgaattgtcacatctgactcgttctcaatcatacaccgcttgctaccagtctgatcaggtcgaattctcctactagggatatgcttcttgcttctgtcgaaccatcggcatcccttgctcatctagcagcgttagaaggatcagggtcgaacgctcccttgaaggaagtcacgctcggattgattgttgcgcattggattgagaggccgcaagtattttgggaagacgaagtcagaaattatggacggggctcgagagtaactatctaatatacacgtaagattcctcttgagtgattttggtgagatccattacttggtcaagtgatgaggaggaacaaggctcaagtgaggggaagactggtaccgctaacatacagataaaatggataagataagaatatatgccgaaagagtccctcgtagccgcagtcctgctgtttgtgacatatggttacgttcgatgtcaaccctgtaaccgcggaactaacagttgaacttcgttttctcttcgctccgtacaaactctcgacttgccacccatacaatcttcttttgctctcacttccactctccttgcaccttttatcaatacttttacatcatgcttgaacaagtccgaaagaagctcgtcattggtatgtactttgtttcactctctattcgctgtcttttcgtcagagagtggtctttgttggcaggggagggaaagaaacgctagcaggccggatgaaaggtaacccagagcgatgggacatctttcattcatcctgcccgtatttgttcttcctttgcactcgtgtgtttgtcagtctgcaaggacgacagatagcgaacaagatatgctttctcttagaggatgcctttcctaatccttcagagtcttaacgagccgagttgactgactttgttttgttcttgctttccttcttctcctcttccttcccatctatctcgcaatcacccctctcttcacgtgcacagtcggttcgtaacggttcctttagagtcatcttcctccctgctatcccgattgttccttctctgctcgcttgtctaccctgcgggttccttctctctcttttttggtcactcgaagattctttgatcatccgagaaaagccggagaaaggctgttcggtgtttcactcaactatcttgtcgcctcaaccctttcgtctttgttttcaattccctacacatactactacgtgtcactcgatctcagagtctcgacatcatcgcatcatgacaatactaagattctgcaatcggatgctgatcttttccctctttcctcccggacatatctgtttattctgtgtatcgtggcatttctatgaataggtgacggagcctgtggaaaaacctgtttgcttatcgtcttctcgtgggtctttcttgcttttcacatcttcatacttctatccaattcgcgggcaggagaacttcatgtcgttcatatgaatgaagtctccgtgtccaaatcaccttgagtgtgcgagtgactaatgcatcattgatcgtatttgtctttgtcttcttgatgattttcatacatgtagaaaaggcaccttccctgaggtaagtttgttgatacgatcagccaaccgacgtacatacaagtcaaaggtgacggaatgacccggccgagagaccggggttagagaaatgtttctgttaggaagctttgcttagccgcaagtcttctgggctagaatgccggatgcacgtggagagggcaattctatataggatgacagagctctgggtattgatgctcttcgggaggttggaggttgaacggcgaagatactgtggaactgtcggttgtatataccattgttcatcacactcgaatctaactttgttgcttctggtttattcaaggtttacgtccctactgtcttcgaaaactagtgggtatctttctgctcttctatcaaacttcagtgcagattcttttgaatatactgggaacagacctttgaccatgtatgctgttctcattgctcaatcaaacagtgtggctgatgtcgaggtcgatggtaagaaggtcgagctcgccctctgggataccgctggacaggaggattacgatcgattgcgaccattgtcgtaccccgactcgcatgtcattctcatctgcttctccgttgattcgccggattcattggacaacgttcaggagaaggttcgatcatctttccacgctacatcgcatctgtctagaaagtaacagatggagctagacagggccaatactgattacggttttctttttttgttttgtgaataaatctgtacctgaatattgattaatcattctttccaccgccttgaccgtatcaaccttccatccgacagtggatctctgaggtccttcacttctgctccaaccttcccattattcttgtcggttgcaagaaggatcttcgacaggaccctcgtacgatcgaggagctcaagaagacgagccagcgacctgtctcccaggccgaggttcgtttttccgtttcacccttagtcttgttccattgtttttcaacggtgcatcaccggcacgatggtcagttaagacttacactcgatctatgtttttgttttattttctcgatcctctttgtagggtcaagccgtcgctcaaaagatcggagccaggcgatacatagagtgctccgcccgaactggtgaaggtgttcgagatgtcttccagactgctacccgagaggcccttgtcgtacgtgtagtctttcgtgttcatgttatgtacagactgttgatcttcgattttttgtcatctcaggccaagggtggtcgaggaaagagcggaaagggaggaaaggacaagaagactggctgcatcgtgctttaagaagaggggcgggccccttgctcgatctcttttctttcatcgttctctacatgcactttcttttctccctctggattttctgattttcgatcaggcgtaacggttctttccttctctcctctttgctatccgtcggttcttttaccttcagtttcgcttcttccgagttgctcgaccacgttcaactctttgacttttctttcccgtccttttcttcatatcatgattcctctccgtttttcttacccctcgttcctcgccgtctttcgcttgattcttgtctttatataatcttgagatcctcgcttcctccgccttccctccgtcccttcctgttatcttcttctttcctcttcttgctgtcttgcttccttatcgtttatggttttgatgagctcaattcaccctcctcttctttctatcggtcttccctttcaccttttttaggcttaatcttttctcttgttcggaaaacaccgggccggcgaaggaggcttggcaaagacagttgtgacgccgacagttacaccatagatgagacagtggctgagaagaaagacatattcatcatggaagttaaagacaaggatatgaaatattgagatgtgggtgacagctttcgtctggcagagaagggag

SEQ ID NO: 2971 - DNA, 29038 bp, Xanthophyllomyces dendrorhous
agcaaagagaagaaacgaaagaaaatcaaagaacaagggaaggaggcaagagtagaactaaacaaacagagtagactataacggtctttgtaagaagagacattaatctgtagaaagagagaggagattatcgtacaaaatgggtcaaacaaactacgggttgaattcctcaaaggaagaagagaagaagagagaatatgaaatccaagggggggaagacaaagagaagaggtagtaagaatgcatatatgcgttcctaataaaaaaacaaagacgtgagaatgttcccttaagcgaggatctgcttatggttctgctggactctgaatccagcattcaatctgatgtcctctgctcgcctctcgacattctcaaaccagccgatcgcctgctctgccttcttctttccggcctctgcccttctgacctcctccgctcgttcttccatggcaccggcgaatgtcgatcgaaggttccaagcggcagctctgagcactcgcttggtctcgagcgaaacccgaccagccgtttgatcgtcccatcgttcgttctcctcgttttgagcaagcagggcctgtcggatgtttgatccgattcttcgaggaatcgttcgaggaagctccgaaaggatgtaataacctaatccaacggtagcggcagcgacgatcggtcctgcccattggcgagcgacagggcttcggaggatatcggccagacggaagaaacattcgaccaagcttcgagtcgccaaggtctttcctccaatcaaagagacgacgccgacagcagtcaatccgtaggggacgagggcctggctctctttggcggaatcctctgaggtgaaggacgagtcggcgtcagcgaagaatggtcggtagatccgggcgagttgctggtgaacgtcaaatacgtccccaagggtgatgttagagagatctcgcctggcagccagaccgaggccaacgtttccaatggaaccgctcattcggcggttaagtctaccacccttgggggcaaacatggcctccggtctgaacaccttctttggtcggtcaactccctgaggaagatgcttctcgccgagcgtcgagacctggttgactccaatcgaagtgatctgcctggcgtcatgctcggccaaaacaacggcggcgtcgagcgaggcaagcaaagcaagcttgacatcatgggcataatcccagagatcgagcaagccagggtaggtaggcaactcgatgcctacggcttccggagcaatctctcctctaacgactgagtcgagagccttggtaagtctggccttggctcgttcaccagacagagcgaccgtctcgtcctcgatagattcaagctttcgctcgaagccgtcctggcctcgtttcatctcatccaatataggcttcgttcgctcaagctcagcctgggcctggacaatctcgtcgttggcggcaaggatgttggcggaagcaagaatgtcaaggtccgagagcagatgagaaacaaaggtctgtacaggaaggagtttggatttagctcgcttgtcgaggacgaaagatcgaagggcggattcgaggtgttcgaaagcttctgagttagtctcagcaggagggggtccttccatctgagcaagctaattggccaggaaatagacgagaaacaatcaaacaataaggagaagagaagtgagtacacctgtagacatcgagctgacggcaaaaggaggacaaggatgaacgtacctccatgattcggctagaatcaacaaagtgaacaagctcctcagcatcttcccaagtcctggggctaagctgcctgatttgctcgaggatgactctcttgcacctttccttatccctaatctggtcgaacttgttaactacgatgaataaataggccttctcattgctggccgtccagataaactctttagcactcaaggtgaagtgattggctgccgagacacagaacacgacgacatcgatctcgtcttgtctggcaaatacggccgtagtcttgagagaatctcggttcaacccgggagcatcgataagggagatgtcgacaacgccattgtgaataagagattcggatgaagtcctggtatccgacacatagacccggatcggaggacgcgtatcgtcctcgacatccacaaccatctcttccaactcggcgagcgagtgaacagaataggtggccttgtcagacaggttgtacgtctttccgggaagttgaacgtgggcttcctctcgatcgccgttgtctctggcatcatggacggtgcaaaagatggttgtgcagggctgttgatcgacgggcatgacatctcttcggaggagagcattaacgaacgtggatttcccagagttcaaatctccagtgatgaggaccttagacgaggtgtcgaggattcgatccttaagcgactcaaggtgcttggtctgagtgctgattcgtccgtcaagaagtttggagatggacgatcgctcaagcgacataacgagtgacttggaagatcggttgggacctagcttgagatccaagttgaggaccttgaatccagtcgcatgagtagagtcggcgatgtcaacatcgtccgtgtgagtctcctcttttgaatcctcagaagccgggaggagagaaagagatcgtcgaggggctgccattcgttgaacagacgaagtgtgggttttgttaaatacaacatttcggatctgggaaggttcatcggcaaaggatagacttcttcgaagagatcggttaatgtggggggtgctgctcgcggaggaaacgggaggacgagtggccagaggttgaatatcagggtatcgaatctgccagttggacgaattaaaggtcatgaaatccttcaaaaggtcgttcgtagagtcgatagcggtcgaaagcctacgaatcagaaagagagcaaagacgattcaaggggatgagttcttttccttcatcatgtcttcttcctcttcaatcaagacacaggacccgcgtctgttgcacgatcaattccatccttgcatccctgtatccatccgtttgatcttctatcacctaagcaccatggaagttaaagaactcaccgatccctttgagcttcataagcggccactgagttttccaatccagtgggagtaggttgctcattgaacgatccgaaaggaaaagaagttcctccttcggttaccttctgaggagaagccggggtgaaaggcgactgaatagtattcttataaatttgagacatctcgaatttggaacgtgtgttgtatcgtactccactgctgaagtactacgaccgatagatatacgaatcaatcagggtgtagagcaaggaggatagagtggatatgggcagggtgtagtgaatgtgagtggtggacgaatcggacgactaaaagtctagttgattcttacataagttttatatgaatctccatcttctataaatgattagggttataataacttgaagaatcagtcaacatctccgtccactcttatgggaaaagcagcaactaagtttcagtttgatgacaacatattttgatgacggcgaagattggtctcagccgtccataacgagggagacagcgaagttgtctttctaaaatattgcgcttaggatagatctctgtataaacaggtctcttgtatgacagaaacatttagatcaaacatatgcattgtattttgtgaactttaagcttggtgaaaacaatctcaatcgcgagtgaccgatatatggcccttttaaactcgagcatcctcagaccacaaactaccaagatcatatgggccatggtttcagttttcacacgtagataggacaaattcaatgtcagtatcagcaaccagagcaccggcggcagcgtttaacaccagcattctcatcccctcgttctcttccttatgaagggctaggtgcagaatgttgcgcaacatgttgacattcctattccactgagtgtgagagaacgatgagtactcgagacgctgttttgagatatactagatacgcgactttttcgacagacacttcaacactttttgatcacccacactttggctcttcctgaaaactcgccatggcacttgagacacgctttggatgtccggaatttccggattttacaccttggaccaggcaggaagctctcagcttggagagaagcgtattcatcgagctagaagcatgctcatgagaagacgatgagaaggcgcggtccccgaaggccagcaaggcacgtggacgtccgtctgatagacgaaacgctaccttgtagtacacttgcttgcggctgatgtgcgcaccccagtggagacgtctccactttcgggcggcgaagaatgtcaagagccttgagtaggaccgagaacgtggggcgagagtggtgtggagatcatcgagattgatagctctgaatgaacgacgatccgaagcaagatgacgaggccagcaagacaatctaaacagtcagcatgggcctgagaaagcattcatcacggagaattgatgtcattgatgcatcatcctccatccacagccaccatctccgaaagtctcgattgacccctgcaagatgcttccatgactcgcgagagagagtgaccactgggtgccctatatagccagaccgccgttgtccagagacatggccagccctcttgagctcgtcgagagaagcgtccggcgacctggatcgagacccaaaacctcgttctctggctgtagatctcagggaacgtgctctgatcggcgtcgactgtagttagaagcgacatgggtatcagaactctggcagacactccaatggcgcctgtactgagcgagcgggcgagacagcgccgttgggcctccatcttggcgatgtagaaagactgccttcaccaagtgtccgagtcagctcggaaagatatctctgtcacaccgcgcatgccccagatccatatctgccaatctgagataagcccaaaggtcatgaagaaccggggtatccacaaaaacataggaggtttgatagaatgagagggacaggagcgagaacaaaaccaaaccgaagatcaacgagaattgatccagacccagcgaaatctagctgtctgatagaacatcatcaaacgatcagtcatcgttatcggtcttgtcagcaacgaccatggcgctgacctttcgctaacatgtacaacagcagctgctgactattacgtgcagtctttgctcatctattttgttgaaaacaatctacttcctactctttgtgttggatattgtccaagcatgtcatcttgttcaacttcccttcaccaccgagagtccgtcaggttggaagggatgtaaacgttgatttgtttgactttcaggttcatccgcttagacacacatccctacttatgatcctctgatcctctcaccgataatcttttaacactactttcattcgatatactatcctcgattaatctctttttacactgtctcttaacagttcggccttctagacttctccataggtctttcctctttcttgaagattgcgtttgagcacactctttgggagatgatttaaaacaaaaggagccaaagtcaatgaacagtttccagacaagaaaaacttactcatctcctaagaagagagagaaactaaagatattaccagactcggacaactttctccacccttgacaccagctttgtcaccttctctgcctctttccgcttgtgccagatatagactctcacaacaagtatatagagccatgatctcttgaggacacttggatgaatccgagttgttggccgacagacatgtctggatcgcacacgcaagtggatggcaattaggaactggctagaaaatgagaccggaagtattgtaagcgtttcactatttttcagcagtaaaaaaggtctatatgcaatgagataatcatctatcttacagaagacatgtagagcagagaaaagcctcgagagaatttgagagtcaacaccgtttggttcaaagcgaacgcacgatcggagacaccgaggtgacgtcacgaatattggcaagattcgtcttcctgatagaacaacatcatataaatcaggcatcactaaccatctagcatcccattgccaacacctacccgtaaacgtaccgatcggctgcttactatgcaacaatccaattcagctgcatcccaagaattctcggtaggtatttctttcggttacgattcatccagcgtcttgacatacacatccctctgacaaatacgtgtgtgtttcaacaactataaacatacactgaatcatttaggagagtcgaaacaagccagtttccgctcctgtaactagcagactaaacccacagcccggtacaactaatgtgcaccaccttggtttgtcctcttcgactaacaatccgatgttcaacggtctaattttagcttgactatgggtgaaacaggcgacgctttgcctggatcttctactgttccagagattcgttagtacactctctcaagtcttgttcaaacccattatttcggcatatcagcaggcctgacagcttgtgtacattgggcggtttctcgcagccgaccgaccgagaggagtagatgccactggagagaaagttccgttcatggaccgagcgaaaggatacgctaaggtgcaggcaggtactgtgcgtgctactcctccgatgacttctataaccgctggatctatctgagaaacctaaacgtacatgaatctgacgatctctgctcgccttctgcgacctatagttcttcggtaatgagaaagagaaggcactgggagaggcagctctccgaggagaagatgttgggcagaggcactgaactgttgggtgtcattctcgtcgtaccggcgtatgtattctttgattatatttgtttgttattcataaaaagctcccggttgtctccgcctcacgaagccagatgttgtcgccgtaattgtctctcttcagcctggcttcagactgacgactggaattgatcggcagccacgtaacgcgaattttccaatttccttttggttcttgtcttttatttatttattcaaatcaatacgcgtccgtttgctcctttttctgatgatttcgatcgagataaacgatgacaataaatcaacaaagttctccctgtagacgacggagaatataccaggtgtaacgtgaaagagagtagcggagagaaaaagatgatttgtaacatcctgattgtcatcctatgaaacatcttctcctttgttctgtccgattgataccgcgttggcgttgaactttgttcggacccggatgtgtcttgtaccgggtccgtagggacttggtccgttctattcgagtgaaggagctggatggtcgatctcgttagtccaaacatccatcatcgaatccgttttcaacaatacccaacacgtgggcaaatacaaccgaaagctttgtctttaaactcgcctaacgcttccttcctcggccagcttagtgcgatacacaaacttggacaggaataccaagtcgctcagagagtctcaattagaaaaaatcaaggaaggacagagaagagaagagaaagagaaacttcctcttatagccatttgtgtacaatgcgttcgaccgtagataccctcaatcccgagcagtcaacagaatacatatctcttcctgttcttaccgcttcagaatcgtccccgtacccgcttggacaagaacttgaatcgccgtctttccccgcagctggcttgtcgtcaataggagatttatctaaagacatcgaaaacgaaacgtttaacttggatggggccaacaaaccgttgggtcttgctcaggtatacgaaggagatcaacctggggaatatgcttcaacagaacgggtccaacagttcaagctttacaaaagacgttgggctggattatcaatcattgcgagtctaccaatatatcttgtgctagcggagaatatgaaaggctaattcttatattcaacagcttatgttagatgtcataaatagtatgaacgcattgtaagtttaatttgaaaggactcagccggactgtgatcagccagcgttgaaatgatattgttccgtttttagctggttcaccgcgatcgcttccgaaagtgcagagaggttcaacgtgacccaaaccaagatcaactggttcgttcattgtcgatacttcccgcttctgatagaacatgtcttgatcgttatctctttacacttttcttcgtccaaacaggtttgtcaacatctgcagtctttgtagtttggtcaccttcccccttgttcctgtagcctgccataaataccttcctcgaaaactctgcgtcgttgccgcaattgtcaccatcgtcgccagttggattcgatatgccgcctgcgtcgcccctgctttcactgctgaggctgaccgacataaaggatggggtctggtgttattttcacaaatgttgtacggactggttgggccgttatcgctagcgataggaagcaagtattcggagctctggttcgacgtgaaggagagaacggcggcaaccatgctgctgtccattggcgcaccgtgagtaaacgatacagcctgtcccggcaagtcaggaaaaatggaagcgctgatagtaaatgaggcttgaaattgtacagacttggaacggctattgctcagattatcgctcctatcgtttgtactacagcagatgatatcccattctccgttctcgtcatgggagctattagttgtatgttgagcttcttgacctactcgtaactagcccatgttgatagattgtttttataccgtaaatagctctcaccgttctgtccttcatcattccctcccaaccccccatacctcctactttctccgcgtctgttccaccaatctcctttgtggaaacctctcgactatactttgcggacgtcaaggttccattcttacctctctccgacaagccgagtacaatcaccaagagagaacgaatcgatctatggttgttaacgtttgtcttcggtactctcacggcaacaatcactgccgtgacgagcgaagtcaactcaatctttgtgcgtgccgtattgactcgacgttgtgataagtaactattctgaacctttctcacgataactcccaacacaggtgccatatggatactcgtcttctgttagtctgtcctccgctctatcccttacctatgcgccaaagaagaaagacatactaaagcatcttcatgtttacaggctgctggaaatatgtatgagaatgcggttcttttgtatctcccctaaacgactactaatcacctttctggttatctcatcgccctttcataccataatttaggaggtgagggcttttcgtctctcaattccgttgtaccattgctgttgcctgattgtcgcgtatcgaacctattcgcagtgccgccattgtcgccgctggtttagtcggagctttcatctctgcacctataattgatagatacctcatgggatggatgtgtacaatcgcaaaggtgtttaccaccattatcgctttcgcgaatttgggattcctgtaagtactaataacattcttcatttgatccttgattttacgagcatatgaaagaaaccttccttatgatctttggtatttgaacactatatcttagtttcgctgtcaaacccgacaatgtaatcggtattgtagcattgttctgtttgatgggaggtggtgctttcaggtcggtcttctatatttggtattgtcgaactacccgtgtcttgaatggtttagactggggccgagaactcatgcttcttgcggacgacgtcttgttttgggtgggaattcagtcttctcgccatcggacttgaattaggagcagaagtgacacggcagcccgatacatcctctagcgcgttctactgggtgagcagtctgttcacatttgtctgcatcaacagtgagttcactatcaatttgattggttggactgtgacgctcgtcttgactttcctctcatctatatttggacatttatccttctcctccctactgaaaaacttgttttctcaagtcatggacgcgcttcgagcgggtccggaggccaatccaccgtataacatgaagaactcgcttattgtaagtcaccaattgaatcaggtcgattgactgttgcatcctgatcaaaaacacttactaacctcttctatcttcaacttgctcctcgaacgattagttcgaagtcgtgatgacctttgtcgctgttagtttttttttctcttgcgatgttcgatgttcgctatttcatgctcaaactgctgactcgtattcttctataatttctcttcaaatccagatgggtctcgtctatttcatccgaggtaatcagtcgagatcagcagccgataacgaaaaactacttgcttctaagagacccaatatagatagtgctgtcgtagctgcatcagctcgtcctgaagacgaggagaaaggtagaaagggacccagcttcttaagattgaggtctttgttcaaaggcaaggcgtgataattagatatcaccgcgttcgcttttcgttttgtcatcttggtctttcttattcttgccccttgtgaggacctcttatgttcgagcttgttcctttcctcttctcctcctctttctgcttcttctattgatctgtggaaatacatatattgcgtcagcttgaccatgaaatctcgtcaactcgttcatctctctcgagttctggtatttctttttgtagggaattatctatataatctaagagtagtcgatgtcacctcacctaatcattctttgctcttacaatgtttctatcttatgtgttctattcaagcacttccttctgaaaaagaaaaaaataacttgatatgggtatatacatcgtatccaaaacgcttatgtatgcttgtgtgataacatgaaagctacatgcgcacccctttctgactcgttcgcacagaatggtcgacagcatgaaagaggatatatataggtgccggctagatgaatcactcatcagtagcttcttcttcgtcatcttcgaagatgtcggcgagaaatccctagataacgaaaacaggagataaagaaggaaggacgagggtcagacagaagcaacaggtcatcatgtgctaactagctggcaggtagcacaaggaacttacatcatctatgcgtagcaaaggcgatcgaaccgttcatatacatagcggttcagtcttgcaaatcaagctctctatctcataatgagaacaaatcaactgaaactcacaatcataagcaatcttctcacgatcatctactccttcgtggccgtgcgtgtccaactcctgcgaagggatgaccgttctaatcaaacattatagagccgatcagatacgttctagagtaaagaagctgtgacgactgttgaccacggggtgattttatatgtgaactcacttgaggaagtcgatagaagaagcaggtaaaagagcaagttctagatcgagttctgtgatatagggctggttcaattagaccatcaagagcaggattcagcttagccgatatttgcgctatatcgacttcaggacgaagacagctaatggagattatgtggaggccaaccttttctctagcaatctctctgaaggcttcgctgagttgctcaggactctcggtatcctgagtgatctctaccaggagtgaggtgaaggctctataatcaaccgctccaaattcttcgaccagtgtagcatggattcgatcaatctcttgatcctaggtaacaataaatatagccataccagatgttgatgtacatggaaacgtcagtacacagatgatcaacctgatgactcaaaattcaaaagggatgtaaacaccaggatgatgggacttactgaatagcttatactcaaactggcaagagctgctgtgaactcttgtatcgtaagtgtgttggtctcatcagaatcaaagtgccggaaggtcgactcaaactcttccagttgagcaggcgtaagctgtagttgcggcaaggagaaggcagagtagattagagacctgaataacctcaataaaatgagaaagcagatagtactcacgttagtcgttcctctagaaacaatctatgagtgctcagaaaaattgtaattcagcttacgccgggcaatttttttctcacaacgatgatgaagaacattacgaacctgattttcgatgaatccaattcttctactgagactgcctcggaacagctccagctcccaactaaggtcctcccatgtcagaacagtgtagtcgttatcctctacgttcgcagccatgcaatttgcctccgctattctgagatcttctagcaagtcttgtagagaagctagtcgggtcgcttgaatagacgaggcttgagatttttggttctgaaatcgaaaataattccaagcatcgtaagagaacaaggatgatatagaaatagaacatggttcttgggatattcgaacctcgagttctcctgagagcgcgccaagttcacgctctagatcatgtagtctagcttgcagatcctgcgctattcgagcagcttctctcatcaatgtatccttaattctagttcatttttgagagtgcagaacatagatcaagtttagtgtacgctcaatagagatgtctaaagaatggaaaagagaaatcaactaactgcctgattcgagagttgatagacttcgaataaatgacttctgcgccaaggagctggttccaactctcgtccacaaactatttccgtacatggtgataagaagaaacgtcagagtgttcaggaaatgacggacgtgggaacaacaagatcaagaacaaaactctcacctgtaatcccaatccctcttctggctcccatgctctcattctatacgtcttcaactttgtcctcacattgcccaacaagtccctcaactctcccctttctctaacccactccctctttgcggtcttcttccagtccgttaactcagttgaaagccctcggacagcaggataagtggatgtgttggattgtagtgaagtcgcggtagatgaccagacggatcgttgagttgaaagatgctgaagcagtaggcgcgcccggcgttcatagtcattcttgctagacctatgtaagccgcagtcattcgtgtggatgtcagtatcgaagtgagatgcttagataaaaggttaggacaaaccagactccctccattgtagtgatgaatttttcgactctgcgcacaacagtttctgctttgtctgatatttcacagcaccaggattgcgcagatgacacgcaagaaagagtcaaggaaggtaggtagatactcagcaaaaggatgaggggggaggtttgcgcatagatgcaaagaaaatggaagaaaaatgctcactcatattggaaaacgcgtgaaagaacccggcgacataagtcatgatacttcgctcatctggaggcctagcatcacacagatcggcaacctcgagtagcctctgtttatttaatccatagatccagaaagggtaagcagtgattcggcgagttgcaaattgctctccactgaggtccaaatgaaggtagggtagatttcatatcactggctggtgatagggagactaaaatacgaacaggaatgcctaatgactcttcggcaactttgaatgctaactcggtgttggcctctctgtcattctacacgagtcgtagagcgagaccaatagagtgttagagtgtatatctgagatatctcacaagactactcgcttggtataaagcagcgcgcaccttgttcagcctatgatagtctaataaatccggccgatggtgatgaatcagcgcacaaagtgctaatccatctgtccaactccaggtgaagtcctgaacgtctacctctggagcatatccagccgtcttacgttgaacccacagtaatagaccatcttttgctgaaagaccctcttcagagatgtcggcgatcgtaaaacgaagaataagtgtccagatctgttgaagggtacgacaaaacgcgatatagaaatgtatcagatgcaaacgagtagtttgaagcgcatcgggattgtaagaagattacgataggaacgtactagccccaaaatgagcttcaaattagggtcgatgatatctggtaaagtttttcaaaggcacaatgttagctttaaggagatttgaatgagtatggcaagtgttttgttgactaaccctcggccgcaatattcgtcagctgtattcctcgcgctcggatatagtttaatgcttttgtgacattctgaatcataaaaaaacgaaagagtaaactctggttgtttattttggtgatacagaaggtagactgtccttccatacctcagcgcattgaattcgatgagccggtctgacgacatagcgacctaaggatgtatctcccataatttcctacaaaaccatgtagctgaattcagccatctctgataatttccacaccaaacaaacacaagaagatctgaagcgcataccataagctgtttgagtttgttccagacggtcaagaaagtcaatatataggtcagtttttgaaatcaaagggacggataagcagttgatgtttgagtatcgccagtaaatgttacaacttacttgaatgagacgaactccgtcggataagtctctaccaagcttctccatcggctcaattcctcgagtagctagcttcgaattaagcctttaaggttcacaatcaagatcaaaagtcaggttcgtgcaaccacagcagaaggtaatatgtatcaaacatatgatcgaaggagttcgctgaagatagataatcactgtccagcatgacgccgctcgcacgaaggtagaatgacaagctagcactgaccatttgcagaatgttctgaaaaaaagcacaacgaccaagaagcagtaaagttttgaagagttagtacggtctgactaaatatgttaatcaatagcccgttttggcagaccctatgatgcatttctatcgttgaggtatgaatggacgaaatcttgatgccaaggagatgtattcgaatccagacacctctaagaatttcatgacagcacaaacctttcttgaatcgcttctagtgatgttcttggagagtccatgttgttgaaagtatgatgaaccagagatggtagctcgttagaaagaatagaaaatcagagaatgatcaacaaacatttctcgtgatcggtgactaaccggatgactgtcatcctcatcacgtcctatgacggttgctaccaaccatcgacccagagccaccatggattcctccctagagacagtgcttcttcaagtgaacgagaatctggagagagagtctgttctgcgcgaggtctgtctgtctgttcaatctgttcagtgctttaggccacagagactgatggttccgatccgtccattagcaaatcaaagactcggtcaagctacttgatagacaggttcgaatcgtcctctctctcgtcaataaggtacatgctaccacccaggaaaactgttcgtcctcaaatcaaacttgttgtatatggaggccagcttgttgttcgatcagttgaaaatctaatcttggagactctcatagtgtcgaccctagccgatcaggtcaatcagacgctggtcgagactcaaccgctcctttccggcctcgcccagctcattcctgcccacgagttcttcaagttggtcaacttccgtccggattatatctggctcctcatcctgttcgatgatgcgtctactaacaactagtttgcttattctatacagatggcaatctctgatcacgagacctctgcaatcactcgtgttcgctgccgctcttgcacatttcatcttgcatgaaagattgatcgagatcgatcaggttggacttatcctgggtgtacgtttcgctctcgccataaccttcctattcatctgatagactgatgattcattcgtcaactcactgcggctttcggatttatgaaattatgaatctgaatgtcatagatcgatccatcgtggtcagatagactggccctacttcctgaagaatatctgcatggagttatctctttggtcaatgagctagttcgtatcggtcacagcaacccagtacccttcatgttgtaaagcccttccgttttgattcttacaccaaactctttatttggacaaaatctcgtcgatttattttcatgctctcaagtcccgcttggctgtaaattcggtcacgatgggcaattatgcgtatccgctcaagatttcaacttttgttggtgaattgtttgcaggctaccaactcgtatgtatttaatcgatgttcagattctcactggatatagcacgaaaggtatctatcctactgcgctgacttttgcacgcatgccttccttacgatgcatgttcgtctttaaatatcaaagttgaacctgaagaatgactctctccgaaggagattcgattcgcttaagtatgatttgaagaagatcgaagaggtcgtgtacgtccattgtttcttattctatctgttcgttgggctgtccctcttctgtagagaacaggtattaaccgtcccgtgcttcttcaattcgggctgacaaatcatcagatatgatatctctcttcgaggtttgacaaagaaagctactacaccttctacaacagagttatgatgtagaatctgacaataggatacatgaatggatctagacctttccttgtctttcgagctatgatcaactgcgagtttcttgatcatgaagttgatttcaatattcaactcaaggtatagcatgtttcattcgatacgaactcttctcattcatttcatgctaaatttcaaggactaaggataaccacctgagtgcgcgagcggtaaatcctatggcttgggcagccttttccttttggacgcatatctgggtacgaatgcccaacaaatgagcaggccagccaacatcgcaactactacaggctgcattacgccaaccctatttaatttgatggagaaaacatatgtgaacaagaagaaacgacagtagtgagacgagatgaattgtggataagtagaataaactcacccatactgcagttcgccatcggggatgaaataagagaaaggaaaggaaatcagcttatttattattccagaaaagggccgactacttgaaacaaaaagaacgaagaattcttcattgagcaagataaatcgaaccttagtggatagagcacctgtgatgaaagggaaacaggctgaaccaccttgtccaaaactagcctcaaaaagacattgagatatcggcccaagaaataatcggatgtacttattgatcaagtttactgtgtatgcataaatggccgactgggcaatacatatcgtttctcttcttacctggcaatccaaccgatagcacctccttggcgcgttctaggtatcaatttggtgcatgcggacatgataatgctgttggcatatcgaatccaatatcgtgtaagtcaaggtccaccaaaaatgaaggactgagaggaatgagatatatatagagacttgcacataatgtgggccgatgaacaagccttccaagcacaccgcaattgctcctcctattagagatggtccaaaccaaacggcgaattccagaccgaggatgattgaagtgtacagataaattgcggcctgttcaccaatgcgatctgttatcgacatgaaagccacccgaccaacggtgagaccagcatagtaaccagtagagatataaccagagttgggaccacctgacatgttgatatgaataggcagattgcacatgtgtgtcatcagagacaaacccataagaagcgtcgataagcatcgttcttggcagcatatatgagttcaaagacaaaccatgtcgaactttgatcagatatgtcgtcgtccatccacctatgcgttatgacaagaccattattgagatgaattgggtcagacatgcgcggcaatgggcgattgatgtgatacgtatgtaaaggcttaccaatggtgatttctattccaacatagatgagactgcatatagtaatcaatttttccaaaattcaaaacggtcataggcatctagcaccagagagacgactgtattggaatatagctgactcacgtgaaaatagctaggatatgcacattccttagcctcaaaacatccatcagagtaatctcttttttacgacctccgctcgatctagccggctcgccaacctcctgagctcctgtcgtcgaagggaaagcaacagtatcatctttttcaactttacctccctcattaagtttacccaagagtgatttctctgttcggagtcgaaatacgtatagcaacccagcaagattctagaacgagggtagcgagcgatttcagtagagcagttgacacagtgaggaggagggaactgctgcaaaggcacgtactatcacagcaaccgccacagagcagaggtaaaagtaatgccatttgggaatttgagagaattgggtagataccaatggagatactagcgcgccaatccctgagaatcgcaaccattcatttgagatatcacgaccgaaacaagcagagaagggaagtccgggagactaggacaaaccatacaaggcgtgtaagacagacatcttccacatcatgttcggtagttgggcaataaagttgttacattgggcatcctgaaatccaataccgactccagtgatgtagaacgtgatgcagtagaccgggaaaggaggcgctatggcctgaatggcgtaagcgacgcacggcaaagctgctcctattgtgataacctaaagaagcaggatacgtttgattgttcagtatgcaatagagttgcgcataacaactctctgatgaaacactcatgcgaccgacaaaagtgatttacccagccaaatccgagcttgttggtcaggtagacattcacaagggcggccgataggaagcccaaaaagttgaagacgaaagtgagactgaggatggtgtatgtgatctaggatataagagcgagaaaaaaagtcagcatttgaaagcgccgagagcggacagacagaaaagatttgttagacattatattgttcttgaactcgaagaagcaagggccccatagtagcatcgttccatcctgccacaactaccgttcgaaagtttgaagaagagaaaagccatctcgtatcagcacatcctctcgatggtatgagcaagatcggctcactatgatcctgaaataaacagaagacatacacagaacgaagaacaatgaagcgagcgcagagtgctcctccctttctcccatcttcaagggtcgtctacccttttcgtccagctggatatcctcctctacctgttcgaattcctccatccggcttccatccggtccagaatctaggacctcgaacagaccgacctctcgagaacgcttgtcctgatctttatcgcccccatcgccctgcgatacaaactgttcgacgttcccgttattgctgcttagaacgttcatctggatctcatcagacggtgccatcgaggtatgtatgctgatagaacgacggataaaaaccgaagtcgatcttcattaatatcattatctggccctgatagcttatggcggactgcggatcgcttaagtaatcttttgccggtctagtccgaacccggaccgctggccccgggaaattatcgtcggagatccttaaagtctcaactttgtctatttgtcttgcaggtttttttcctccgttcttcttctctttcgctttattatcattcctcgttcgtctttcatatcttaatcatcatgtcctccggtcgagatatgtccatcgagctcgcagaggctcagagtcatcgacataaccacagcgacgacgacaaggacgtcgactccaataaaattccatcagagaccaacagctaccgtgcaccctcgttctcagtcggtagtttggccaacgttcaactggatggaaagggaaggaggccgttgaatttgggtggatgggaagaacgcgttgcgctgggagtcttgttttggtaccagtgtgagtatgactttggttggatttgatggagaagaggaagaacaccgcaaagcggccatgccgaacgttccgtgatatgatgcagggtttctggatgctaagcatttctttgtatttaattattctctggggctggcggaaacggatctaaacagtcatggctggctggaacgattcgtccatcggtccgctgatcccacggctgcaagagcactatggtatttcttatgtgatcatgtcgctgacattcgtctgcaactttcttgggtaggtcaactctccctcagaaatacgttcttttcttttcttttccgctatggattgatccaaccgacagaaaaaggcttataaaacttctctggtagcttcgttgtcgccgctctggtcaacgtctggctcacgacaaagcttggttttggcaaggtgagatatatatgtgatacgtcacagaacatatcgttctcagcactgacttggtgtatcaacttactatacgccaaggtcatcgtcctaggggcgctcttctccatcgcagcatacgtcattcagtccaccggaccaccattcccgttgttctgcatatcgtacactctcagcggatttggaatgggattacaggtatgtcatggtttacttgaaagcctctaaccggagaagctgacaacgttggttgtgccttttgtagaacgcgcaagctagcacattcatagctcatcttcctagaatgatgctcaaagtatcttttttccacgctgcatatggtaagctcattgtagcgcgggctaatcaacttttttcccttctttttcctagtgctcttgaggcgaggcgagctatgtgattgatggatgtaattgtaattgtaatttcggatgggttgaaatactaggcacaggcgccttggtctctcctttggtgtcgactcagttctccacaattgagcactggaattactactatctagccagtcttggcctctccatcattgtttgtttttttcctatatttgcttgtatgctcattgctgctttcccaattgaccttatctgagagatccgttttttgaccttgtcagaacttttcgttgctcatatcggtcttccgactacgatctgaggaatccttattgggtcttcaccacgagacatcgggagaaggagctgaggaaggtatcatcaacagagaagttactttgcacgacgtactaaagattaagatggtgcatatgtatgcgctcttcacgtacgtacactcaattctcgatctttcgctcctgttgtttctatttattttcgtactaatggcgctacctacggccgatgtaatactcgatagacttatctatgttggaattgaggtcactattggtggctggatcacaacgtacatcaagactatcagaggaggttcgcttcctttttttttcttttggtggataggtccaggcttgttacggaaaccttcgaacttcttacttgaaaatctctattctcacaggtggtgactcctctggctacgtatcaactgttcgcctcctttgcttgtcttatattccctatccttctagtcgatctagtttgaccggaaaacatctatttcgtactcttcataaacactttagggtttcttcctcggcttgacattgggccgggtggtcttcattccattgaacagaaagatcggagagcgactcgtcgtttttatctacattttcctcgcgatcgcacttgaatttgtcatctggtttgtgcccagtttggtgggaggcgccgtcagcgtggcatttgtaggattgttcttgggtccattttatccgtgcgcaggcatgtttgcttcttgacttacccgatgatagtcgtggttggaacgccgagtttgatagtgactaaccccattgcgctcttcttaatggttcatcatccgtggcttgacaactcaagaatcatgattcagtcggtatcgaattcactacccaggaactacttggtcggttcagtcggttggatttcgaggcaagtacagtctgacaatttctcatgtggtcgagccatgtggtgtctgacgaactatgtatggtgatctcaacagctttggacaggctggcagtgcttgtttcccgttcatgacgggcgcgcttgcctctagagtacgtattcttgttttgttttgttcttcttgacattctaaccctgaattttacaatgataaccatctctctgtctttggtgtctttagtatgggtgagttgtatcatctgttttactctcatctgacaaactcgccctcccgttgatccgatccatctgactctcctatcgttctctcatctctccttctgtacaacaacccacagcgttcaagtcatgcagcctgtaatcttagccatgcttggtgggctctctgttttctggttcttgactccgaaagtacccaaacgacgggattaagaagagatgtatatgatgccgttgaatgtaatactactgtatataatatcattgacctaactagaaaaataaaggcgcagcaaatttccaaagattcatgcactcttattttgggggggctccacccgcccggccaatccgactgccttcttttttattcgttctttccccatcaaacaaccactcgtctgttgatctcgtctgctcgctcgcccgcctttcctgaatctcatccactcaaatgacatctcccaacaataccaacatctgtcagttccaggatcgactggctgcgacgctagccaacttaccttcggcacctccgctttcatcctaccaagctagttgcaacaactctggcacctctactccggatgtcaaccatgcgctctcccatgcccatgatcacgctttgggtagccatgcccacgatggaacctggaccccagaggtgagtgcttaaagattttggacttcttgtgttggatcgaggcgagaggtctattaaagtatgtcccggagagacacataaaggagtcattttaaagagtaagaaagaaaagtggtaccgcaaacggctcttcttcttcccaccttctttgcacgcgcgaccgagagagtgttgaattagaagagcattagtatccaccgtccgacgtgaatttgactcgaatgagcacggacggagaacatatcgggttttcttggaacgactttgctttcttcgagcgccatttttccagaaatatcgctgactgtccaaagggggccatctcggccgaagccgtcggcaatctcttattatttctgacatcgctcgtctgaccgttgtttcattttttgttgattcgttttatcctggatcctagcacggacacactcacgaacatctcgagcatgctgggaaattttccgagcgagatctgcccgactggagtggacgagactggaacgagcgagctttcaccattggtatcggagggtatgtagaccccgatattcttttctttttttttccttttctcttttttcttttcctacttctcctcttaacaagattctgatgacaggcagtttgaaaaactgacacgcatgttgaattggtttttcctcgttctatctcgcagaccagtaggatctggaaagaccgcgcttatgctcgcgttgtgcaagcgactacgagacgagtacaacattggtatgttcttctcgtcttcgatctctcggcatctcacctgtcagttagctccgtgctcatattaccatctaatgtatcacgaattatatcagccgccgtgacgaacgatatctttaccgctgaggattgcgaattcttaatccgaaatgaggctctccctgctgagcgaattcgagccatcgaaaccggtggctgtccgcacgctgccatccgagaggacatctcggcaaatttgaacgcgctcgaacaactccagattgactttggtactcaaatgcttctggtcgagagtggaggagacaatttggcggcaaactactcgagagagcttgcggattacattatctacgtgattgacgtctcgggaggagacaagatccctcgaaagggcggaccaggaatttcacaatcgtgcgtgtcgcgtcttcttgtactccttcttgtgctccttcttcctattggctctcttcctctacgttggtacttgacctaaccacaccctccatttcgaacttttccatgccatcagcgatcttctcattgtcaacaaggtatatttatatttcttctctttgattcctccgaacattcgatcgtgcttgcgctcaacgcttctcctacgactgttctattctaaaagaccgatctggcgccctacgttggtgcctctctggaggttatgaagcgtgattcagataccatgcgggacaatggaccaacattatttacgtccatccggaacgggtatgactgatctctatacgttttcctctggtcatatgtggcgctaactccagtttatgttggatgtctctttctgattatttagagagggtgtagaagacgtcgtccagctgattcttggagcttggaaagttagccaggcaggcggtgtcaagaaggacgacaaaggaaagggcaagcaggagtagaaaattgttatcgctgttgttgagttttttttgtatgatgacaagtgagatatgaaactacttaatcatcgcacaagaacagagttcgttgctttatttttcccataaggaaaaaaaaagcacgaagaacgcattttcctttctttatctctcttcttttcttttacgagtcatctcttctccttgatagcgctttctttttctcccttaacgcttaattcccactagatgtatgctccaaccttcgcttgcgctacgttgtttttcctgccttttagccatacaataatcgaatctcctcctttttttccttctccaaatcttgccgctttatctctctttgctgttgaagaggtccatcaactcgtgtgctctcaaatctgcctacgtacattgatgcgtctatcatgctcgtgctcgttcccgtgccgtctttagtgatttctctgtcatccgagaatccacagaggaaattggggtgaagggagccaatcgtgatggccgaaaagaaaaaacagaatagagagaccggcaaaggacacacatgcaaaggcagaaatagaagagaaaccaaagaaaaaaaaccccatcgatcattacatcatctcggcatcacccccatttactgaagtttcctcggatggatgagcatcgaacgtagccatacattcgtatcggtttgaatctgtcatcggcattattttccagagaaaaagatatataaaagaatcagagaatggttggtgagtctgtttaaacgttttctaaagaacagcaagagatgaggagacgtacaggttgctgtttgaattgaatagacataggtagaataccaaaagggaaagagattgatgatcagcctggcaatgactgaaccaagaaagatagcaagaaaataaacaaaagaagaaaccaaaacgcacccttccaaagtctaacctttccatcgtccccactagaactcagaactgtacctgtcgcgttccattctaccttactcacactccttccgtgatctcccaattccgctaggcaagcggccttccatccgttctctccaccttgaacgccatccgaaccatgttcatctccgttttcatcttcagtcggggtgaccttccagatccggacgataccatccctagatccagaggcgatcaagtggtgatctcttccgcaagagggggcccatgagagagaggtgattgttttagaagaaggggccgaaggagtctggcttgaaggaggggtgagcgtgagcagatgttgcgcaggggatggatgaggaagagagatgatcttgatctctccttcggttccctctccgacagctaagatcattccccaccatttctccttgcaccaactcaaacatctcccaccaccaactgcttctcctccagcggccgtactgacactcagaccaagtgatttgtcgttgttggtctttgttcttgagatcccaccttcgctcgggttgtgaacggatggagaagagccggtcggttgagaggatgtcaacgaaggtagatgaacattgaacagagggtaccaatcttcgactgagggcaaggctggcgagtacagtcggagatatgaatcggatgatatcgtagccttgttcatcagaagaccaaattaattggacaaggaaaatcaacactttgtgtatgagagagcggagcgaagaggaacatgtcgagacttacaagacgaaggccaagttcggaagggccaaaagccaagtctcggacgcttcctcgggcttcagagagcttggcaaccatggaccaccgtttattattggaactcttcagctctgaagaaaattatgacgagactgatgttcagtccatttttaccaatgccatttcggaaatgagaaagttgacctaccatcactgttttcttcgaagatccgcacagttcgatcaaacgagcacgaggctatcagagatccgtgttcgggatgagacctgagcatagaagaagcttttcagtcaaaccatacgagaacgtgaaagggaacaagatgggatatgcgaaccatgcaactcgtgctatcggagcgtcgtgagcctatagagccaaaacaacaacatgttttgtagaggtcagtctctcctgattctgaccctggtgtttttcatcctcatagagagtacgtcatgcttcttgatttctctgggttgaacacgccttttttgtttggctgaacccaaaaactcaacaaactgacgctcggctagccatccaacctcacacggttctgacaatgttctatcttgatgacataccttccattcctcttcaagattccaactggcatcagctgctttgctccaaactttgatctgttgatcactactagcagtaacaagccgtttgccaaaccagtcgtaggctgcggtagtgatcaagtcggtgtgagtcgaaggaaggactgaggattgatacattgtgaattgatggacgtagatataaagcaacaggcaggatggcttgggctagttcaaaaacgaccagataacttagtcaaatctgtgcagaactagatagaggcacctggcagacgcgtctctttaagtttgtttcttgaggacaaaggggagagagatggtcgatgtgaaccggatggacggaggcaaggagacttaaggatagaacaggatgaattaaggctgaagagttgaaaatgggtcacgtgatttaaaaggtctttctcttctctctgctttgactacaacgcgcgctcctggccctctcacatctcttctgacgcacaaagacaaagacggaggatgttggatggcagttctaaggacaagtcatctcagttcgatataccactcgctggtccacccagttgaggatggttcgccagtgtttcaacggagttatttatatgattagcattcattatattttcttaatcttaattatcagctctataaattcaaatggcaggactatgaagcgcctcgctccttgtcggataagcatactctctgctttagcatctatccttctatataagaaggagaattttctgaatcaaaacagtctgaagagttgtgaggatacaactcttcagatctgtgatatttgatacaatcgaccccagttgaggcgtcgatgccagtatttgctcagatgggcagcaagcacagtagatgacgacgaatcacttgtccatggccagtttactggcctttctggacaaaaggacgatacctggacacgtatatcgataatctggttgagtcctcgccaagtattcagaaaaaggaatcttgagttatcagaaaccatgagtagtaaacaatagctcggaaaaataaatcacgtactcatctaatcgatatttgccgtcaggtgaagtgtctgtatctcacaatttgctcactcatcttcttctgcatacatttcaggggtacgatccgataacgatatagatcactgggagagaggttgagtatgagacagtagaataaagtgaggcaaccaggtccgagaatgtacagcgttcacccacacagggtatttccatgaccggctcgatgattccgaacgtcagagtagctctgacgcgtacaagagcaaaaagatcggtatgggttccatgatcatagttcatagcaacacctacaaagcagaccatgtagtcaaacacgcaacggtcgcgtagtattcagcaagttaccgttcaagaggaaagaaggagatctaccaaccagtacagaccgtccgccagatccgtcatcacgcgccgagccttgacatcgcctctgttaacagcgcattccatcctctgtttcagcacattgatccgccattcttccatgctcatcagcggattaagaatcgcccgcttctgctgtacacgtctcaagcaagatagagggatatgttgatggaagggcaatcaggaccttttttctcagatacaaacatcaatcgcaggtgtagatggagaatatgcgctatcgtgattagccttatgttcagaagacatttgaacaacatacacatttgatgattccagaacttttctgaaacgtatattgacatatcgaacagtccacatgtatatctcacggcattggtcaatgtagctcatcactctatgtgcgtttgggtcatattcgtcgccgtgcgcttgtaaaccttcacgtgggtgtagctgttacagaggcatacatcagtgtatgattgcgttcgagtgagcgctgacagaaacgcagacctaagtagatcttatgggaatgaatgagacgaacaattggtcgagcatcggtcttcagatagtcttcaagtactcctggagggtttgattg

SEQ ID NO: 2972 - DNA, 6285 bp, Xanthophyllomyces dendrorhous
ctcctggagggtttgattgaatctagtcttttattattattatttggaaattcgtgagaagctatactaaaacgtaagaggtgaagtgaatatgccgactcgactgtacatagcggaagaaagacgctgatcacgttttgacagtgcactggtacatacgttttatatttatatctataaacagcagtccgtatactccataggctgatagatgtacgagatgacgagagaaaattagagatgagtggtgataagagttttgaatcttgtgtctgaaaaggtagaccgaccaagattatgacgaactgatcagccgactgaccgtccatgtatgacatcgtccaatgactttttcatactctcctgccgctttacataaggcgctccaagtatatagtaattgagcgagcaatagcaggttagatgtgagtaaggtagaggtcgagtgcctctgtctgctcaatacctcacactgaggatccttggacgcagttgtgaatcaaggtcttggcgtgaaacacttgcggtatgtaggagctcatagggatgaagggctatgaaagacaagccaggctcagaagacaccatagctgatgatacgtttgacatgacatgtcataagaaataagcagaagcttgatcaagacaagattggaagctttgggaatgatcatgtagttatcatgtttgctctacaagagttacccagacaaagagtaatacacacatacacgacgatctcaacagccggcttctttttttcctttctcttccacttattcatccgtccatcaagatgacaagatatcgttagcccatgaactatttctccactccatataccctacaacaaggtagccgacgctacaatcaaaggagtataacaattgtggaagtgataggaatagtcatagtggcaccaacacaagcagtgacgatcccgaactacgtcattgttcgcttcggatgactcatcagaattctgtccgcaggccgagacggatgaatttataaggatcggaaaaactctcttaatttttcttcttcgtcctctttcctcgatcactttcccactcgaatcaaccatcaaccctgctcttcgcattacaacacatctgttctatcacttgctcatacatacgcattctcgtatatacacacgacaacatgggatttatcaacactacccttagcctctttttcgttcccctggttgagcctgtgtatgcctccaaacccgcagtggtggagctccagtcttacgaatctcgcccatctttctctgttcgtccctttcaatggttatgcattcctttccgtgttgattcatttggctgacatccttctcttctcatcttgccttcttgttttctcagtcatcgagcacagtctctcctcgtccctcgatggactcattcggcaatgccgtgcacaacacaaccaagccttgggcgtctaaaggcacaagcccatccaatgtggagtctaggagatcgtcgtctgactcgtatgctcctaccttttaaaggtatgttcttttgtgcacattgatgaaataggacaatttggacaagacgcttatctcatctgttattcttatgtttccctcccgacagtaccctaatctatctacacttgcatctacccacttgggcttattatctatataatcttactcacgctcatatctaggcttaataacacataatgtaaaacaatttatagaactgattgctcttaaatggtccactttgcttcgttataaatatacatggttttcttatattatatgggtggctcgaacatgagagaacaatgataaataaataaatgaaatactgatatctcatgtacaactcaactagggcttgactcatcgatagatcggcaatgattgcccagagtaggcgtatgggatgaaagtaacggtctgatggcattggtacgatgtcgctactagaaatttcgggtaactccgtcgaggcagacccacatggagacggcatcccatgatggacgggaagagtactcgaccgttcttgtttcacctttttccatccacctttttcttctacaagctttatccgacacaacatcgtcatcatgaagattcctctcttcgttgtacctaccctgaccatcttaccagtggccctctcaatccctcttcagtttgtcgcgtctcctccagatgcttcccaactgctcccgtctaacccggacttcacccttggcgatgtcgaccgcctactcaagatccatcctgatccagtcgaactcatgaaacttctctctcccgagacggctgaagaggaggatgagcctcggctgctaagggtgttcggcaggcaggcattctggggaacagaaggagacaagatgaggttgcggagggaaggccttgggtttatggatctcaccggtttgtccgacgagaccgaaggattgtccttgatcgagggcaaggcagacaactgtatgtgtaatgaagatgctcctcttatttctcttgagaagtttgccttgatcataacatcggcatctaatgacgagaacaaataaataaacgattgatcagatacctggccagacctcaagtatcaggatctcgttaaagcgatcctaccccggctttctacatccaacatgcactcaaacctcgttcatcttacatcgttcttcaatcgattttacaaatcgccccatggtgccgaatcatctcactgggtctacctccaagtgctgaagatcgtggcggacgctccagctcatgtgccgctctctgtccgaaagtttacccatccgtttgcccagagtagtgtgatcgctcgatttgaagcaaagcagaccaatcacaaagacaaggtcgtcatcatcggcgctcatcaggactctgcgaactacagacttccgttgctacctgctcctggagcggatgatgatggcagcggaacggtgaccatcttggaaggttggttgatcgcctgtgcatatgccattcatcatgcgttaggggctcctgatactgatcaacaacccactctttctctgcatccattagctttcaaagcgctcgtcgagtctggcttcacaccaaaggttccggtcgaatttcactggtacgctgctgaggaaggaggtctcctcggatctaaagacatcgtcaaggatatcatcgcttccaatgttgacgtcaaaggaatgatccaattcgcaagtctagaccctcaattatgtacaggaagcaccctccactagaaaactaataattttttgtcctctctgtcggactaatgggatccttcctgtcttcttctctttttctttctctttcataaaggacatgaccgcattcacgaaagcgaacatgacacctacggtcaccttgatcgatacggatgtcacaactagtttgactcaatggacggttaaggttgccaaaacatactcttctatcaaggtccaactagcttctctcttgtgagtacctctcttgccttgtgcgcgagttttggtgtttgttcctatttctttaaccagaaaaaaaaagataccttgaactaacgctcttgagagcttcggctttcgccgaattattgatcagcccgggagcagggtcggaccacatgtcgtactaccaagctggattcccttcgtgctttgcgacagaggctgatccgttcgtcgcatttgatccttatgtccacgtacgtgtctggtctccgaaaaaaacatcgacatatgctttcttctagctcgatctgacgatttgtggactgttctctccctggcttttgggtatcttctcacaaactgctttgatctcgcgattcactctgcttatcgatctcgaaaaacataacagactacgggagacagaattgatttgcccaacaaagagttctcgttcgagcatgcggtcgagttcagtaagctcgccattggctttgccgttgagctcggaggttgggaacagtagatgatcagctggcttggtgtcgcctagaagctttcttgaatagctgtacatggcttttgttccttgaattttttctactacattctcctcgattgtaaatttcagttgtatgtaaattcgatcatcagatggagggtcgtgggaggacccagtgcatcgtaaaagaggatacaagaaaacaccctttggtcgattctccttttgttcaggacattgtcaacaaacctctaatggcatcttcaccttccaatcgaaccgagcgccattcattcatgattgttgctcctactttcttttcgtaaaagttgatggctggctcgttccactgggttttgttgagaaaagaaagataaattggtctcagcgcgcacgcatctagatccccagatagatcaataaaagaaagaagacggcttacatcgagcacgctccaatccatccttccacatcctctctcgagcgcgacttttgcgagttccttgaagaacgactttcctacacccaacgcgcggtaaggttcactgacgaagaggtcttcgaggtagagacctggaaaaccagtccatgtgctgcagaaagtgattaaatcgacgatggtctgaatcagtccgagctttggaaatgagacgtccacctgagcttggacaaaggtagaaagagattggatggacgaacctgaaattgaaaaagaactatgaccaaagtgaaaagcggcaaatgagtcagagttcgatggcaaaaagcaacgccggaatgaagaaaaaaattggggtctatattatacgatgatgccacattcggaaaagagattcgtaccagagccattccaatcaccagtcctttaccggttccttcgttcccatcctggtcgttatcaagccgagcgatcagacacctagcatagatctctccatcagattcttttggaaagaggtttcgcctgatttgttcgggcgttgctttggcggattcggctgatttctcgtatatcgcctaggtaggagggaaacacagcatgtgcacgcatgcgtgaaaagacaatcaatacgtcagaggataaacatatgaaaaggaccttgaaggaattatagtcagtgattttacatatgccaacgaaccaactccaagatcaatcgcaaaatgtcaggctgttttggtttccataaaaaaaagacgtcgaatcggaagtgtgaaaaatagggaaacagcatacgatcaagtctgacaaagtgtgagacgtacgatgtcagcctccgtagcaggactgatatgaaaagcgttggagctcatatgatgatgaagatgcggtatgatagactcgagatgttgacggatgatgagcaaagggtcggacaaataactatgagatgagaaaacaaaagtgataaatcatttgggatggacatagtgccaagaagagatggtaagcgtgcattagggttgatggcgcccacgtgactggatgactcatatcttgttatgattcaggtttggagggtaatgtcaggaatacgggttaagtatcacgtgttctcttacgtgggttacccctacaggctattcgttccctccatcccttatgcctcttcgcccattttccatcatgctctagtttgcatggttcatgcttcatctttttagttctcgtgatctcgagcctctctaggctcgtcatatgtatatctttagtggcagaccaaatgcgcgaggggtcctgatataaaacggggacgccctcgcgccttcttggataagagttttcctcaagctgagattcttgttgaaacctcttatccaaagtatattgttaatagtttggtctgcttcagatatattaatcgccagagcctaagtgtcaccccgcgaaccaagtgattacacttggttaccttcttaacaaccgagccttacagatgacgacgaggttacaggagttgtaaccacaccagactcttaggattcaaaggggaaattcaggccctcaggactggaaaataggatggataggatcacgaagaacaagggtaaggacaaggacaaggacaaggatcaagattaataaaagatccaaacttgggagactaagctatgagtggcgaagtagtctcgtattatatttcgtcctcagactccaacagttatgcataagagaacagatcatagaatgtgctacaagcacctgcgctaccagactatgtacctgcatgttgatgcagtgaggaagcatgaggagtaacgagacaggaggagaactagaatcaacggaaggttaccggggtgtaacactcaggtcacatccctgacat

SEQ ID NO: 2973 - DNA, 87218 bp, Xanthophyllomyces dendrorhous
caacaacaacaacaacaacaacagcagcagcaaatctaccaacaactcctcccggcttatcaatcaggccagactcaatctctgcagtcttccatgctatcgctttcaccactccccgacaatccgactttggaagacggatcatccgtgatgcaatcgaattcctatcctgccccagctactacggttgaaaccatcggtcaatcggtcccgatgggacggtctgctggttcaacatcgtctttccggaacgacaagcttctgggcggaacaacctcggcttcgctagggaactggaaccacgtggacccaaagttgttggctggctagatcgtttacttctttacccttttttgcttttctcaccccccccttctccattcgctttgctttttcatacaaacagaaacccacttttatagtccttcctcagatgttcagcttcttctcttacttctgttttcctcctcgagttttggtcataaaatcagactgtatatgtagcgcattcatccatcatcaagacgtcgttcattactcttcttcttctcctcttttcttcttttcttcttttctcccccttgacaagaacacacccaacctcatcaaagcatattttcaatctcactctatctcattcttctttgtctcattctttggtcattcacattggttggtcgttttgcttcctcttctctttcctttcttccttctcggcttgaagttttcgttccaatcctaaaaaaaatcccttccttgcttgtttccatttcttcgtcatcttttgcccttcttaactcccaaaggattttctaatcgcatagttcagtcaatcaatccttcttgttctcgacacttccatctttattcttcgtttcttgtcctctttgacagaaaacaaactcaaaagtaagaataagaaggaaagcttaatcatgtcttcattcgcgattatgtcatcttctcgttctcctcgcccctttctaacatatttcaatttcttttgcgcttggcttctctagatttctagtcattcgaggtttctattctgtcatcttggtaacttcttcctgttcttccccaactatatcctcttctttcctcttcttcctcttggacggtggtttttggtgtcatcggatcatccgttcattctagctttaccccctctttccttttgcttgtcattccttcctgtctatggtttccgctagttctcgttctctcatcagataggaagcaactcttgttgctcgctcagcgataaataatcatgcctatccgatcttcgatatcatttcttctcttctgtactctctcttgacagaagctatgggttccccgggaatgacaaaacttgcatgtaccaagccaggttacatatattttccaagcgcccgtgtactcatcctgcccttcgcttgttctcaggtgcagctcccaatactaccaccaccaccaccgcctccgaagaaacttctcaacgaaccctgtttaggatcgaacgctccgttcccaactccgccacgttgtctttcgagtccttttagatggccggtttggttcattctcaagatctcgaccttcaatcttatctctctcccatcgctcttctccaagattgatccggatggggtttctagtgcggacccaggaacgggtttcgttggcgcaggagccgcaggaacggatgaggggttcggagcggtcgcggacgaaagggtatcggcatttgcagtcgcagtcggagaggccgagcgcgtaagagagggcgaaggggaagtagatggtgtgaaggtcggtgtgatcaatactttgtgccaacctgtatctgcaaagtgcgagcgtacgctcaatgtcagccatcatcgttatctccatcttaattaagaggaataacgaaaggacaagaaaaagagaagattaggaaaaacgaactggtcatcccaacaggattccatgggtcgttttgtcgtctaggccgtctacggagtagtgtacccataagctcggagctgtaatgatcgtttgtttccgaaaaccaaaaggaaaagaatgaacaagaagaaatggtaagacgtcgtcatttttatgatagatcttgcttctaccgacaagagtgaaaaggtttcacttgaaaatcccatgagcgacggctactatgtgtatattttcttgttcggatgactctagatgatgattaaggaacccgtcgataaatcttgttcagaaagtcaaagacgggcgcgcaagatacaagcgaaactccggatctactttagcaaactcgcaagaaagacattcgagggcgagaagatcagacgaaccgatctgctctcttcccaacatcatccaaacactccccatcttcaaatgaaaatgtccttccggcaagtcttttataatttccgctcatgttgttccatgacttaccctcggcctgaccaaagtttctttatgacagcgtttccagcaaatcataagaatgatcagtcaactttctctcctcccgagtaatttggagaaattctactatgattgttctgtcgtaaaataagccttgaacgtactgttcctgcataagaggcgagaatactataggcggcaaattttcggaagcttcattctgctcaaatatctgctctgctgtccattttgctcgaagctgaagaaatcagatttaaatagattaacattcaaacgaccgaaacaaggaactttttgtcagcacttgcatatcctcagtgtcagagaaagtggaaaagatgacttacaagcggactggcatatatctgagtgatacgaactcccttgaatgatccacctagagcctatgtgaggaaaatgacagtcagattcgttttttttgttccttcaatcacccttgaacttccctagcctggaggaaccacgaacacaaaagaacaatgaataaaaaactgactcaccttcgcttgattcattccatggtttgaaagtggggtatctcttgaacctgcccagatgtccctctaagcaacccccgaaaagcattgcctgtgtcaggtcagcccttgtttgctttttcttttgttctgacttagactcttctagaaactagagtagaagtgaatctgaatcggttcaaactgacaagattatcctatcgggtcacatgatgggcagaatatacaggcgaatgtataccaatcagtctgcgtgtaagtctcaccgaaacagtcccatcgttgtgctcatcgatgctggagagtcaaactcacggtagattctccatgccggacctggtttgatgaaacatagttcccagaaattaaatctttcacaaccccagaactggttcacactaaattgtagattgatgtacgaacgatggtcagatacatagtctcggttctcgaattgtggtgatggtttgtgtctcgagtcgtctaactgcatgactaatcggttgaccggccttctaaattcatcaggatcattagataagataacaacatctccattttaaactcaatcttgccgtttcggaacgctctgaagtttgtaaacacaagacaataacggagcacggggcacaggtaacaaaatgtcccgtcaaatttatttctacttgtacacaagatctgtctgtaaatatacgttttgccgcccaagaaaaacgccgatgcgagtttatgtatcattcatatcgccagaggccaataggctgggttcattgcggaggggaagagggggaggaaacggggccgacaaatacatgacttgagaagaggaagagatgagcaagagaatgtgggtgatgtaacatcaaagttaaggaaaaaagagaagaagaaaagagggaaaacagatgtattgagcgatctagccaactcggaagataatgaacagaaccgatagagaaaaaccgaaagggcgtggtgacagaacgtgatgaaggggaaaacgtgaacagaaacagaaacgaagagattgaaaagaaaaaaatgagagcgcgcgaaacaattctcagatttattggttgtatcttcggaaagctggaaaagaaatctcgattcaatcttagttcttggtctctactcgatattacaggacaagaaaaaaagacgcactgtaacccaagaaagcaagatccttcccagctccagctcccccggtatccggttgttgattcggaacgccgtcaagatcctcggtcggaaagtatgacgtatccgtgatagatcttaaatgtggaacgaagggagcgtcgatatttcgaatggtatcccagtcgactccgtagaagaacgggtgagacttgatctgagcgacgttcagtctctgttccggtgatgtcagaaggctgggttggtttcatagagcgaagtataagtaaagaatgatctcagaacgacacaaccaataagaagagccaaggcataccgcttgatcaaatcttcagactctcgagaaagatgaacatcatcagggaagtacaaatcttaggagaaacacagagaaccaatatcagcagctggaccagagccgagacgaaagatgaaacaaaatagaaatgaacgacctacgatttcgccagtcaatgatctttcggtaagtgtcatgcgcgttctccgagcagaacggggggtagccgaccaaacactcgaacataatccctctacaccgtggccaaacgagagtagcttcaatggatgatatgtgacgaacgaaaagaaaagaaggaaaaagacacgaacccaagagaccaccagtcacattcgttggagtatccttgctgcaagaagatttcaggggcgatctaaagcgatacaagtttttttcaataatagaagacatgataagctaaggaaagcttgtttgagttggagaaatcctgaagttgtgaacgtacataatcaggtgttccaacggtcgagtatgcctgtcgtgataagaatttcaacaaaggccatgaattagtacgtctattacgaaccttattaacgtcctttaagtatctccactgctcgtctggctttcgagacggtgatatctcagaaggtagattgcataccaattttctcctattggccttccacgttgcgatcgtgtccttcgagctcattgtcagatggatactgttcaccataaccgagttcctagcccccggtcctgcgccggccatggcgtttcctcccggacccgttcctgcgcctgctgccgcgcccgatcctccatcaagaagtcgttggtagtaagctgaatcgtgttgcttctggaagccagtagacagcccgaaatcggaaagtttgatgtgaccctgagggtcgatcaaaatattatccggtttgatatctcggtggatgaatccaagtttgtggaccgcctcgatagcgagaacgcactcggccatgtagaacttggtcacatcttccgagaaagtgtcatatttaattaacctgactcaacagatcaccccgagcgtaggaaacgtataaagggtatttcctcagatcagacacatgtacttgtgatcagtccagaaaaaaagtctatgggatgacctacattgtcattaagtctcctcctggcaaaaactccatgatcaagtacaagaagcttggatcttggaatgaaaagtagagcggtacaacccagggtgagttggactctgctagaacatctcgctccgctcgaacatgtgccagctatgctcgagaacgaagtcaaggttgagacccagaacagaagataattattcaaaataaacaaaatgagctgtctccatccgaaaagaaagttttcttataaggtaggcacgaaaaaagaagtacagacctggtcttttttgaacatctcgctcttcatcagcgtcttcatggcgtagattcgaccggtatcgattttctggactaggcgaacctacacgatcccaacaaaacatatgacaagatgcgataagcgcatgtagttagttgacttgtcactccgctttgatggctttcaagagtatgattgatctctcgacgatatagagcgaacagaaagaacacacctctccgaatgctccctttccgatgactttgactgttcggaaatcctgaagactaagcttcgttcgcctcatcctcaggaaacttaatatgcaattttagagccagccagagatcattcagtgatcgacgacatagatgaagagagagtaggagcaaaggcttcaagagaagaatacttacttgctctctttccgaccgtattgagcgatcagccgctgcttgagatggtccggagtaagatgatcttgagtgagtgcccgctcagttgtgatacgcctgtatgccacgagagcaaaatgagtcccggtagatagtttttatcatgagtaagtgacaggaatagtatagaaagctcatcagaaaatgttgttctatcctaagagagagcagaggtatatgaaaggaggacagaagagaggatgatctagtgactacgatctctatctcccacctcttcaccaatgtccttttcgggttaatatatgctcgacacatatccgaaagagcacagcatatttccgaggagcgcaaggagatgaaaagaggggaagaaaagaaagagaaacaggagagagattgagaacaagatcagaacgaacctctctcgcctggccaccgcgccctccacaccgtccttgtaccaaagctcaagtctcatcctgacctcagtagctttctgtctagcaccttcgaacttctccggatgtctctcaaaatacacatagtctggcccatgggcctgctccgagcttgctgctcctccactgccggttgacaaggtggacacaggatcgacgtccatattttgattgggatagtggggctgggattgaggataaggaggagaagggcggtgaggttgttgttgctgctgttgctgatatggctgctgctgctgatacggttggttgggacgaggctgatacgactgattgtttgagtaagccatggtgggattccttattcgctcttcttttagaaagaattgaatggatagagtggaaaatgctcgatctattcgggaccacaaggaacaggaataggaatctgaggggcgagagatgagaaagaggcacacacgaaaaataacaagccatcacgcacgccaatcacatcacacaaaagttacactcttagcctgcgttgtctattgcctttgtacgttttatcagaaattcataaagatacactgcaagacgcatacacaaacacccccaaacacacatacacaccatggccatcggtactccatacctaactgatcatcagtcctcagcctctaaggaactagcttcctgcctcaaatcgttcggtacctctccatccctctcctttcgactcattacctcggcttcctcagccttctcagcagccacatcatccgcccggacttctagatctcgttggccaccggggaaaatatgtgacaccacggccacacccttgcctagatatccaatgtgggacaaagaaaagatagaggaacgacactggtcagcaaaccatgatctagaatatctgtttgtcttttgcgcgcgcagtatcagacataccctgagtagcttcagcgacctgttgaagaataagcaagtgtcagtagtcgttcgtctgttcaaacagatatatagaacgagaaatttccctacattttcgtaaagatttttcccggtatccccatcgcttcttcccggacccgtccagaagtggaacgctctcgagagaactccactaaggtaacacacagtcagttttggtcgatcaattgagaatatatgaacgaaaccaagagacccactaggaagcaggcacgacctcgaccaggtcacctcgagcaatctctacggacgggacctcgttcggtggcaagccgaccaaataagccaacttaagaacacagcaaccgacagcggtgatggcaggacaaggatgtcgttaggtgcgaatgatgaacagctgaatgatctaacgaagagaatcaacaaacataccaaacaacgaatcacagaagcatgtccgataattagcaaatcatcctgacacctttccaactcgaagatcacgctttccaatcggactgtcgacaaaaagaattgagttagtcagatacacttctagaacgatagaaaagtgtgctcagcaatcttttaccaagacgtaccactcaaatcgtgataactttccgcgcgaggtgctcggtgagcgtaaggatcctttaagaacctttcccactcatctgggtacagtctcttagcctcttctgaagacaaaccgtcccagacaccaggctgttgaaggacagttgtacaaagatgcgtttgagaaggatttagaagagtatttcggcataataaggaaggatatgagatgaacaggaaaatgaacagacgttgatctctcccatctgaggcttctcctcgactttgtagtctaatcgaacgaatggccaagcggtatgatacgcccttctccttgcgctcgtccagatctattagagaagctgcgatgagcgttgatatgaagagtatgaaaagaaacactgaagttcgagcataccgttagcggccgatccttcgcgacctctcctcttcttgtcctctcttctttgacctgccgtcgcctactgagtacggcttccttaagcctctccgcatagtcccatccatcagcacatagatcggaatcagctttgtacgagtgctcgatgatagattggccggatctggcgaagtagattgttcgaggacggttgtgaatgttctgaagatgtggcgcacaaaagatcagacaagtcatcagcaaaggtaagtgcagtaagcgtaaagggacatcatctgagaacttcaagcataccataaggaagaagataattcgggattggagatatcctaagatatgattaacgagtgcagaagacagtacatgactgagtcagacagaccgatctgttcatatggccgatcaggcttatcatcaagaacataccttcaattcggttaatgacgatgcgctcgccaacgttgatgactttgatccatgccgcatctggatcgacaattggctcgtatgatctttcctggtctctgattcgcgaccaatagtctcgaacagcatcatccgagttccaaccccggtactatatacacgcattcaaatcatttaagcgaatcagtatggaaattcatctcaaacaagcgatcatgaagtcaaaataaaatatactgacgtcgggcgacgagagcttgacagaacgaatattagcttcgacgatttcgtctctgtcgcacatactttctgttaaacgcgtaagataaacgagtgcaagtaagagatcgtcaatcgagcagatgcgtgaacagtaaactgacctaggaagatgactttgataccagcctcgttgaatcgtttccacagctcatatctcgtcttccgaactccgttgttggcatcgtatatgacgacttggccgccctctttctgaaagaagtccagtgcttgctgttccaaaccaagcttaattcggtccctcaactcttgcgtttctggccgcttcgctcctgatcatggcaaaccgcaagacatatattagacatcaaagcgcttgcattgacacattggctggagccaagcttaggatgagatatgaagggaaaggaacgaaccgattgcaaagtaatctccaggcagcttgtctgctcctcctatgatctttcttctgtaatccccgagagagaacactccagttttgactcctagccatcgtagatacctctcgagcgatctactgatgtgtgttttacctcgagctgtgtttagaagatgatccacatagaagacggagccaatgaatgattagccctccggaagatggtcggctggccacttctacatagaccagaatatacaacttaccaggtaacccgacggttactgaacaacgaagtaaagaagatgcatgtattcagatcgttgtcgagttctctgtagagctttgaaggacatcataactcaccaatgataatctagtagacagtgtccgttgataagcgaaagtgaaaaagcagaaacaattggtgaatttctattatagatacaaaggaggaatcctcttgatccctgattcgattcgttccataggaaatcctgacgacaagttcaatcaagaaacttacttgaccagcatgccagagtcttcctgaatctgtggtgtatagaggagccgccatgtgatggatgaaggatagagatgacgatgatgatgatgaggagaaggagtaagatatcagatccagtcgcaggagagatgttcagcgtctaggacgaatcgatttatctaagcatcgtcattcaaatacactacataagtctttttcgcggtggaactcatcccaatgtgttggaactcattttagccatctctcactcccatccctccatcttactatcgtcttgaacctcttctctctttctcatctatcacctttctttagatgtctcgcttcaatccatactctgaaaatggaggaaccgttcgttctagttttgaaatgatttcgttgccagctcaacccttggcatacccttctggttgccctgttgaaatgctttcgacaagacacgatctttcctaacctttcctccgttcctcgtctgtgtttgaaactagatcctcgccatcgcaggttcaaactttacaattatcgccggtgatactcgtcagtcggaaggctactcgattcagacccgatacgcacccaaagtgtttcgtttaacagacacctgcgtcatcgccgtcaacgggttcgctgccgatggaaagacgcttgtccaaagggtcaagcagcgattggaggtatgatattcgtttttgcaaaaacttctctctttaaggaacaagaaatagagagaactatccgtttctggtctgatgataccagacagcgactgacttgtcgtgatttcaattcctcattccattagtggtacaaccatgcgcacgctaaaccaatgcctatcaagtcgattgctcgaatgattcagacaatcttgtacggcaaccgatttttccctctattcgcatacgtgattcttggtggagtagatgagacagatggtaaatttctttactttcagttgcgggtgtagactcgaatgaatattttgaatctggagggaatctttaatgatctatttgatcgcagggctgattcggagtgtctgtatcttctttctgggcttatacaggctcaggagcggtttactcattcgatcctgtgggaagttatgaacgagaattctgccgagcggcaggcgccgctcaatccctcatccaacctttcctcgataatcaggtgagtttctcctctcttttatattgatctcctctcttgctatgttttcatgtctctgtttctcatacttgtcaatatatctttatacgcttttcgtgcgacctgcgcagatttacttcaagaaccagacacagctcccacatcttcccccccggacgcccggtcaacttccgctgccccaggtgctctcgatcgtgaccgacacattcacctccgccaccgagcgacatatcgaagtcggtgatgggcttgagatgtttgttgtggtaactcgacaggttaccggagagaatgttcagtcttggaatgacgcgctagccggactgggacaggaagaattaagggaaggagcgagcatcgagtggttagacagcttgggcgtcgttggtggtcgtgagacgaaatgctgtgtggttaggagagaacttaagaaggattaagacttctttttttcttctcggttatccattctgatttctactctttcggttctttcctgatcctttcctttgttactagtgtagtccttccaccttgttctgaagattaccccgatgtgctgcaaacaactcttttcttcttgcttctttctccatgagtgtgaatgttcgcgatcaagagatacactcataaataatttcaacaaacaaaggtaaaaccttacaagagaagggaaggaagagagatagaaaacatatatgaaacagagagaacagtagatgtatatagaattataaaagtgatacaatatgggcagagtattgttttatgatatttgaattgaaaaatcgaagatcgaagaaaggggaagatgaatcaagggacacttgagatgaagatggtggtgagattgaaagtccaagaaatttgaaagtgagagaaccgaatgtccaaggcaaaaagagagttccaaagaaatatactagagagcagatcggaaaatggacgcgcgcaaagaagggagacagaagaaggaatacgggaaggaatatgttatttcgtggtgagaccaaatgcgttccggttgacaaccaggcgagtctactaatctattgatggctataggtagaacggggaagaacccggaggtaaaaaaacgggcattcagatgggagggcggtaagaagggaccggagagatggagcaagagatctccggccaaacggcacgaatctatgtatacgtagaaagtatagactcaaggtctggctccgaccagcttcaaaagaatgagaccaatgagaagtatactcgtaaacgcacacgccctagccagtcgctcgaaccagctctcgaaagaaagtcttctacgggacccaattaagcgtttgcctttgccatcgcccttttcctcctcggccgaattccagaatgaaattgtcacaccgcgctcttcatctgagggggtgtattcttcaggaaacgacggaagccgaggtctgaatgatttcgacggcggtggacggtacgtcttgccgcccggcgagggtttcggtcttgatggcacgagaaacgagctgggcgggccgggaggcgggcaagttcgtgaggtaaggggcagagaaaacgatcgtttaggttgaatcttatgagacggaactgtcgatggatctgacgaacgtcgagcggacgagaagggtgtggccggtggggagatactggttggagaagccggggtggtttgtacgtgtggagggaatgaccatgacctcgtcggtcttaccggttcgaatgagttcatcctcggaatctcgagtgtgagtgagggtttctccgtgggcgatacggtgatctctaaaggatcacagtgttgagacagaatgtctaataagtaggggaggaaaagacaagacagagtcagaacaaaggagtaagaatgcagacactttcatggacggaaggaactgaactggtctgatgcatcgttcgttctacaaaatggcagagaagaaagggttggagtgaaaaggaagggagagatttctatagttgagacacggggaggtccaagaggatgatgattcctggtctgtccgtcttgactacgcccgagtgtgtgtacgtgcgagcggtctgtacctgaatgaatgacaacagataaatgggtaagctaaatacgtcaccaaactgatgagagcacggagcgagagaatgaatataagcaaggtgaaggaaattgtgcgtgcatgcataaggatggtatgtgagagggacgatgtatgtgcataggtgtgcatgaaactatgcccctgcacttctgacaagtgccgccgtcctttgtcggaccgatcgaaggatatctgtctctccgccggttcatctgtcttgacgatgcacagttggtcgtataatcaagttgattgacgagctatctgaggtgcgcgtctgactctcatgtcgatgtctgctcttctatcctgacgaagatagaaaagatcgagatgccagcagacgaagaaaaggagagataaaggaagaaaagagagaggagaggaatcaatctcactcaccgagagctgagcagaatgagtgtttgtagaagtaaggaatcaaggtaagaagaggaaaagagtcgaaagatggaaaagagatctagtgaagtccactgttaaaagtggtttggaggacagatcagaagaagaagaagaagaacgaaagataaagaagaatgaatccgatggggagagggagagaaagcgttcagtgagcgacacgcaccccttgatagtgagcaagaagaaggatgtaggacgatctgtcgcaggctcgttcgtaggcgctttcacaggcacactcaccccttactcagccgatcggacggtgtgatagcttctctctacctctcttcttttgatatattgtctcggccaagcagacgccatttgttctgtgctttggtaactgactgagattgtgcctgtcgcctggcccgagcggacctaaaagcggatgatatcactctgagggagtaaagatttcgctcgtacgggctcaatcacgcactctcgtccgaaccctgaattattccgggcctggaacattccttcgttgatcttgttcggccatggcgatctccggggccacgcttttaagctttctagaccaagacaacgtttactcagactcaactctacttattacggtcttcaagctccgcaggtagccggttgtaaccgcctgcgtaaccggtatcgataggcacagagatttgaggtcaggctttcagttgatttattaaagacggaaagaatgatatttatgaaagacaggaaacgacaaacaagaaatagaaaaagggattgatagattgcaaaacaactaggacgaaaatatacacgaaaaaggcaagtaaaagcttaggtggcaagacatacaatcctcctcataaagagtctgtaaacaatatagctacgtaaacgggtcgagttctatacacgggatatgccccacaagaggagatacgtgatatacagttcgcatctcgtaaggcatctcctccctcctcccaaaacggctaagtgaaagatttgtcagaacggggagcgaggctgggaagttgttcgtggattacatacatgattctggacagctgtccttcgatcgaaactacccatcacgcccgggagttcagtatggaattgataacgacagcggcattgtcattaaacttaccgttaaatatacagtggtcaaaacttaagtcaaatcattttatctaaacgaggtgttcgagcttttctcgatggatccgagattctaggatttcttcggcctcatacctctcgctttcgtcttcagagacttttcagcaggcggtgatgtgacctgttgagccgatggttcgttttgatgatatcgctcaagttgcgagacgtggattaccgggtggcggtccatagtggccggaaagtcgagtcggaaagcagcgcggcctactggctcaagaatcttgaacggcccaagcaccttgtaatcaagtttgtcgtttggtccgtaagtcttggtgactatttgtttgtacaagactagatcgcctggtttgaagtctggagcagcggatccatttggatcatcatatccttcttgtgtttccgcggcattcttcaagaccgcttggcagaaagactcaatgtctctcacctgtcgaacgtgtttttgagcatccagaaccgggcagttaattcgaatgtggccaggttgaccacaatacaaacataaattgagttctcgtcgacgatctcgttcttgagctgttaggggtccacgaggagaggaaagattgtcgatgtctatcataatcgaaccgtctggtggatctgcgtgaacagcaggtcggtccgctggggtgatccagggtggtttctcgtcatcaagaagaaaaggtcgatgaggtatggttgattgtgtgccctcacccttgagtttcttctcgcgttcgtagaatcgctcatcgatttgagtagcaaggttcctaagctcctccagagtatcaggtctttttaaaaagtcgattctatccttgatcctgggtttgagtccggagtagaactgggagatcagccagtcgtcgttccagcctgtgaaggcgactaaagatatgaactcgacgtaatattcatagactgatcgggtctgagtcaaatattagatctgtcgtgaagctgaatatgtctcgttaacgaggccgaacgaggtgttgagacgtgcttcgaattgtctaaagtctttcatccagtcaggtttcgtgaacgcgccttggctcttcatatagggctggaccagtttgaatgcgggtccccggaggtggtttatggcgtagtatattttagattcctcggtagggaacttgcgtggataaaccgtgaaattgagcgtgcagagacagaaaactctctacatgcgctcggatctcgtccgtcaaaaagtggaggcgcggagatcgtaggttcgttcgaccgttcggctaattcggattggagggctaggactttggcttccaattgagcgatcctggtggagttcgttgcgttggacatatcggatgctttttgcggcagagatggccgaataaagaatcctaaacaggaggtgtagattgatgaaccgcaaacgaagaggatagggttgcacgcaagaaggtatacaagggcttagatggcaagatggaaatgacaaagactcgtgctcgaattccgatatcaggattggacgaggaagcattccttaaatactataccgaagcctcgacacagctgggtgagtatcaggataataaagtatatgattctccacacaagaatgcatggaagagaaagaattttcgaaaataatagccaggtaaacgggtcgaggttcgcagctctgatgtgctgttaggaatgtgacctgggtgctacatgcctggaacctataggttacaggtcccttgccgttattgctacttctcttgcaaagcattaacttccaagtatgtagtcgtacaacgcatgtgcccctatcgcatcccatggttccttcttccgtgcaaccctgtgatacaatccttccgtgcaacccgccaacgcagtgtaatttcttagctcatcgtctgcaagtagtatctctgtagtctgaggatcaggtatacgaggggcttcctttgccctctatagcatgaccttttccagccaggatcttttgttagtttccttgctatctttatcattgctctctattatctgtccttgtgttccatcttgatatattaatatcattttcttgcgctcctgttctcagccatcctagtcagagcctaaattccacactaccaatcctagcagtcattgtgggttatacagctcgtagtcttctccatcacaggtacagctcacgcccctcacaggataccacattcgtttcaacactcaaccttacctaatcaagatgatgtttacctaatcacatatataaattaagcattcaccgtcttccccttgttgacccgccctcttaggagccccacaaatattgaccctgttcatcgaatgattcaatacccaaacaaacccattactttcttcttgtccagaaacacttctggctttctctatttccttctcctgcttccctaggtgtcatttgcatatagagcacaccaggttgttcgctcacttattttaactcaactcatccgcacctacctgcagcccatggcgaccatccaagacaggcagtggacagagtgagtgccgtcgcgtattttctccgataggcattcattcggccttaaccctaacgttgctatctcccaatacagagagtactctggcctattgaccaacctgtatgtcgctctcgcagtcacaggtatgcccttttgcttaagtggatagtacagcatatctagtctgatcatatcaagcctaatatcctccctttctccatcccaggcatatgcgggcttagtacagagatcatgaggggacggagaaggcgtcgtggtagactagggaaagatgatcgatctgggaacatttccagcagagacagctgggagtttggatagtaagtctctctcggtccatccttcctttctattcgtgttttccgattctctgacttgtttgagctttctctgccttgctcctcaccagcctgtaccaggctagagcatggtccaagattccgtccccgatgcatccaaggggtcctctcatgtcgctctggcaagcccacaagtttccagaggatagactgcccgcacttatcggcatggatcataccgttcatgttcgatttctccgtgcttgctgttagtcaagattctatctttcaattcagatccccttggcattaggttgacaattactatttttctctaaaattcacagtctacttcctgttgattcatattctcacaaccctacctatcctcctcccgtatgttttcccttttgatgatctagagcgtgtacaattctcatcgactgattcttctccctttactctttaattcttttgcgcgtactgttcctttcttcctctctttgtcgcccacctgtgctcgcttaataggattcacttggtgtatgctccttccaacgtctcacgaacgagtatgctcagagcgtcgctttccagtctgatcttaagcgtgaccgctcaaaagtatctctgggttcatttgagcattttgctttggcttatggtcacttgggtcgctattcttctctggttttcctggggttgtcttagatgtaagcctttgtccttgcctttgtttcttcttttctccttcttcttcttcttcttcttctcgtctctctacatggtgcaaatactgatcggtgtttggctggctttaattcaatcacagaccgaaggatcaacatcgaagccgatcttcaagcagctgaacgatccgcctatccaccaaagtctccttcctgttctcccccatcggttccaagttacgatggcaataacatgagccagacagatcctacgacctccatcgcaccggacctgtccgcccagtccctccaccccacccggtctgttctacaatctgacatgtatttttccgcgccgctcgtcacaccagatcaaaaattgatagaaaatcttggtccgaggggttggcgattccgaacgctcatggtatctaacgttccacccgatatgagagatccagaggtactccggacgtactttcaacaggggctcgaccggaacgatatacttgtcaatagaagtaaccagagggtgtccttttttggcaccgatcccgctcaagcgacctgttctctcgatattgaacggcggctggtagaagaacaagaagcagaacctatcaccgaggtcgtcattgtccgtcggcttctcgagctagagaaactcagagagagaagggcggacgtattgaaacggttagaagaagcgcatgtcaagttgattaacaacgtcatgacagcggtcatcaaggagctcaaagggtcggcttggaacggtcgttggctcggtcgtcacttcggtggcgtacccctgtggatacctcatcagacggctgagattgggggtaaatacaagccggaagggcataacgaaaagagagcggacgaggttgccgatctaccctctatagagaagggtaattcaaagaaatatgatgtagacagagaggacgaagtcgagggaatggacgaacgggaaaggctaaactttctggttgagaagcttcggaggttcgttgacgaagctgaggaccagactgaaagctcacaaggtagaacatctggctcaatggagaatctgaatgaccagtcgtccggtttgcaagaggagagagagggggaggaaaaggaggaaaacatgccgacgatttgggaagtaagtttcaaagtcatgtctccatcagttgtttttgttttgtccttgatagtccgattgatctgaatcgtcttaattcttatcgttacatctcaggttctccactctcttccgcgttccctgttggatccatatcaaccactttactattcctcgttaaccgcctatgcgcttagaaagcacaatccaccgttgataaactatctgactcccaaactcggtctgctttcctctctcatcgaggaacaccgatctcaaccgatagacactttttctgccgcatctaccgctttcgttacgtttagaagcccagaacttgccagaggagtgttgaaaaagatgaagagtcatccaaagagagcattagcttgtaatcttagtccggcgccggattacagagacctcgaatgggtcagtaccatctttcttcttttttaattctagtcgtcctggcgcatttctttctttctctttttccgtgtatcctatctccgtttttactaaataatagcttggactgtctgtttggtttgatgacttccgtaaaaactctatgatctagcttcggctcatgacggcgaggtacaggacagagtacgtcaagggctgggttgtagctatcggaggtaggtgttaatcctctttttctaggttaatagttgatagctgattacagatcttgttatcgtttatttcctttctgtcggttcaacgtgattctagtctgggccttcatcatcttctggatcgtgagtcattttgctttctcctctgtttcatacatggtctctggttgtcgttctatcaactgccaaaacaattctgacgaaacgatggaacaatttctacaacagattcctatcactctcttcgccggtctggtttcagtgaaaaacatagcaacaattattcctcatctccaagatgtcctggataaataccccaaagcggcaacgatcatcacctcgcttctaccaacgctgcttgtctccgggttgacgttgttgatcccattgttattgttcttaatctcgaggaacgcggagacgatcgtgacaaagtctcaaatgcacaacattatgctttctagatattatcggttagtctttgtggtttcgcattttgattcaacaattgattgcaactgatttctcctcacctttcttgtcgttctcttcctttgggggtttatttaggttcctgatgtgtaacgttgtgatcttgtgagtgactacttgaaagtcagcgcatttatctgatcaacattgactcgtgacgacctctagcttttgcgtcggagtggcttcccttgaagcattcgttacgtccttccgaaagaatttcacgcccatcaacctcctgcgtgtcatcgcttctactttcccccaagctgccccgttcttcgcgggctggttgatcgtacagacagcgttgcattcgatgattgaatacatgttgcttggtctaccattgatcacttactttgggcttaggaaagctcaggtgcccagaagaagaagctctggtacagaacctagattcttcagtatgtcttcttcttctttccatctatctattcttccctggaccgggtttgatagactctaacaacgctaacaatttgaccttccttgtttcccttttctcaccaaaaggcgacgcgtattggaaacccctccatatcctgtaagttagcgcaaagaaaagctggagattagtctgcgagctgctttgcttatcatctggttgaaaccatcccactggattatcttcaagctgtctttcaattaccgttctctttgctatcctgtaagctcttcgtctggtgatttgtactggtagtttttgtcatcagtacctgccttcctgacacagcccgagcccgaaatcgttctatctctcgatgctagcaacccgttggtgttgccttttggtttcgtctattttgctgtagccttgcccatctttaagaaccagatgatccatgtgtatcaggtgagtcgcttcctttcttttcttatccaatgaacctattcttcttttgttcagtggcagactgatttcatcttctccatgtacatccattgtcttcgtcggaactggctcgccccttttcctatcctgaaagcatcaatacgagacccagggtcagaggccagtcatccgattcgttcggtacacattggacggtcatgcttgtaagttgtatcattttggaactctcgctttttatgtttatcttcatatcgactattgaggttatatttcgaatattggagatgttttgactgatatgtatgttcttgttgtctttgaaaattcagtggctcaagtgagtttcatcattcactcatcgattcttcatccaattcactgagatgtcttctttgtgtccgggtacagattgtgttcatggccatgatggtcatcctgaagaagagcgcgtatgttctcattcatttatttatttatttttaatcgtggtcattttcagcgttttcttgattcaggtctgacaatcttgtcgtggtatcccgacaatcttttcctgcccatgttcttatagtctcattgggttgacatgtgttttgattgtgatcacgcttgcgtcaaaaattatgttcgtttcgttttttttctcaatcccttgcttttctgtgctattcatttcaacacgacatactgagcgatcttcattggttatttcctgggacgtaaaatgcgattgatagattgacaagagccctcaagagtcgattcagagtgctcagaatctcggaggcagaaggattacaccatgtgtcccaagggtatccattaccttgtgttccatccaggatttctcttgagacttcaccctactcggcaactcccgttgctggtaatgctcttacaccggctcctgtcactgcctcgaacaacggcgggaacgagaacgatggaacttacacctatcctccttccgccgcaagcgctccggatagactgggctttgtaccagacaataatcctcccaacccgctgaccggacggaatgtgtctactcttccatcgcgtggctcggtccttctaccgttccctctagccaggaagccacttccattcgaaatgtcttcgattagacgatcagctccttggacggaacgtgtcctctctgtgccttcccgattgctgatcgcaccaatcctttcccgattcgatgctcattattcgggcgaaatcgggaacggtaagagaaatgcgaattattcggaaagcgatggaaacagggagccttcatcccattcttcaaatcgtgtctcgaccgattcgggctgtcagtctggtgttcctccaagcggaaacaacaaacaagaatcaaagataagggaggtgaaaaaagacaaacctgacaatgaggttgatcaaggtgcagacgtccggacacgaccagctctcaaagtcacccctcgagctggcccgcttccttggactgaccgtcctatcgactcgagactctacggatatcaaccttcctattcaagaccactggaaactttgttgtggttacctagacatccgctccgaacgcttgatttagatgataccgtcgagagtgagttccgtacctcttcttcagttcaggtcaataaatcactgctcatcgttgagcataatttttctctctcttcttgatgataaagtcaaccaagcattcgagagttcacacggtggctccggccatctaggcatatgggctatgaatgaaaatggggagttctgcccaacgatcatcgaagaacgagacgagattattgaggagatttctgccgtcatcaaacaacacctagacgacgatgaagccgaagaagaaatggagttgggccgaaaggtatccgttcggtcaaacacagggatgaacgcttcgtatagcccgccgtctccttcaggagtagcttcgtctccgacatcgagagaactgaatgctcttcctgtctcgccaacagctctcctgtccattccaagcgtcacttttagtaatgaaccacaaagtccgacccgcccgggcccgatgtcaagcccgaagatttcgcccattcggttcaacagagctagagccagaacgttgcacatacctagacgaaagacgagtacttcttctagtcatagacctatccgacacttttcactttcgaggaccacgaacgcggctccgtcggatgatgtgtttaccacgactggttctccccaacgatctaccgatcatcgaggtcgatcaaacagtcagcgtagtgggtcgagagaggatgtattgcagttgatcgcgaaggaagagttagcggcttcccgtagagatcgggtacgtactcttcattctgcttggagacggtattcggatcattggccatttcggtcagttcgtttattgacctatcctcttctctacttggttttaattggtgtctgttacaggcggaggctagcgcgattgtggagctcgaacgcagtaaaactcattctcgtgtcttgcgacgtcttggtcttgtcaacgccggcaacgattagaagtacatggactctcgttgatcgttaatccattctctttacgctgttcttgtttcttaaatctcgcaacgtatagtatcgctcttaccctccggaaatcgttcacatttttcacgcctttttgtgtagtttcattcatctttttatccatacagtcaaacttttcccatcgacacatatacatacacaccaaatcatgttgtacgcttcgaagctaccttatagtttattgactctatccacgtccaacccatacatacaagccccatagagtggccccaattttcatccatctgcctccttccaatctctctagatcatttatttactcttcatcctcattcttgatgaatgaaggtggacaatgacgagtgattatcgttgtgagatttctcgaacgatgcatctgacgcaggtataaatctagatgtgactgatctcgataacgctcgacaaacggaagaaaggagataggactgacaggacaggacaaatttgttctcccaccccgaaagcttgtctcatctgtggttgacctagacttttcatgcactctactccttggaacatcaacctgtatcctatttctagcctgacctgcctctttctatcgtcttcaagcatcctttctaggttctcttacgatgaacatgctcacagacaccacacgtacaactacccctgctcgtacggctagccactctaggtctatctctaccgtggggacgcctggtcagagtcgaaaatctacaccatcaatcaggtcaaaacgtcctgtcaagccaagcgcgtctaagaaagagagaaccgtcaagcgtccgaagacaccattaggaagagatggaaagaaacttgaagagatcgatgagaccgaaagtagggaaggtgatgaggataacgagagtgagagtgagagtgaaggatctcaagtcgaagtgcgcatacaaccctcttcttctttttctctcatttgctctcaaactggtattttgactaatatgatttgacgtgataccatactagacgaccctggttgtatgtaacgctcattcgaaggtggccgctgcatacatcgatctagtgacagacaagctctatataatggaagatgtcaccgactcttctcatttcgatacaatcgatcttggtaaagaaactgtgtatcttatcatttaactctagattaagttaactagaggggtttctttacgggtttcatgaatctagtactccatcaaatacatcctcagatgatccttgtaaattctggcgcggaagacgtgttagtcgagcagctcaaggcgtacgctatcgcgcaaaatgttaagtttgagatccaaccacagaaaggcaagttttcagaatttgcgcttgattgaagtgataatgtctgacgatttatcatctctgggtcggtggttgcggtttgatcgcgccttttccagattttcaatacattaaatcgaagaacaaactcatctcgctaagtcttcctagctcgatcatgcgcgcaacatcccaaaacagatctctctctccagaaaatgtgtttccagaaaaccccgaaagttacaccttttctcacgggggtgaccaagtcgatgatgacatggaatatgatcataggtcgaagcggatggagcttgtcttggcgggtatgttggatttcggaaagactctttcggtgagttcaaccatgcaattgttttcttatcccatgtaagccatgccttcaattgacaaggtaggtatcaacatatgattttagatctcagcttgtggcgctctgttgacatggatggccaaaaaaagagctatcggtgaccttccacgagaggacaatggttccataagcgttagcggtatcgagacagttacaccgtctgtcttgacaatctttctacttctgttttttatgagtatttaaccatgatatctgttatatctgcctttttttttactccagagtcgagtttatgcagatcagtgctgatactctctcgtaagaacatgtgatctcttcaagcgcgcattcatgcgtcatctaatcaaggagcgattctcttcatttcatgaacagatctctggggatatttgagcatgagtcccacgcatacactcactcctctgcaactaaagaaggtctatctctctatggtaagtgaatatgtctggctctgtactggatgatctgttcatgagagttctgaacatgcgcagatacatgctttgattttatttgtcagccatcttgaatacgacatacacgcctcttggacaaaagcttcttcaatcgtggcttctacgcccgttattgtcactgaaagatatcaaagcgcgtcatgatgctgtgggggtttttcatcacccagaaaacaccgtaggtgtagatgggatcaagggccttctgaaaggaatgggtaacgtgctggcgatcttgaaacggatgaggcaaggcatcacgaagtggaaggattggaagctcttgcttgaggtgagcgcacttgatgattctgaaaaatgaaaagatgccccctgatcgagaatctggttttgcacagttttgcttcaaagcggttcaattgagtaagttcaactgatgacatgattgtgtttctacgctatataactgaatcttaatctatttgtcctttctatgtatctttattaggagagggttgtttggcgctcgtgggttctcattcgaagaatatcctgaagctggtatgatcgattctatcccagagcatgattgttcgaacgggatttactcacgcgctacaggttatgtaggtcaaagaaagcctcgacacagagttgttctcttctatcggctcgaggctcaacgaagtcgtatgtaacaagagtcttgacggcgatatcataccttttgttaataattgctcacaaatatttcttcatctgagaaagattgattgggacgaaactatcaacatcggtggagatagagtatgttgtaaaggaggtttggacgctgagctagacgactggaagcatcagtatgctggattggattcgttcttggtacgtatccttctcacatcaatcaaaccatccagatcaagcataaacttcttgacgcctgcgtttaccgcaatactttgctctcatcggttgcccatagatgcaagtggccaaaacgttaggccaagatcttgatcgacagattgtcaagaattttcatgtgacctattttccacagctaggatttcaggttgctgtaaacttggtcaggccttgggaccctgatggtgaagaatccaaagtgttagctgattgggagtaccaggttcgccgctactatgacatctgctgtgcggataatccaactcaaatgatttgcctaatttgtcacagttcttcacagagtgagcctaggctggcgcaggacgactgtgttgagatttaagctgacctccgttcgtctatggcatcagtgagagatactattttaaaacaccacaggtaagtcgttcgcatcgaaatatacatcttgtgctcaggtattgacattggtactcaaccttggattcttttccagatgcgcgaccttgacagccactttggggatattgatagcaagattgctgaccgtgagggtgggtatttaggcttgatcggattttctcctcctactgtctattaaattgacgctataggaaattctcttttccagtcgagattttatttgatctggcggaatttgttcttgaaagctcatctttgatcgagaaggccgtacagtgttgctcagagctggattggtgagatacttggacaatatgtcatccatcacaggatcatttactatctcttcattttgatcccagttgtatcgcttttgcgtcagctgcgacaactttcgagcttaagcgcccgaccatgacggaagagaatattcttgagatcaaggacggaaggtatgtaggcccgaatgatcttcctcgatatgacgtactcgaccgttctgatggagctcgaattttgaacaggcatcccctgcaagttagttgatggtgtttccactcaaattcgatgaatcgcatgttcaaagtctgagaggttatatgtaaattcaaaaggagcttgtcgaagacaattttgtcccaaactcgacccttctttgtggaggccgtggattcgattggcaaacgaaaccgctgaatgatatagactcggacgaggatattctgaagagtgtcatgattctaacaggcccaaatgctagtaagtgtgacatttcctgaggtctggcaaagcatttgaaagctgatcatttcacaccgtaggtgggaagtcaatctatgcaaaatcagttgccctgatcacatacatgtacgttcgttgaacactctgtctacgacaggaacctttgttgatgccgttaatgatggtttttacagggctcatatcggatggtaagactttctcgcttccgtctcaagaacctgcattgatatgtattcggctcgagatgacaatttctctttagttttgtgccctgccgagaggcgactatcggtctctgcgacaagagtaagtgatgcttgagcgctttgtaacttgatctcgacctcattttgtgtttcacgacatctagtcttcacccgactatcgaccaaagagagcgtgtccaaggtatgctcatttatgttatcatatcaagagtcctttctcggaaatatgttgaagcaccatttcttgatccatctctatgcagctgcaatcgtcgttcatgattgatctatctcagataagttatgcgcttcgcaattcgaccgctcggagtttgatcatcgcagacgagtgagcgcgcttcgctttttatgatgaaaatcacacacgatagcttacacccttcttctatttcaggtttgggaaaggaacagtttcaaccgatggggcaggccttctggctggagtcatcatgcatctacttaaccgaggtcaagcctgtccaaaaacaatcatcacgacacattttcacgaactgttcaccaacaagctcttgcctgcaaaccttccagtattgtttgcttcgatggtcagtatgatgtgattcgagcagtctgaatgcacggagaggttgagtatcttcctttcgctttcaacacaggatgtgatcgtccaggacgatattgatgatcgacggacacataaaccaatcacctacctttatcggtaggaaaattcattagtcgaccaaaacgcaagttttgcgcgcaaatcttgacgtcgtgtttctcttgtttttttttccttgctctgcttctgttcagtttgactcctacactatgcttgaagtcatacgctgcagattgcgcacaatctcaaggaattccgctgaaggtgatcgagagaactagacaagtggagtaagaactagttgccttcactgaccaaccatgtgaacgagcaagtcgttgattattagaaagtctgttcttggaacttctagggcatatatctcccgatttgaatatctccctcttcaaacgctgatgttcgagccacaagagaaagcgtatgtgttctatgtcaattcaacccaagagcgatctgtgtgaaccaagctgagtggaagaatgatgtgcttgtcgctttctctgtctgtctctctactcaattctaagtgacctggttgccgcagaaggttgttgtcgagcgtttctcgagttggacattgatcaagcggtcgagagcggagttgacctcagagaaagactgaaggagatactggcaacggatgagagcaatcatctcagcgaggatgcagcggacggcacgagtggcaactaggcgcgggtgtgtgtgtcgttaggattacgtgtttgcatggtaagaacaaatggagacggacgtttacgtaatcaacgacccacacgcgcggaaagaaagcactagaaacgactagagaagaaaactagagaactgactagagaacactacaaaatcttgagagagcacgatgagatcaccacagcggggccgcatgtgccgtcgaagatgcgagaaacatctaccgcagaaagaaagaaagaaagaaagaaaaaaaagtctccccgaaaaagttcataaagccaacgctgttggatttcctgtgtttctcctcttttatcttttcttccatcacccggattgtaccagttcatccaccccattctattaaacaacaaataaacccttttcatatctatgtaggtgtcttccttcgattggctttctttcctggcttcactcccgctgccttttcgagtcgataatctcaccatctttttttcccttctttttcgcctctccaccctagaactaatcatgtctgccggaaaaggttggtttattctctcttttcctttgttcgccgtggcgacaccgcgctgaccatcttttgtccttcacattcactcagctatcggaatcgatctcggaaccacttactcctgtgtcggagtgtggcagaacgaccgagtcgagatcattggtaggtttccatactactatctgactcccctctaagagcgcatatctaactatccccaaactacatcagccaacgaccagggaaaccgaaccaccccttcttacgtcgctttcaccgactctgagcgattgatcggagatgccgccaagaatcaggtcgccatgaacccgtatgtttcgttgatttacattattccattctgaatgtatcaataactaatctcttcgcatttttctcatttagcaccaactccatctttgacgccaagcgattgatcggacgaaagttcgaggactctgaggtccagtccgacatgaagcactggcctttcaaggtcatctccaaggagggaaagcccgttgtccagatccagtacaagggagaggaccgaactttcacccctgaggaggtttccgccatgatccttaccaagatgaaggacactgctgaggcttacctcggaaccactgtcaccaacgctgtcgtcactgttcctgcttgtgagtcaatcctccatctttttacatcttgactcctttgcttactccggttctctttcgatcaaacagacttcaacgactcccagcgacaggctaccaaggatgccggagtcatcgccggacttaacgttctccgaatcatcaacgagcctaccgccgccgccatcgcttacggtcttgacaagaaggtcatcggtgagaagaacgttctcatcttcgatcttggaggaggaaccttcgatgtctcccttcttaccatcgaggagggtatcttcgaggtcaagtccactgccggagacacccacttgggaggagaggacttcgataaccgacttgtcaaccacttcgtccaggagttcaagcgaaagaacaagaaggacatcaccggaaacccccgagctcttcgacgactccgaaccgcctgtgagcgagctaagcgaaccctctcttctgccgcccagaccaccatcgagatcgactccctcttcgacggaattgacttctacacttccctcactcgagctcgattcgaggagctctgccaggatctcttccgaggaaccatggatcccgtcgagaaggtcctgaaggatgccaagatggacaagtccactgtccacgagattgtcctcgtcggaggatccactcgaatccccaagatccagaagcttgtctctgacttcttctccggaaaggagcccaacaagtccattaaccctgatgaggctgttgcttacggagccgccgtccaggccgccattctctctggagatacctctgagaagacccaggacttgctcctcctcgatgttgcccctctttccactggtattgagaccgctggaggtgttttcactgctttgatcaagcgaaacaccaccgttcctaccaagaagtccgagatcttctccacttacgctgacaaccagcccggagttcttatccaggtcttcgagggagagcgagcccgaactaaggacaacaacttgctcggaaagttcgagctttctggtatcccccctgcgccccgaggagttccccagatcgaggtcaccttcgacattgatgccaactctatcttgaacgtctctgctgccgacaagaccaccggaaagtccaacaagatcaccatcaccaacgataagggacgactctccaaggaggacattgagcgaatggtctccgaggctgagaagtacaaggacgaggatgatgccgccgctgagcgaatcaccacccgaaacgccctcgagtcgtacacctacaacctccgaaacaccctccaggacgataagctcgccgacaagtgggatggtgaggacaagaccaccctccagaccgctgttgacgaggccatcagctggctcgatgcctctgctgaggcttccaaggaggagtacgaggagcgacagaaggagctcgaggccgttgccaaccccatcatgacccgagtctacggtgctggaggtgcccctggaggagcccctggagctcccccgcccgctgcttctgatgatggaccttccgtcgaggaggttgattaaacgatctaccctctcctggatttaaagactgataaatataattcccactagaccagtgtctatgtccctttttactctgtcttttaatttctctccttcgtcttttgttactctcacgacctctcgttgttcctttaaccttgttctattcaaaaatcctcacgcaccatgtgtccctagtacttgcattagtttcccgttctcctgtttttttccagagcttccaattacaattgaatggttgccttataataacactttgagatctatcacaacatgagtaacatgagcaagcatcctgatcaaagcacttcctccctccatgtttttattttattttcttcctgcttctccaatcgtctcacatgaattggctcctctttctgattcgaactgcagagacgctggacaaataagcacaagactgtgtgatgtatcttcttcagtggtctctttctttgaacaccctcttctcttttgctgcacatctctcgacttataaaattcaatctcatactttgttcattcgttcactctaagaaatcaagaaaagactggaagattcctcttcttctgtgtgatcctggtcatgcgagaaatcaaagtacgtcatctatctgtgatgggtcggccgaacctaatgctgggatgctcctccgctctgaagttatcgaaaccaacaggccgaaccatcaacgaataaaaaaaagaagaagaaaaagaaagaaacagaaaggaaaaaaatagacaaaatgatcatcagatattgaaggcaatagagtgacaaggagatatgacggaagacgaaccatgacggcctccaactctgcttcttcgatcttcaaggagcccaaccagaactttctcggtgacagcatatcgtcctcataatcaaactttccagaagatgccgcctttttttttggtgtgggcgaagatggggatgatgatgatggcgatgacgaggaagaagaggatagggatttgaggaacggagattcggagagaagagcaggaggagcctgagagtgaggtttgggagtagaagaatctgatggtagattaaagcgcatatgagtgaatgtcagatcaagagaataacatcagccagccaagctgatagagaacagtaggaagcaagagacagagagaagaagaaagaaggaaggccaaaggagggcaaaggaagaatccaatgaaaggattcgtattaaacgagaagtccagtgaagagaaatggtcccaagacttacgtccagcccatcggtcaccgtttccgatgaacttgatagaaggcgttcgctgccattgagcgagtagtctaagagaggatcgcatgctgaaagtgtttgggtgggagtcgatgaaagcagggagaaggatgggataggattcagaaggtgagtgcgaaagaagcgaacgtaaccaattcgtagccacggaaactgccgggccggaaggtcttacccgaaaagacccgatgagggccgatatagcttatcacgtgtttgttacggccatcatagacacagcctggccatccctcgtctgactctcattaatctaaaagcagcaacatcagcagcacacacagccatacacatactacaagaacagagacaactgcagaagagatgttgagtggtcaagctagaaagcgtacaggaaagaaagtgcagaaagatgacacgcctgtagatgaacaaggtatgtttctttgtcgaacagtgaagttcgatcaaggagttgtggaaactagcttaagccttctgcactctttatctatatacatcttcacagagcaagaagagatcattgagggtcttcgggaggccgcgctcgtatccaatataacaaccaggactctactcattgttctcgttggactttctaccttggtgtgagtttcgctgcaagctctttccccttcctcggctacatccgtatcgctcatcacgcaaacctctctctatcatcagccacatcattcatttctcacccttgatgtcatccactccgcctagcctgttccttctcattcaaacgatcttcccgttgttgatctctctaatttctatcccactctctacatcgtacacattccaactaggaaatctagcagccgcgtttttccctgctgtatccaaacagttattcacacacgagtccgtcagtctgtgggactttctgactcccattctcgtcggtatagtctggagagcaaacatttggatgtcagagatcctgaagaacgtggaagaaatggaagggaagaagtacaagctgaagggcgcttagaacgagatttgatgaaaccttgcgcgcgtctcttttcaatttgtcaaagacgcgaccaaaaatgagttttcctttcacgtacatccatcaatcttcgaaatctcacatacacacatacacacaaaacacaaatggccagactagtgaataaggtgtcccgaatagaatcagaggaagaagacgagctggaagatgatgaagaggcagatatcgatgaggtcgacgagatcggggatgaagaggatgatgtttcttctattcccgtccgtccggctcgaggtcgacccggagcaacctcttcttccgttcgtgtctcttgtctttctccaactctttttctcctcctgttcgatgtttaagtcgcatggacagtttgatgtatgagcaaagctgacaacagattccatggacccctcagttgagcgacgtagatggtatgatcttctagttgctctctttctccctatcctcctttgacttcctttatctaatcatctcttgtttctttgttcttcctgcgaacgcctgatcattgctctcttgagatacagcaaagaaatcagatccagaagaagacatgatcattgtcgaaaaacagcaagactcttcggacgacgaggacgaggatgatgatgaggagcttgatgaggaggacgaggaggaagaagacgaggaggaagacgaggaagaagtagaagaagaagatgagctcttagaggaagaagacgaagagcttgagtacgaagaagacaaagatggtacaggaaacatttcttctgcctcctcgacaacatcctcgtccgcttcgggtagaaaagcaccctctacgacatccacaggagcacctttctcggaatcagggacaatcaacgggtctaccagcaaagcaggatcaagcaaaggcggaccagtgaagatcaagttaatgctcggtaatcgagccgtcggtagcagcagtggctccggggcgggtacatcaaacagaacgtccagatcaagacgaaagttgaagggttcgtctcttgctcaaatttagtgtgaatgagaaagaagagaaaagcgtgcagctgaaatcaaagtccatgactgtgtagacccaggatcttcagattcaagcgcagatgaactaggtcagagccggacaaaggatttctcaaagatgactgctcgtcagcgggctgctcaaggcaaagagttctatgagccattgttggtgttggaagaaggtctatccctttccgccctctctttgttcttgtgtccaatcttgcacaaatttctgacatgtgctctgttgagccctccattttgttcaggttcgaaagcacttcagctaacggcagctgaaaaggaagcaaagaaggcagagaccgctcgtcgacgaaaaaatcagagcgagaaaaagctggaggatgacaaggtatgcctctcttttccaccttgttgctataatcaaggtctccaataaaactccttttctcacattttgctatctctcttcacgttacaatatatcagatcgaaacggtcaatagactactcaaggcccaatcttctcgatcaagaggcaaagcctccgccgttcttctctctacctctgcctctggtcctgcgaatccaaacccagcagacggtacgaattcatctgaccaacatgcctctgggatccatacacccgcaccgcctcttcccacagcgtttaggacaattcagtcgataaagtctggcgcatacgagatcactctgtccgcacccctcaatcctgcattcatggccaagcttgccaaaccaattgatcgggaaaacaaaagaaaacaaggaccaaagccggtgtgttcggttgaggattgtgggaaggagagaaagtatagatgtgtaggcggggaagacgcgttcgagttgggtggttgtgggctggatcatcttagaactgtacagcggacaagaatagagaccggaattctttagtttagctatgctcttcctcgtgttgtatctatgaaaacatttcaatttttggcgtatgtagtgtgtgcgtttgtgattcttgtcggcctcgtccttgaccgataaaaggttgagtggacaacgtggggagatgaaacagttggaaattatacggactgttttcttctgttttcatctcctgctttctcctcattctttgacctccaccctcgttcatccttggtatatagacagaggatgtacatcccatcgccttctattcttcttccttttctctcttacattcatcaaactcccttcagcccatcccacaatacagatacagcatccatcatggccacccaccatcaagctcaagcaccggccaaacccgatcacgcgacgttctcaaactatcttgacgttctcacgactcattttgacttggactgggaaatcaactggaaagatcaaatcattgggggacatgtactcctagagatggtcgtcttgaaacaggatggagtattggatgaagtcagactggatactagagatgtctctgttggggatatagaggttgacggggtttctatcaaggtgtgtgtaatcgctcgttcctatatatcttctctcgtcgctgatttcccaatatgatgaatgagagctgttctgaggactaacacttccgctcggtttgtccttcttcgttccgatcaattggtcgatcaatgaaataggactacaaattcggtgaacggcacgatgccttcggttctgtccttcatattccaattcccaagaccatgaaatacatcaaggacgacaaactgtccgtcaaagtgacttattcgactaccaaaaactgctcagccttaggatggctcactgctgaacaaacttcaggaggaaagcatccttacctgtattctcagagtcaggctattcatgcaagatcattgtttccttgtcaggatacaccgtctgtcaagtcgtacgtctcttcatctgagaaagccctttcctaatgatagcatcttctccgcgccactgttgacatcttgttcgagggtggctgtatcgctataggacgtactctgccactgtcaaatctactctacctgtccttctctccgcttctcgaatctccccgcggccagaagaacctatcgaaccaggcaaagatctcatcgtcttcaagttcaaccagcctatcaagatccctgcttatctagtagctattgccagtggaaacctcgcctacaaggctttcaaaggagggagggaaggagagaagggctggtccacgggagtgtggactgagccagagaatctagatgctgctcattgggaattttcagaagataccgcgaagtaaatccttgagttgtctcttgttccctttcaatagaaggggtcacgtctcgttgacgataaacaattgttttgatacagcttcgtgaaagcggcggaaaagttgacaggaagaccttatgtctggggatcgtatgatgtgttgctccttcctcccgccttcccctacggtatgcattcgttccctagttctaaaacgaagtaattgaacatgattactgaggtactcaagggcttctgacacttgtaaaataatcaggtggaatggaaaaccctcagatcgtacgttctttctatgtcccgtctgacgcgttcttgattcttatgcgaagccggacctgactcaagtcaacatgcttgtctctcatccgggctgattggggaatagaccttcgccactcctacgcttcttgcgggtgatagatctcttgtggatgtaattgcccacgagatttctcattcttggttcggcaacgaaattggtttgtattcttctctgttcatgttcaattccagatgcgttggtctaatcataatgtgtttttattaataggatgtgccgactggtctcatttctggttgaacgagggcttcactagtcagtttctctttttcttgccttctatttatgtgcttaactcggccttcctcttgttcttcgcagcctatctcgaacgattgatcatgcaagaggttcacggacccgcagctaggggtctctcgtacatcattggaaagaaggcgatggatgactcgttaaaggaatatgaggaagcgaagttgccgagattccagcgattggtggttgattaccatgatggggaagatccagagtcagttcaatctctcaacaaagaaagacgttcacatagagaaaactgacggttaaagattgaattggggattcttacgttttggcaatgattaaagtgatgcattttcaagcattccttacaacgttcgtttcagactaagaattgtctatctggagcaacttttatctgaacaaaatatttttgcgcatcacagaaaggagcgaatttcttgctctaccttggtgagggtttttctttcagcgtccctctcttcttaatctaacacaacgcatgtcatccgaatcactagaacaaactatgggtggactcgacgccttcttaccttatatccattcgtatgtcgatacgtttgccggtctatcgatttcgaccgagcaatggagagaacatctctatgcgttctggaagaaacatgggggacatcaggccatcgagaagtgagtttttgctttaaaatcaaggttaagtggctgttgagaacaggcgctaaaattcaggtggaacattttctccggaaaataaggctggatgcggtggattgggatggatggttaaacggtgaaggattgaagttgcctgttgccattgaagatacctacgacactagccttgccgatctcgtatgtttctgcttcatctgtcttcgcttcacttcacatctcgttcctgtacagatggaagccatgctgatcaagaacttctttcgaccattcaaaaaggcttttgacctggcagcccgatgggaacacgccggatcagatccagccaagctatccgaattcaaaaagtctgacatcgagaagtttgaaggagatcagacggttgtgtttttggagaagctgcagtccggaaagaaaccgatgggtgtcgaggcggtaaggaggttggatgaggtgtatggactgtcgaaggctggcaatgccgagttgtcctctaggttctttgaggtatgtggtcttcttgtcttgtcaattgatcagtcgcttatagaatatccgttctccttctggggaattttagattgctctggcttcgggggatgaatacgccaaagacgcagctcactgggttactgataaagggcgaatgaaattctgccggtacgtcttttcctctcaaatggatttccttcggctgcacatttctagtcttataccttcttaaccttgtctgacctttctgtgcaatacattcaacgaaaaagaacgatctacagggctctattcaaagtgacgcccgagttggctatcaagactttcaaagcacatagtggattctaccgttcgtcctgttgttcttcgcttagtgtttcttctaaaccctttggtcttgtagaagacaatacttgaggttcattcagttcttttttcttctcgatctagaccctatcgctcgacgaatgattgagaaggttggttttatctctttctttctcggctctcctttgatgtatctgctgactcatgttctttgtttctgaatcttttgatatctctcaggacttgggattgcttgcttgagcatgggagtgagagtaacacaattggaaacgaagttattcaatgggatattatacaatgaatgttgaatctgatggcgttcacttggccgataataatgacagatatgatgaaatgagaaagttatagagggactcacccagtacatcacctgtctactttattaccgccgatcttttggttctgtatggatgtaaaacttcgaaggatgctagaaccagcgagccttcctgtgataagagtaaaaaagagagagggtagatctggtgagtgaagtcgatcagtgaatttatcacgaggcgattatctgaactgtatagatcactagttgagtcattcacacggtaagtagtcgattgatcctgaatttggacaaaataggacacatgcgcgctcatcgcacacctctcttgacccctcgtttgaattattgattcttgttcatgttcagtctagaatgagaagacgaacacgagagaattacctttgatacaagatcgcatgaagaagagataaccaaaaaaagatcaaggggaactgagcaggtatctccctcatgttaggacgtctatgttcctctctgaacctcacaagccataagtgagaaataaactagatttcttttccgatagtttcctctgttggccgaacctcttctcctctctccttttttccacgtggtattgtttcgttaaaagtcccatatatctttatgacacctttccttctcatttcctcacgagatataaaatgacaaagtatcgccaagttccaaaaacattcccaaaaatccaaaataggaaaccgtttgttctgattgctttaatgcttgtttgtttttggatgggtgggattatatgagaccaggcagaaccacaaagacaaggcccaacaccgaaagaaacaagaaacagaagaagcctctgaaggaataaaaacttacaaaaattctctctttttgcttcttgaaatacatcctatttggttgtttctagggccgtttgtccgccaaccattctctgtttaagatggaggaagaagcaggcattagtttgagggtcgagttgtgatgagatgttttcgtatacaactttatatacgtacttgaacaaagagtcgactcctcggaagaggacttgttggggaagcgctcggatgacttcaaaaggagatatcgatgaagtgtcagtatccgaatctcatttgttatctgtttcatgaggaaaattagacaaggaaagacttactctccgccactcgatcatttaccgtttctgttggtactcccgctttaacagccatctcaactgccatcttcaaaactgccgagacagctgtactaacactctgacccatcgcactacttgctgctgagcttgttggagtcgacggattgaccactcgaagtagaatatctgatattcgatccatttcgacaaggtgaagctttacaaatcgacgtctctctcgagcggtaccaacggtagagttggtagcccaggagtctagactagagtggatagtaggggcgagtggagcctaacaacgccgataatgaatcagggtcaggatcaagtacagttcttgctctggatacaagaaaaagagaaggatactcgcttcttcgggatctaagacttcgaacttatgtcctctccaatcctttgcatgtcccttcgaacttggaccaaacgtgtccaataggaactcttcagctttaccagctttgacccacttcggttcgctcaaaggtttttcttggtcgaggtaggcgattaatttgaaagtgtctgtcttcaaagtagggaattgagccgattgaggcgagtcgggggaaattaatttgtgaatcggctagattgaataaagtcgagaaacaattaggtcggatcaaacaggcaaaaagggatagcaagaggtttgaacggaagcgtacaggtgtccaaccagcgcaaggatcctctacttcatcccacatatcttccaacgtatccaaaacgacaggctggaagtggtccgtttcttcctccaacaattccatctttgaccaaaaacattgaagagcagttagtgacaaaacctcaacagttatcaaacacttcttgatgtaaaaggacacaccaagataccccgacagatatcccaaacccgatcatctttcggctcttctaccttcaaaccgttctctgatggtttctcggccgccgtgtcatccacaagcgcaggagttgacttttcttccttgaccggttcggtaggttgctcgttcttctcaacaacctccgttttaacttcagccagagtagcatcggaagcagtagcggcagcggtagtatcatcgtcgccactgttctcaacaggagctgcagtttcattggcttccaacttcatagatgagccaccttcaatctcttccactttgattgtggagggagcctcatcaggtggattagcagtgacctctgtcgtactagtcgtagtgtcctcttcctctttgatcttttcctgttctgtcttctcctgctccagcccttttctccatctaatggtgaactccacttttccctctgctctcgatattcgaactctctcgataacaccagcgtcaatgcacaaccttctggtacatcgttcgtacaagatcgatactctgtctggtgaaggttccggtcctgtgtacaacgtcggactgggcttagttgattcagtagggttgggagtagatgcagaggtaggggtagcgatggcgttaggagtttttgatgttgccagtgaggtatcttgagtagatttagtgggagaaggagcggaagatgggatgggatgctgagattcttcacttggaacaagtgaagaagtggtcatggcagtgggagcagtcgagggtgcagatgtgaggatggaagcagaggcgcatgttaaagattgctcttgctgagggatttcgccttgagactgaggcacagaaggttgttcagaagtggatggttcctccggttgagaagtttgaagcaaagctaagacttcagacgactccacctcgtttccatccgtctcttgtggttcattcgcgccagcgtcctgatctctggccgcctcggagggttcttcctcggtatcagtctttccattcgttacaggtttgatctgtacttcgatctgagattcaatttcagcctccggttcagtttcggcctcggtcgggacaacagttgactgttcttcaggatttgatggctcgacttcaggctcagcggatcctcgcatactcaaatcctcgatctcttctccgtcgatgttggacgcgctgtctttcgccgtttcgctctcttcttcctgttccggctcttgctcggtcgaatcttctttctgatcctcttccgtttcttcagcattggatgaaggagcggaaatagcagaagcaggagcggagacagcagtggtggtgacggcagacgcagcgagaagagaagaggcgatggaaggagtatcttccagtttagcagcggactgctttcgctctccaccttcgattcctcctctacgtttgctctccccaggaccggcgcctgcaggtgagtcaaagtacaaccgaagccgactgatctctttggaaacttcttcgattctatcaggattggctttgccatgggtcttgaagtaactccggtgtttggaaggaggttgaccgatggtagacgcctgagtgggagaaccttggttaggatctatcagagaaaataagaggacgttagatggaactgcaactcaagcgaaaagaatggcaagaacgaaaagagagaaagagaaaagaccaaccttcagacccggcgtctgcctttctctttcgaccatttccaccctcaacctcatcctccctatccacaacaccccatttccagctcaattctggaacttctaacccgataatcttgaaatcggtaaatgtctgtttcggtccttcctccttggccatcttggctcgagggacgaccggtgttccagttggagtatcctttttgggcggtacattgccgagggaggctcgggcatggtagcgagtcgaagaaggacctcgaggggcatcatgaggggcatagtccgctcgcgggtgagaactggaatatgctgctcctcgcatgcctgattaagatagaaatagtcaagtggatagttcaaaatggacggatgcgtcagctcaacatgtcaatcatacaagagggacatagaagggatatggaaacatgaatgtgggaggatacgtcgattatgatttggaggcgagttctttcctaagaagaaaggtaagataaacaagggcgcaggaaaacgaacctctaccgcgatatccgcctctgtctcctctcataccgctgcctataccattattcattccaattcctccccgacctccactggacatcggaagtccgccgttcatactcatccccatgggcatcccggatcccatacccatactcatacccatgggcggtggactgcttctactgatgcctcttcctcttcctcttcctctgtaagaggaccctccacctgagtaatcatcgtcatcctgaacaccaccactaccaccattgctgctgctcccaacataccctcctcgggtacttccacctcgactgacagttcctcgtcctctgtaggaggtacctctggaagccatgcccattgaaagcccatctctaccatcaccgcctgaaaagaattcggatccggactctctcgaattatacgccctctcggcattcactacggctgcagtaatcaaaggatttaatggcaagcccggcacgggcgcaggtgagaggcctccgccggcagtgcccccggcagaatgcgagtcaaaccgcggtcgcttagcaggtgggaacccagctggctggttgaacccaccgctgcttccacccggaccacctccactcccaccccccatagacgaagaattagagatatgatggggtgcagacataggggaaggccgtacggatggatggtaactacttccacctccacctccaccagagacagacggagggccttgaccggacggatatcgtcctcctcctccgctaccggcgctcgctccgatctgataaggctgatttggggatccgtagggaccctgggatgggtacgcttgaggtccaacggatggaagtgacggtggtaggggtggaggttgagatcgatatggcggcggctgttggtgctgaggttgatgatgatgatgatgaggcggttgttggggatatgaaggccttacttgataggcaggttggctagaattgtacgactgagggcctggatacgaaggaccggctggttgagggtagctgtaaggttgttggcttggttgactgtaggcctgagctggaggaggtgcgggtgcgggtgcagcaggaccagctgtgggagcaccctgagcttgggcctgagcattcgccgcttgatgggcatagtactgagcccatgctgcactataatccggctgaggtgcgttggccatggcgagagcggtcgtcgtcgatgtccttttctgattgatggtcgtcgtttggagaaacggaaaaatggaagacgaaaagttcgacggcgagatgggttacaatcgtgggtggttacggtcgacctggcttacgtaatgaggccagcgtaaccactattcagccgtctcattttatcttacttgcttctatgaagtcctctaatttatcccattccattccattccatcccatcccatccagcacgcttggttctctctgttaggtctctgtatctccctgttgtagtacgttctgaagatgccacccagaacaggtctttcggggaatacactttccctgaaatttatgaatagaggaaaccccagctcagcctctgtcgcgaaaccttccgcgactgctgcctctttctcgtcttcaaagccttcgacaagtaaatcgataaccaacaattcgacagacggtgaatggttcattccaggatgggaagactcttcgcccgctcctgctactggctcgtcgtcatcagaaactcagaaagcgaacgaagacaagattgaggtcgaagacagttatcttcctttccttctggagaaggatacgggtggacgaagattaggcaatggaggagccgaggttgtgaaggaggacataggagggaaaggaggaaggcggagttttggaggtatcaacaaatccatcgaggtttgtcttcttcttttctttgctgttgaagtgctacctcgctcgatcatcgcgttaacgattatcgtcctctcgaattttacggctggctccgaacccattaacatcgcgcgaacgcacaacagaaattatcccaaccggtgaacacatctgtcgcaattcccgaaacctctagttcaaacacatctacccctccatccgctgtttctacgtcacaaacaccctccacggaaacacaaactggtttcctgcgtccctctggtttcgcctctccgccgtcaaaaagaaaaatagagaaatcagttctctcacaccttcaatcgtcctctggcgcccgatcaaccgcaccttcttctgctaattcttccagatcatccacacccgcctcgtcctctgggatgaagcggttcccacctctgtccaaaaagaaacgaaagtctgatacgatttcttcctctgcttctgaaagcgatggagatgaggaggaagaggaggaactgcagatgttgtatgattcggtggctccaactggcgcgagaggttcaaaagggaagcctcgagcaggaggtataagctctggtggcggcgctcgaaaacctcagggtcatgggaaaagatcgaagaagaatggaggatctgcctgaatgttatcaagattcatgagttattgtcttggagagaatctaagatcatgagtcaatgacagagtagactgaagtcaggatatcaaatatggaggagttcttttgagaaaagagtacagagcaatctgtagaaatggatagaggctgcgcaaagcatgattaagatgagaagatgcataggtaaataaattgaaagaaatcgtggtgatgtgtgacgtaaagaaagaaagaggcgacgaaaagaacaaaaatggataagacaagaggaaatcgaaggatgagagaatattgaacaaaagagtatatccaacaataagaagaagagaaaagaattcaaaccaaaagagaagaataaaagaaaagaaagtgctcttaatcaagcttgtactgcttctcgacctctctgatcgcctcctcctcagaaacgcctcccacccgttttctgttgatgacttcttccctggtcatgaccgtgtcaaacaagtggtcccatctggtgaagaacggttgtctacatcatcaagccagcaacgcccatagatcaatacggagtaagtaagactggaagtaatagtgaagaagtgaaatggagaagaaagataaacgaacgaaaagtttttcttaattccgaatgattgatgatggatatcatgataatccgcattgttcgcaaagagcatctgatgttcgcagatacagaaataaccatgaacagacagaagttagcttgaaattactagtgtcaaatgaagcatgaaagactgcagacgaacctgcatcggatcccaccaaagtctgtacccggaatgatcatccaccgttttcgcactactgaacccaaacagaagaattgtttgtctgaccgtcatcccactcagccattctgccatcgccgctcctacagaatccaacaggagtccttcgagccagtgattatagagtgcaccaaatgcgtaaggaacgtagagtctgtgatgatgagaatggaagtttcggtatagatatgggacttcgtgcattgtcttgtgcaagaagaattgatgagtgtcgatgatgaagctgggaaagtaggtcgtacaattatttgtggaggaaaagaagtccacagaacattagacgtcgtgtcggcttttgtatgacgaattctcgagaagagaaagactcacaaagccaaaccgaactgaaagatgggaacaccccaccaataattccactctaccagtcctctgccaacttcgccgcctgctaagcctaagaagtccgccgcgttcttcggtccaagcaagacagaaacggctttgcctacccaaggggcatacgactgcatggcttccaagtgattaatcctgatctgagtgcggaggatctcttcatcggatgataaccagaagaggccaagaattgtttgaagaacatgttgaagtacaacagctttgattaactgctcaagatatcatgaacgcatacaattgagggaatgattagctttcagatcaattccagttggctccacatataaagacgtagaggaagaagaaagaatccgatactgacatccgcaaaagaaactctgttccttcgagtgacctcttcactctcatgaatccttcttttttcaaaatactcgaattgtgcttcgtccagaaaatagaataggccaccgacaatccaatagacaaccaccggcgtcaacacagccagatagcggtccgagacgaacggcaataaggaatctctctgagcaagatatatcggataatgaacgtcttgaggaagaagtgatgctgtaaggttagagttaaccggaaaggatggaattaggtaggagagaatgccggttgacatagtcgtgtgtttatgtgaagtagaagcgtgaacccgatgtggatagggagaggccgtaacgagggtaagagggtagagtaaagaccagatcaagaatcaaacggacggtaagataagagaaaatggaagcggaatgaatggatgcagacttcttgatccttccagagtcaactgagagtagaagagtggcagagtggggaggaagaaaggaacgagaaggagaaggagtgtatgttttgtcggtggaggtctcgatctgatccccggttggcaaatatgtggcagtggtgtcaggtgacttatctacacagctttgtggctaggtggagccaagtttacatcgccttggtggctgatatacccgcgctgcaggagcatttacttcattctacagccaaacgaaaacctcatggattcggtgtatactacagaatagatatcctcttttctcttgcttcactggtcagatttattatcagttgatcctgaccggaagaatcctcgtcgtttgatgggatcagccggctttgagtctacccctgaaccggcaaaggaagatccagatccagcaccgaatgagacggcatgcgagttcatgactcgtttagatgcattcagagcggctctgtaagaattgagttgagaaaagccaaacacatctcaggattttgaagttttgcttgtcctggtatttatcactgactaaacatagataagactgcatacttactggctggtctgagtgatatactcgtcggattgtagtgctcgtttatctgtcttgatggacagcccatttttatcataggttcttcaggcaagaggatccggatgaatgttccagtattgttgaacggaaaatgcaaaaacggagcgcagaattagatcaggttgattccatgtgaactacatcaaacagagttgaacaagcttacactcctttcgcttgaagttgttgtttagctccatcgattccttgtgagacttttccctgaaagatcttgactccgtctatataggcataacagtatcagtgtcgacctatatgagaagatgaaacggataaaggaattggacgtgcagcaaacggccacaaacagaatcagagggaaaatgctagagatagtgtccctatggatgttttcattttgaatgaggtgagcatttggtagaatgtgcaaaaagaaaggcatggatctacagaccagatagatgccatattgatgagtttgactgaaaggttagttgatgcaaggaaacgtacaacttacaaagaagaaagattagtctagttgagcgtgtgagtttagagcgtcatcgccgtagaagggcctagggttaacttggggcatatacttgggcaaatatgggtaccaggaacatagacacttgggcaaacatgggtcaaattccggtctcgtccggggtccacaaattttgaatatacgcacataaaatccttacaaccttcccacactcctctctacacacaaatacaagcatagagagatgtctactatggaaaggcctgcaaaggcccatcgggctccgacttcaggtcggtcggccgagaagaaggacaagaacaaggataaagacaagtctagaggattcaacgataaggttcgtctcttagttatcatcggtattagcgtcctcagtactctgtttcttcgcctatgacaagatataaggatgccgactaactgtattgtacgcacatacatacacaaataggctttcgcccctacttctggaagaaatgcaaacatacggggacgtaggaacgctgagaaggatcagactagacttcacgtcccgctcgttgatcgaacacccgatgaggagcctccgccagtggtgattgccatcgttggacctcctggagtgagtcttcttctgttctttcgtagttctgaattctactggggaagctcgggatagagcagagagagtccagagactagacatgtagttacaattcgacgggaggagtgtgctccgcagaatcattacacggctaagaagtcgttcatcattgcagtccactgattcttttgcattcgtcttcactttgtattcctttttgctccatatttaaataaccattctaggttggaaaatctaccttgctcaagtctctcgtcaagaggttcacgaagcacaacctttccgagatccgaggacctgtcaccgtcgtttctggttcgttttgtttgtttgactcgatttgcgacgattcgcgttgtctaatctcttgatttgtatctccgtctctcctactccgaatgttgaatcaaggcaaacaccgaagactgacattcatcgagtgcaacaatgatctcaattcgatgattgatattgccaaggtggctgatcttgttctgttgatgatcgacggaagtttcggtttcgaaatggtgcgtcattctctttttgtctagtgcaaagagtttcccacaaaaaggtagaagaacatggttctaaccctgatgcttatgcttggaaaccgataaaggaaacattcgagttcttaaatatcctccaatcccacggtttccccaaagtcattggtgtacttactcacttggatctgatcaagaagacggcgacgctacgtgcgcagaagaagttactcaagactcgattctggaaagagatctacgcaggagcgaaactattctacttgtccggtgttttgaacggaaggtatcctgataccgagatcttgaatctctcgagattcatcggtgtgatgaagttcagacctttagtcttccgaaacactcgtgcgttcttacatctgctccctgaggactcggatatatgtttcgaatcaaacacaaaagactgatgcctcgagttcttatttctggagcacagatccctacctggtggcagatcgacttcaagatctgactccgcctcaactgatcgcggctgacccgaaggtggaccgaaccatcaccctgtatggttaccttcgaggaactaaccttccttcttcaggcgctcgagttcatatacctggtgcgggagatttaacaatttcatcgatcgaaaagttgaaggatccttgtcctctgccgacggccgatggtgaaaagagaaggaggatgggagagaaaggaaagttgatccatgcgccgatgagtgatgttggaggtatggtcttcgacaaggatgctgtctacgtgaacgtcatgggatcgttcacacgtaggaaaggagacgatcttctcgatgaagacggcaagccccagggtttgtcctttcttctttgttttcacctctgtatcctgctttcccacttcatcctggtccgatgactaacttcttgatacacttcatccttgctcacagtatatcaaggagaaggtgaaaagatggtgatggatctccaggacgttggttcgacactaggagaacgaatcgctcaatctgatatccgcctcttcggatcttcatccaagcctgttgattggaagtccaagcagcaagctggagctaggttggatgagatcgaggatgatgaggacgaggacgatgatgatcaagacgagtttggatctgaggatgaagatgatttcggatctgacgaggacgaggaagaggacgaagatgaggaagagcaggacgacgagggaggggttagaaaaccctcttcttcaggtcgacagaccgcccgaacacctcgaggacttccatctttatcttcctctgccatcactagcaacaagaaaccatccaaaaaccgaccttccggaacaggttctgactctgactctgactctgacgtagatctctctggagcgagaggtttcatccaagacgacgaagccgccggggttgatgtgtctgacgattccgacgtggattccgatcttgaggagacgcctaggtggaagtcagatttggcggaacgagcgttgagcgcttacgaagaccggactcgatcgaaaccccgaaacttgatgaaactcatctacagttccgagttgacgccggaagagattgctcatccttctgctaatgattcgaccgatgtgtcaaacggagattccaacgagttcttcaagagaacgtcttcgggcagatttgatggggctgaggagggagattcgatgaagacggcgatcgatctgacaaagcttggattgtgggacgaagaagggatgatcggttcgatcaaatccttgttcattaccggcgagctcgagggggatgccgctgctggtggtgatggtcaggagggctacgagagtgagggtgagggaggtgatttcgaggatttggaggaagaaggtggaaacatggatcttggagacgatgcccaggcttccggttctggctctgcgtttgatgatccagagatgaccgaggcagaagcactggcctcaaagaaggcggcgctgaaacgaaaattcgacgagcagtacgacgacgcgtccgatgaggagaagctcgacttttatgataccaagaagggagagatggcccgacagctccagctgaacaaggaggagtttgccgacgtggatgaggaaactcgggcgttggtggaaggatatcgaccggggtcataccttcggttagaattgacaggcgtgccgtgcgagatggtggataacttcgatccaaagttcccgatcatcgtcggtggacttcttcctgcagaggagcgattcggattcctgacggtccgaatcaaacgacaccgatggcacacaaaaatcctcaagacgaacgacccgttaatcttctccgttggttggcgacgattccagtcattaccgatctaccacctagacgaccattctatccgaaaccgactgcttaaatacacaccagaacatatgcattgtgctgctacgttctacggtccggtctctttaccaaacaccggtttctgcgctttcaacactctagacggtgctcaacctggcttccgaatctctgcaaccggtgtggtactcgatgtggatcgatctacaaagattgtcaaaaagctcaagttgacgggtacgccgttcaagatttacaagaacacggcattcatcaaggagatgttcaactctcagctcgaggtcgccaagtttgaaggagcgagcatccgaacggtctctggtatcagaggtcagatcaagaaggtcatgtcgaagcctgaaggagctttccgagctgctttcgaggacaaggttctcatgagtggttagtctaaggggtttttctttctttctttcacactctctgtttttcaaagctgaccattacttcttatgatcacaaacactacttcaaagacattgtattcctgcgagcatggctatctgtcgaaccccgaaagttctacaatccggtgacgtctctcttgttggccgacaagtcttcttggactgggatgaggttacttggaaagattcgaagagacgaaaagataaagactcctttgcctgtggattctcattacaaggttcgtttctgtgtcttcccttggtgtgtatgtgcatatgggggtttgtttgatattgaccattggcggaactacacacgcacatagcccatcgaaagaaagacccgacatttcaacacgctcaaggtaccgaaagcactgcaagctgctctaccatacgcttcaaaggcaaaggttacgcggccgcaaaagaaacagacgtaccttcagaaacgagctgtcgtcatgtcagccgaagagaagaaggcgaccgcgttgttacagcagatccagtgcgtatataccgagactcccgctttcgtttcttttcaagattgtcattttgtgatcgaaatatgtgctgacggtgggtgttctctttgtctttgtgttcacataacaggaccttgcgaaaagacaagacggctcgacgacacgccaagcaggaagagcgaagtaggtttttttattttatatctttctatgatttttttccttctctttccgaatcttgtcatcacagggtggaaggaaacagcgtattgaacgagaattctttctttacatatctggaacgaacaaacaaaacttttgctaatacagaaaccgaacatcgaaagaaggccgaagagaccgacgaacgaaagtcggacaaaatcaaggcggaacgaaagaagctgttacggaaccaggcgatcaaggcaaagcacgaggatgccgacggagggaaaggacgaggtggaaagaggcaaaagagggattgatcgagagtatttgtgtttgtgttctgtcactatatttgttatcttgcattgtgcatcgagagaaacgagaggtagagaagagagagaggaaaaaaaaaggagaaatcaaatcaaggaaataaagatgaaagtcgaaaataggaatgaaacagtgacttgagaggaaaaatagaaggcaagagataataaaagaaactaatatatagaaaatagaaggataaaaggaaacgttggaaaggagcagtaacctaataaaatccgatcgcgaggccatcggccggatcgtgatgagtgggattcaatatgattgattaggatatgtcagagtgcattagacagattgcattagacagggtgcatcacacagacacagacacagacacagacacagacacagacacagacacatactgtataccagacatacagcatagtccacacctgatagtacattgcgataatcaagagacactacaacgcactagaacatacatgatactacagacacaaacacgctgttcccccttcacatgtaaactcacgcgttctcaggcacacacagattgtcgggtacctgtctttcggttgtaaacaaggttctggctgcggtgcccgactctatcgagctactgcgttctccctttatatttaatccctcggccgggggtaattcggcagagaccgattgacgggatggttacgataaccggctgtcgcccagccaaccagccgccagccagccgtgaccaccgcctgatcgcccgcctgcctccttctcctgaaggctcgtgttctcggcatttgtttttcctttttttctctccctctttctcttttcactctgtgtcttcattttctcttctttcctctcgttctcctcgccatcgccacctctttctcgacctctacctctatctcaacctcaacctcaccttcaccctcgaacctcacatatcttcctcctctttctcttttctcttccggattgggtcttgattcgctcgttcagctagtctaattcctatttggaggcaaagaactatctggactaccgtctctgtcgtctctgcttggctttactctactttcctttcacctcgcctttctctttttctctcctctttttccctttgccaggtccggtttccatcaacaaagctacctcccgtcctgttagcttccacatccggctcagacctttcgttctattcaggcccgttcatatatagtctcttttcttttctctcccttatccagataggtaccaggtagatcatcttactgcctacacaccatgaagtttcttacctcaccggccgcttccaccttggccctcctcgccctggggctctcttccgagctcacccaagccgtcgccgcgtcttcacgaccaaagcattcgctcaagagacgtcaaccaatctctacagacgcctctgatttggatggaaagacatttgatttcgttattgccgggttcgtctcctcttctcgtcccaataactcttcttcttgtcctgttgatctaatctcatgatcctgtcctcatcgttacatctttctcgcccgattggtatccctcttgcttacgacattagaggtggactagcaggtctagccctcgcttcacgaatctcggaacacgaaaatctcaccgtagccgtcatcgaagccggaggatctggtgaggatggcgaaatcgacacccgcgacgtcaaagaccttgttagtatctctcctttgtgttcttgcattccttcactcccattgactgaacataagagaatctgaccaagcccgctatcattgtctctcttcttcctccttcctcctcttctagatcgacatcccaggaaattcgtatctccatgggttaacaaacactccttacgattggaactataccactgtggctcagaaggatgccggtggaacgacaaaggaatggccccgaggcagagttcttggaggtagtggtgccatcaacggactcttcctctgcagaggttctaccgaagagtacgacgcgtggaacgagctcaattccgggggccaagaggactggggttggtccgagctcaacaagtacatgatgaaggtttgttgctcatatattcctattgacttgacacgtggcgcttgtttcctttgttttgcccaagcgctgatcgcgtttttggatccttaatacagtctgagaatttcactcctcccacggccgaccaaatctcgtcctcaggtggatttatatacaacgcgagtgcgcacggtgagttctttccacttctgctttcatctagtgtctttccacgctcagccactgatactctttctccttctttgaactccttcatcaacttgattccaggtacaactggaccaattcaggctggtttctcggcctactggttcaccggaaacacaaagtggattcctgcctggctcagccttggatttaacagtattgatggtacaaccggagacaaccacggtgcctacattactccttcgacctgtaagtctgccatgcatctatttactctacagttttgctgcggcgagacttttgacaccgatctgtgttttcaattttccaaaatctttcagtgaacccatcaaaccagacccgatcggactcgaaagctggctacattgatcccatcgccccccgatcaaacctggtcattctcactggctatcaagtcaccaagatcaactggaactcgaccgactcgaccacaggagctgttgcttctggagtgaccttccaggcatccgcaaccgacacaccctacaccgtcaacgtcgccaaagaagtccttctctccggaggaaccatcggttcagctcagatcctacagctctccggtgttggaccgtccgccacattgcagcctttaggcatcaacgtcgtctcggatttgcccgtaggacacaacctacaagaccaccagagtaactctatgtattggtctaccccaactggcaccctcacttggggaaacttgaccaatacgacgctcgctgcaaccgagttggccaagtatgaagcaggagactataccgactcgatgtggacctacatcaacgaagtgagcattttctttcacttagatacccaaccgctcattggatcgagacttattcatcaatttttcgattttttcccaaggccattggatacatttcccttaaggacgtcatgaactccaccgcttactcttcctttgttgcgaatgcgactgataatctggaggccaacgtggacgagaccgctgacgctctaggattgtccgatgctcagaagatcggtctcacagcggttagctcttctcttcttttatcttctcttttttccctcctttgtcatctcttttaacggagcgaagccgttggctcctttattaactgaggtttatataaaacgtttgattcgactgacaatcgtcctttcttgtgtttccttaacagatgtacaacatcaccaacagatatttgactaccaacgttgggcaaatggaagttctcttgactgagttgggatacgttggaggcacaaacaccgtcggcttgcagggtgctttccagcatccctacacccgaggaactgtgctcatcaacacaaccagtgctttcgatcctcctctgatcgaccctcggtactattcccactcgtatgacgttgcaatcacccgagcttgtcacgaatggactcgaaagttggcggccgctactccgatgaacgagctgatgattaccgaaatgaatcctggagcttcagtcacaggcaccgcgctagatacttggttcaagaagaatgtcgtcactgtatgtccatctattttcgcgttcaattctcattctttccaacactgtatgtcagatcgctcacaaaccacagggctggtttttttctcttcaataggagtatcacatcttgggcacgtgctctatgttgcctaaggcttctggaggagtcgtcgacacaacgttgacagtttacggaactacgaatgttcgagtagttgattcaagtatcatgcctctccaggtttcagctcatttaatggttcgttgatattcagacctttgggttattatctgatcaacaagacataccgagttttgttaacgcattctcctctttctatcacaggctcccacatatggagttgctgaaaaagcggccgacatgataaaggtcaagtaccaaaaggtcattgaagttgcctcttcttcctctcaagctgcctctactgcttctactgcatccggatcgagctcggctgcatctagcgcggctactgctggtttgagcggagccaatgccgaaggcggagctactaacttgtcaaccggcgccaagggtggaatcgcagcgggtgccgctgtggctgctgtcgccgccatcgttgctgctgtcttgcttgctaagaagaggaaggccaggaaagcggccgccggtgatgaaaagggatggtattcaaacccaacagagaacgacgcttggaaccccccggtggctctcgctgatcgatcggtcgctgcctcccctgtgggcggagcgttctacagtaacgtcgatggagtgaacagcgcgtctgttttggctcctgctggtgtggccggtatgggttcggcaatgcctgggttctcgaccacccatcgggattcgtacaacacgttggacctcgcccaggccgagccgatggcggctggatatgacagctattacgctaacggttcagggccgggaacgccgtactcggatatccctaatccgatgagacgctaaagatactgccgcctgactttgacctgtactccttgcccatatctgtccttcttttcagtttccttgcctagcttagatatccttcatggcgttcatgctcggatattattcttccatttcctattcgcttgaatgctcatcgaccttccttttgtcaaccctctaatgcatttcatcctgttctccgttttcaaatcctgttctcttctttttcgaccggttggtcgtcctacacgaacatcatacgtagctttttatatattcatctcatcttacacggacaatccaatttttcatttgacttggttcatccacgacaccatttcgttctgccttcctctttatctccttctttcaaaaacggtctacctctatcttccgaagtatctttccattctttacgtacactcctcaactgcctctctgtcctcatcctttcttttggattcaggtctagatctgcggatctaattccttttgctttcctattatgttcttcctgaacagaacttgttttttctttccctttccttgtgtttctctgttctcctgagtatcaatgcgagttccgtgcccatctgtttcagagatttttctatatcaatcacgagttgattctgtttgatcggtaggttgaggttggaaggaatggtatcgtcagatctcgaacggaagagtccgcccctgccgggcttgaccgatgaactaatgagattttggacaggatctgtttctcaaataaccatcacttcaaaacttgatattttcatttctgttcacccgaaccgaaacgaatcgagtcaacgctttcatcagattgattcaacctagccaggtgaagaaggaactaagaaagacagggtgcatacacacatacagaatgggaaacccaaccaggtctacaagtcaggagatggacgaaacgaaggacagattgaggggattgatgggcaggaaggatgatattgaagctgagatggttcgttgctctgtttctatgtttgacgaggtctgaggttctggaaggcgaatgtgtctctgggtcgaaggtggaagtgaaggtagccgagagggttgattgcggtaagacgtactaatgattttataattcatcctgttcttgcctgcgtcctatcgatatggtacattttgatgggtgatgatgacgatgggaagtaggaagggcatcgagggagacttctagctgttcgtctcttcctttcctttcccctttgacacctctccaacatctgtctttcaatagtaattcttcggcttacatccgcttggtttgctcttggggacttctaatcatgatcttttcctcgttcaaaggaaaactcgacgatgaatagcccattggtgacactcgatggtttcccaagggatgatatcgacgttgtttgtccctcttcccctctaggcttcctctcttgctacatgtatgagtattgattttctcggtttatgaggatggctctaatagttggcggtcagacaggcgagggtccggttgattgaactacgaaatgatcgtccgtccttttctttttctctttcgttctccacatgacagactcgagtttcacgtactcacactcaccatttctatatttttttaaaaaaaacctaaaacgtaaatcattccctcgacgtgatagacaaagcagttatgtcagaaatcgagagagctctccatcaagttatcccttcatcttctgatagtcctagatctttgaatcgagagcgccaagaaggacagggtagtggtgtagatggcacggatgtggaaggaggagagccgtttgctctagtgaaaagtgtagatgagaggggacctgctgggaaagctgtatgcgttcttgttcttccttgccttcctcctctttcaagtaaactgtcaccgataaatagctgatcagtcagagatgttcctattttggcatttgaagggcttgaaaccagacgacctaatcgtcaagtttggatcggttcttcggtcgaataatgatgggctcaaagcgctcgccgccttagtagggaccagtgaacatgtgcgatcttgctttcttctcgtttctctactctgttcgatgagtccgtccatacttctttcaagatttgtagctaaccgacaagagattatagaaacctatcgaagtcgttgtccttcgcggagaaggaaacaaggagcgcgtaacaaagactctagtcccacaaagcggatggggaggacgtgggatgttagggtcagtccgaattgggggcttctctccctcttcctatactgagcgtttagtagaacatgcgctgatgcttcctctcttcctttgttcgtactcgtatgggattctccgtagaatgcatgttgtccctctataaatgatattggtcgatagatcacgtgattggagtgtcacaaacttgtaacctttcgagcgaaaccaaaatgtccatttcagatcatcatttgaacttctatttcatcaaccatcccgtcctactcttctttttttgctttgtttagccttacaacgagctagtagaagcgctagatctattaaaacttgaaggtcgaagttacaaaagaaaaatctgaatgggaaagccatctaaatcgcgcggaggaggaggaaacgctagccgaggcggtagaggtcgaggtcgaggaggaggaggaggttctagaggaggaagaggtcctcttcgggataaatatcatgtcgatcaaggaggacgacccgcaagcgcggttgatgatgttggacctcagagatttgccaacgaggctagtagtggagatgaggatgaggatgaggatgatgaggaggaagagagtgggagtggagaggaggatgattcggatgctggtatgttttgatgtcgatttcaatacatggccgtagtccaagcctaggttctagatgagttgaggtggacacagcaaaagactaatatggaatggatggcctttcaccttttgctgctattgcatcctgcgatatagaaagcgacgggtcggatgagttaacaagtatcgacgtacccgtagggatgtgggtcagtctttgtctcttctgttcgaggttgaatgcaccaacgaatttcaaacttgcatgtctgagtgccatactcatcatcggtctattttccttcgaaatgaacaggatttcgaccattgtacgcgtcttttccatcgactgttaatgtggtagcatactttcaatcccatgttcactcttgcttcttgacttatggacgcgccattttcttttgctatcacgctcatataggtgacccgaaacgatggtaagttactcctctctttttcatttcctctggggttttgtattaattatgaaagctaatttcgtacttgcttcatataagttctggaaaaaagttgtctagattgaatttgatcaaacaacttcgtgtgggcgcaagatttagaggagtcgttatgacgtgtgttcatcttcaattctttcttcagaagaatatcctttcaagagaaagaaagaggaggcttacggatcaatctttttccttgtgttctttacctaaaagacctaaagggacgaaaccggtgtcgctagaggatagagatattgtccttgcctctgggttggcagtcgtcgagtgttcatgggctcgattagaagaggtcccttggggaaagatcagaagccccaacgagagattatgtgcgtggttctttgttttgtattttcttttgatccgaggaagaacagggaagattgcgatgaaatgactgacagtctgacttgtatggatgtaaaccgaacagtaccgtatctgattgctaccgtgcgcctcttttcgctttgccttccgttatagaccagcttagacctgacatcacttttttctctccgttaaaccatgatggcaatataagaacccggttaattacggtaaaccgtggagactcgtgagtttcttttgatctcaatgtccactcttcacgaaaatcttagaggatccgaacttaactctacttctctttcatcttttcgtctttttgctcttctggctgatggctttgacctctaccgggtgcttagaactgtgtggaagcattagcagctgctttctacttgacaggattcccaaaagaagccgagctcctgtcagtatatcctctattgtcccaacataatctaaattcttctcatcagacgagatttgacatgtacatatcccgctgactcaaattcaaattcatgacgggccggttggttgagcagactatccaaattttcatggggtcactccttctggaaagtcaacgagtaagttctttccgccttactcttgctctcaattcatgcctttttcatgattttcttatccatcatattcttggatacaaatctacgtccgtatcataacagagaacttgtgacccgatacttgacctgtaagacagcggctgaagttcaaacgatgcaggagacgatcatgcaagagatcgaggatgaagcagaattaaaacgaaaagagaaaggtcagactcctcttttttcgtccttttctttctttctttatgttcttttgttctttcctctcttccttctgttctgctgggtattatttctgatctcaaacttgttataccactatgacattcttcacagagaaacgacaacagtcaggtcagataacaactgagttgatcagggattcagattcggacgatgacttcctcgaagggaacccaaaccaccagatcggaaatatgtggaaacgacctgaaaaggccgctcctgctgctgttgaagaggagaaggtcgtcgaagatgttaaagaaaaggtggatagagaagaggacgaggtggatgaagtggagaggcagctggttgatgatcttggaactctcgttgtttaatccccgtttatctggcctgccctctacctccctatcgtgcccttgttttggttaccttaaaggcctatttggcctagcttatcaatatccctgaatgggctgaacaaaaagaaacaagatcaagacctacagaacgatgcagatgattttcatcttcctgatgtgacgacattgacttgtatacgttcgtcctttgaaattctgatatcaagatattgaagtgatctaatggtcaggatgatagaatagaaacgaaaaaagaacgatgaatatcgacaggtaacggacgtgtaaatcggaccagtattaggagagtcagtcgtatatgattagaagagcgaaacgataaaaaaaatagagggaggagaaaagggatcgttcccattaaattgaaagctgaaacctagataaagaagggaacggagaaagaagcgagaccaagtggaaatccacaaaaagaaagcgatagtaccgaacgtttatcatttatgaatagaagacagaacaatcgtcagggataacagcgaggaaatcaaattataggatcgtgttttttcaacgtagacgctggaataatgattagacctgggcggaatcctcatcagggggaggaccagtaatgtcaacctttccctgtgttccgaaaccgatcgtcatattcaacagtagaaacataagtaaaaggcacaatgataaataaatgatcggaacaagacagaaatgaacgaaccttctcggaaacggttgtatcatggtgagacgctttgatcttcattcttctcatttcttttacggcctcctctcccaaacccagattgtcccttggaacccaaacaatctgttgcccagtctttacagccggatgggtaaatgcatcctcgcgctcgtgaatcgccgagtggtcttcgtgagactttcttttatcatttccctcaaggttaggcggacgtgttcgaagctccatcgtgttcggcgggatctccccaacaggagttcggacggcctcgacgtctccggaaccagggaatggagcgtttgtcaatggtttttgatcatcgctcgttgaggttcggatcgcgtcaagctgctcatcagactcgccgagcgactgatcatgaccttcttcggtaaccataccgtacgatcgatgagcaagggtcaaaggcaaggccgtcttgagagacgcataggatcgattaagaatgatttggtaaccaatctatcatgacgagagagtatcaagagcgtcagcagtgaaagaagagaccgaagtgttggctgcaatcaagaagccacgtacagtgatcacgacgagaacaaccatcaaagcgccctcagggatcgcggaagctttgccgttttgctgttaagtatcaggttggtcagaacggtcaaacatgagtaaatccaaatcgaaaactcaaaatatcaggaaccgaagcatgagaacatacgtcttgagctaagaagaacaaggcggccaagcagatatgctggatatagagtccgacgaagatatgagtgacagccttggggaagaagagtcctccagagtcagacgagggaggttgatcaagaacccactatagtcgttcatacagaaaggtggggcagcacaattgtccgaatggtgagttcagattgttcttggagattgagcaaaatcagaatgtaaatagacagcttacggtgaataggtacttgtaaaccatgtacaagaggaagaacgagaagcaacccaaaccattgatgatcggagagatgatcatgtatccaaccgctgaataccacgagcaagatccaatggaacgccgtgagcattctctctatccaaggtcttcatcattcgagacgctacaaggtgctccccacttctccaagaatagatagaactcactgatgacagccaagagagacatattagggaagagcgttccccaattgacagatcccatactgtatttgatgttgtataccgatctaggcgtacttcccaataagaacaatttaacgtagtagaccaagagcggagagatccggaggaagccagcagccgcaccagccaaaccttgcaacgtgatataactcaagaagaaggtcgacgctttcggcaagttggaagccaagatggtaggcgcactcgagatatcactagcaagctctgagacagacgccaccaagcctgaggagagtgttacaatgaggaaaccatgctataatttggtaagatttgccgacaagaagaaaggcagacgagggggttagcaagactgattaccccgacccaagtcaagacagagcacgcacgatgaccaggaagatgaaatatcgagtcatgagggacaactcgactccagtcttcttaggaataccctcaaacttggccaagactgtttcatggaagacaaagcgatgtaaaaattgaagtgtggggtcagggtacgctcacacgaaaacaaagatgcccaaaatgtaagcaagtattcttacgtcggagaacaataggcaagagcatgaacagcacagcaagcagaaccgtgggaagcactccggagatgatgccaactaccacactaggaagcttgcagatccaagcgagccaagagaactgcgtgcagagcgtactgacattggagatgattccgacgaacgcgacggggaaggaccagagcaagatcagtccaccagtgagtgcataactgatgtactgccggatatttgcctcatatctatgatcaattgagagccgaggatagtcagcaacccgcagcatgtgtttcagaaacggatggaatagaagagaagacgaacggattcatcgacagattgctccagatgacatcttcgggggcggtctcaatgtatcgtccattcatagtgtaaggttgattatgcgtaacggactgaacagccatatgcgctccgatctctgttatgcgacccagagaaaatttcgaacaggatcaacacgagtcaagggacgtcattgatagtgcataaacaaacgacgaacgctggttgaagagaacgaaagcagctgtgtcaaccggaaagaagcaacaactgtcaatgattgatacaaatccaaagttgcagaagagaaaggaaatagaacaaacagttcataggggcatagacctcatcttcacccagtccaggcgaggcgatatccttctcaagctgctgctttgcctcctgcagctctttctcggtccggacaatttcctctctgcaccactcaatagtgtcaaccttttcgcccataaaaggcagaccgaacggtaaccacttgaaaggcttcaatcgatgggacggcctcttcttcttgggcacaagcgtctcggcgatcgatacgtcagcctccaaatcaggtgtctttgtccatttatcctcaagaggctgcccgttcttcttatgtgccgccttttcggccttgttctttagcttgtaggccgtcttgatcagctttgtctcagccgactcaagtttcttacacgcgttgagtcgattgttgaaatgatcaggcatttctttgagatctctgagaacacgtaaacgaaacaaaaattaagaaactaatctgactgtagaggaagtatcacataatcatatgaaatgtgcgtttgaacgaaccgattcaaccaaatgtgtttagcgcctccaggaacatggttgaagagctgcataagaacttcctcgtccaagtctgtgagattgcaaaaaaaccaaccataaccaaatcgatcgaatcaactaaatggatcttcatgccgtatcaatagttgccaaaacgtacatttcttgggtataccagtaaaaagaacagttcgagcctgtggcaacttggagtggtcttccgagacgaggtatcgctgtcggatcgtcagccactctcgcatatgagtttttaggttccacagaatccagactttcaaagaatgagccggttggtaaatacatcgaaacttatgagctttgaaatgaatttgtgatatcttcctgaagttttcttagctcacaagtgaagatccaggccaagagcagatgggctgcataacgggtatacgacgttggggcaacgtttccgaaggtaaatttatccagaccttcttttcccgagacggatgttccagccgcgtcgacaggcatgaggatgacccaagagacgagccagatggggagcaagatttggactatcattcggagatacatcacaaacgcgtaggcgtctagaccattcttttcgagaatgatcttgggatcagaattgaacagcctgagcggccatccgagtaaggaaggtgataagggtgcttcccgcttcctgatattggtaagaggcaaagacagggtatcggtgagcaaagggctatatttacttcctgtgaaagaactggtgaagcttctagcaaccaatctctatcaaaccgcgattcttcgaatcgagcggggctgtttttcttcgcagataaccacgagcaaatatcatcatgcacacccgggtacgtgcaaacaccggaccttgtcgcgcttcatttccgggcgagagtgcgctgacccgcctccttagctttgctcgatccaccaagcctctaatctcgcgtcgagctatctcactagaaaaaggtgaacaagagcaaagatacttacttttcatcggaaggaataaaggtccgaggttcgtagattgatcgaaactgtcttctaagcaaggtgaatgcgagaatttcggctccagcgatggctgagttgagcacgagagcggtgacaaaggagctcgtagtagcggcgttggcatcgtcggcagatctgtgtaagtttatccaggtaaagtcgaacaagtgggaggaggaaagagaacaaggacgggaggaggggatgtaagaggaggacgtataaagagaagtaagcagggcggaaagaggaaccggtgatagacagtctggtaagggttggtctaaatgcgagcagaaacgaacgcagaaggatagatgagacgtacgcagacatgatgggccgatgaggtccttaaggaagggtgtatacaagggttgtggtgggttgtatgcgtcgatctggaaaagagaccaacgggtgtggaaagttgcaagagggaggaaccaaagaagaaagaaagttgaaaaggcgaccttgcgacaatcaaccgatagcagctgagagaaaatgaatgaggctaaccttaaaaagattgtcgagcggccgatgaaaaaggataatattgaaaacatcagattttttagagaaagaatgaaagaaaacaacaagaagactacaaattttcacacacaatgaagataataaattcaaaccgtcccgccccacgctctttcaccattccacccgggcttggaagatgactgcatcctgatcgaggacagtgactgcgggaagaaacaagacaacaaatgacgtctcgtctttccgcctctttagcgcgcgtcggagctttttccgagtggaaaccttcccgatcacctccaaacaaatcagctagagtagctcgctctccctctacctatgtatttcctttgatccggctatacgacattcatcagacctgcccaacatatccagtcgccacctacagctgcccgacactcctcggttagctcggtcggtgacttgaaacgctcttcgtttacctactgttgcttctcaaccctagttcgaccacccccagtccatcccatcatctgcactctcatcctcttcttcgtgttcatccctggcgccactctcctcactgtcctcgcagccctcactttcaaatccagtaggacctacgacaagtaacgaccttctgaagaatgtggaaagtcgctcctcgcccttctcgtttactggtctgaaacgtgttggacaaacttgatggtccacagtttcatccgacgcttcaaccgatggatcccagaaagatgagacggccggcaagtctccgacagtcaaatcggctgtttcggtcacgctctccatcttgatctccatctccgtttcattgactctgtcgtccacctctaccttcggaacaacggtgttgctctcggaagatcgtgcagagatatgatgaagaccgggtccccactcatcttcctctattttcactctgatcccgggcataataactacctccactgcttcttcctttattctgggttctatcaacctctcatccttcggctcgatcgagacacgtctgtgcaggagaggcgcagccgcccagccagattccaagtctaagccgaagtctgagatcgagtccgaatccgaatccgaatccgaatccgagtcgaaatcagatattgagccaaatttttcataaggttcagctttgaaacacggcctgtcggtttctacctcctgcaccgaccgaggtgtaagtgtagttggtagaggaggtgccaaaagctgaaaaaacaaacaaacaaacaatgtaacacatctatgtgagtattcattgatacaatgaccattttactcatttgcaagaccaagagtccttcctctctttatgacggattgtaccaacctgaaccatcctaggaggtttaacaccgagcgagatcttatggagaacttgcgaaatttcggtttcaaaggtcgaagccgccagggcatagtcttctttcaaatcatcagactcgccatccggttcagaatcagagcctaacttgagatcatagagagcttgttcaaacgatgacttttgaatctgatgagctgcttggatatcctgacgcaataacagccggagaagatatcagcatcccgatcggtttactgacttatccggatagggaaattatgggctgaggacaatcctactttaaagagacctttcgcttcctgtctgaagtctttaccggctcgctcaatgatactcagcatcgatttcgcgacggaccgaaacataggaacctccaaagcccggttctattatatacgaatcagtttcgtcactccagctgtcaccgaaagagttcagatatacgaagttgaattgaaaggcaactctcactcacgctcgtatccttctgatcgaatatcaacggtaaagatctgtggaaaaataaacccggccgtgagttcgtttggacgtatatttagtcaaagtcctgaccgcgctcacctgtgtagatgagttcggataagcttgtagagagcgcgatcaaaagttcggacgaccgatggaggaacttctgaagagaatactccacacaggaatcctctccgtaattcaaaaatctcccgatacaggatgagatctatacaagaaaaaagaaatgctcaagacgtctctatactaaacgtatatagtcaacttcaggaagtcttacggttgtcttgttccttcttcactaaatcttcgtccacctggagttccggactagttgttcgagaccgaacattccatccagactcctccgtttttataattctaatctgctcttcatcgtacccattcccttcatcttctatctttccccgtttttctcgtctgttcttgataccacgaggcttccgcttctttgtccgaggttggccccgatgatcccattgaatttgaatatgaatcttttgaaggattgctcgaggtttagccgggcaacctttggaagacgagcaattaggaacatgaaaaggcttcacaaagactggtgatgttgtaacgggccagaacagatgcatataagcacaggcagaaggataaattcgaaaaaaaagacagacgcgtacagagtacgggatctagggatgacgagccgggcggacttgtcaaatcaccaacactctctaatgacaaatctcctgcgttcttctccagtcaaatccaacatatgggtatatgcgcttgggtgtgagcgacgaaaacagaggagagagaaagacaccagatagacgtaccacagcaaaccaatctcgcactctctcaaccacccagccaatttttttttcttcagctccgtcttctgtaggatcacttctcccggacggtctgatcttactcaaggacgattccacctcgatcattacctgtccttctccaccatgtcggccatcattctcattgagttcagtgtgatcttgcgcgggggcatatatctccaagaggcgaattacttgagaaaagtctatggaaggatcgattgcgaatgggaggagcaagctatatcgaagtcgaatccgaagagttgggtagcctttgtccgcgaccactgacaatatcttttcaaaagtctgtggaacagtgggcgagatttgcatggctatatgcgttcggactcaagacaagacaatcaacggtgaattgacgttagctctagtaggtgatgaagctcgagggttgatgtcggatcgacttcacgacaaatatttgtacagatgttagtgacaggtttttcagattgttctagacagtcctgaagaagctttgattgcacaagaccagacgtcagcttcactccaagcgagtagaactgattgttcatatacttctctgccatcgcattcttctagagaatagaagaaggatacatcgctctgttcaagattgctcatatatccatgtcatcttcttctcccacattggctgctgtggctccaactccacccagatcgatcgcctcgttcccaactctatctgcccaatcccttaatgcaccctccatctctttccttagcacacccacaccctctcctgcaactcttaaacattccgcaaacctctccgtgtccagtcgaccgttcagttctgctgtggtgactttcccacttcggggcaagaatgcgagaacgacatgaggtaagtcggattcttcctgtgatgtcagatccagaagaggcgtcgtgaggtggatgccgattgttaacgacaagagtgagtcgagcaacgatattccggaggtgagaagagcaagcgtggtcgcattgatggcggtttgcagcaaagctatcaaaccatggacaaatgttaaacatgaaaaatatatttcaagttgaagcgatcaaaatgaaagaaggcattgagacgaacctccgtccatagaaagaacttgaacgtatatgttaatttcactccgaggataaagctgggtctggatcacgggctcaaatgtgctttccaaagcagcagcgatctcttgtattcgcctgttgagcgattgtttgagaaccgggatatctaatcagactaatttctgatagtagtgtagtggtgaataagagagaagacccacttgtcaccccgtcctcttcttcttcgttcatttccagcccacgagcctacaccaacctcgatgttcaatacagccctgtcaaacaatgtagcacttctcatctttgcttctcgcggtccatggacagtagctataacagtagtaagaccatgagaacaagtagcaatcccatcggcagaggaggatgacgaagtaggaatagagagcgagaaagttcggagctcgtgaggtcgtcggaaatcggatcgaagacctgcacttgtttttgtgagtattggacctactttcatgacgcagaagaaacttgattgcctacctccatcattgagaatctccacacgtgaggaagacatcttttataagaaaaaagggggccctgtttgtacagttgtgtatatgtgttgatgatctgcttttctaatcgggagctgtgaagttgaatgaagttcagtagcactagacgcactcgactgagtcaaatctaatgaggaccaacggaagaagtgagcttacataagctcctctgacgtttctgagatcgagaattcctcttgaaccattcgaaagcaatcgcctactcgctccttcatcgacactcatctcttttgtatctcagctaattttcttcaaagcagatggtgaagttaccttccaccgcaagactcagatttgcgccttctcccacagggaatcttcatatcggtggccttcgtactgcgctctacaatcatctgctagctagacaatcaggcggtaaatggattttgcgaatcgaggatacggatcaggtttgtctcgattcttgtgcttctcatgtcaagatgatgaagttgacaatcgcctttgagtttcttgatcgaaaaaacacttccactctcttgggcgtcatgctcctcaggctaggaaagtagaaggttctgtagacgccctacgacgttctttagaatgggccggcctggattatgatgaaggtctgtaagacacgatagtttacaccatctaagccagagagaaactaaatgccattgatttgtccaattttttcttcttctttgttctcatctttcaggtcccggaacgaacaacgcacactcgtctagttatattcaggcgagactcttgtagttttgtcgtctaaaacgtcttcaagccttgtcgtttgctgagccatagaccttctaatttgggtctctatcctacagtcggaacgtttggatctatacaggcaacaagtcaacaagctcatcgatgtgcgtttatctgtggcttacttaggaatcatcgcagaccatcagatctagctgacaagtttgcgctttcccattgtctcatgtactttagactggaaaagcgtacagatgctttgcaacgcccgatgagcttgctcaattgcgtgcagatactgcttccaactctggctcagctggtggatacgataggcgaggactgaggctgacggaagaggatgtagccagaagattgaaaagcggagagaagtatgttgttcggttcaaagtgagtcctttacagataaacagtcatgtcgtatgtggcatatttggagcatggtcttcatctaatgatatgagatcatttttattgggatgtctgtctgtacctcagtcgtcaccggatccgatccctttcgttgatcttgtttattccggcacgtatgctcacccaacggccgctcaggacgacacgatacttctcaagtccgatggattcccaacttatcaccttgctagtgttgttgacgatcacttcatgggtatcacgcatgtccttcgaggagaagtgagcccttcaacttggcttctaggcggatggtattgaccattggcactgtgtcactgatatttctttcatattttgtatgttaggaatggttcccttctgttaataagcatcttcaattgtatcgagcgtttggatggaaaatcccagagtttgcacatcttcctttgttgatcaacccggatggctcgaagctctcgaaacggcatggcgccgtttccgtaggtgaatacgaggtcaatcatacccttccatccttcttttgtcttaactcatatctagatggccttctgatcaatcaaacatcttactattcaaacacagagagaaggatatgaaccttcggctatcaacaactttgtagcactcatgggatggggaggaggtcaacgaatcttggatcctgcccgggaacctgaacacccaggccatactgaaaacccacatgaaagtgatttcctgacaatggcagagatgattgaacgagtaagcatctgtcttcttatcagacaacctccttcgtcttccttttgaatgcaagtttcgatcagtctgatcagtgatttgccatttcttcccaataatatcaagtttgacatcgacaagatttcgaaatctccaagtcaagttgacaagtctcgactagatcatctccaaaagcttcacgtggactggcgatggtctgtaggtggaccgactagacaagcgttcgtaaaacaggttcaagatatgttcgaggccagatatcctggaaagtaagttcttccatctgaatttcctctacgtcttctatccttgattcttcttttacttggtctggtgttgatcttgttatgtacttatctctgggccatactcgtcaataagtgaatatgtccgagacacaaccaacgtgtcaagatttgtggagtttgaccatgtaagttatttgctcttcgctacattttcatctgtgtatgtggtgagcgggaattagactagtttttgcttatattgacctgaccgatcctttctaccggtcatcatataatttcagctccgagtccaattcgttcatgagctaggggaaaacaatgattggctgttcgtcgacccagacttaacctcagctggagctagacaaatgaagaaagggacatcagattctaattatggtgagcctatatcttgctttgtctctcccctcataaggacccccagttcctcttcatggtcgcttttaacgcaattttttactcttagaaatcgtattgaaccaagcgatacagctcctcagcccgctctcagaggaagagtttttaaagccggacctattactttctactatgaattcggcgaacaagaaagcggcaatgccaagagaacgaggacaggccccggtggccaggatcaatctgtgggtgccgatgagacacgcattgactggacagaaagtatgttcctcctctctatttctcaaacctctcactatccttcttgtcctgacagtcatccatctatctctcaataacgatccaccatgaccgaccatatttgctcatgtgcgcttcgaatttgcctgtgtcgcgcctttcgaaattcgcgtcttccagattggacctagtgtagctcaagcaatcactgttctaggaaaagagcggacgctgagaaggttaaagcgagcattggagttacatcagaaagatactgctgcttaaacaaatagaatgatgatttttgatgatcaaataatggtcttttgaagctggactgaaagtttcgggattatgccgaagtgtgattacataagctcgaaaagtcttgggaaaattcaaaaacctgtttgcaattttatactcacaccatcttgctctcacacacacattcgttcactctcccactcaactctttctcccgctcgctttcctatagcatctctcaagatagtgagatttatttcttcaatctgtacagttttaggtgtcaaaatagctaacctgggatgtttctctgtcaacacagtgtgtggaatcctcggtcttctcctccacgatctcgaggcagcttacactacccaagccgccgtagagatcgttgaaggactctctctgttgcaacatcggtgaggattttttacaacgcatgtgatctctcctatctcccctatctctctcttgaaagagaccaggaaggagaaggtccatgttgtatgttcaaaaagcctatgagaggtggccgagattcgagcgaaactgactaggttcgagtcattcgttacggacggatccttgggaatttttataattcgattgtttgtgtgaatatggcgcacttgtagaggtcaagtaagttaagattttttgttctgtctctgttccatctgctagctttaatcgccgtccatcttgactttgcggtctcaacggagattgttcatgcgaggtcgtcattttgaaaaacgcagtctctgacaaacttttttgttgttggaattttataggatgcttgcggtgtcgttacttgtggtgctcctcgaggtcgattctaccaggttcgttagtcggcttcaaaccttttcataatggtcatgatgtacaaagattgacgtatgaatctctaccctctctatgacatgcatgtgctacaggtcaaggcaaacggaatggtccaggatgtgtttgacaaccgagccgtgtctggactccgaggattgatgggtattggccacggtatgtttgattatgttctcccttttcgagtttagagagaatagttacattccaaatctcatgtatgatgattctgtcctggtggcttccagtgagatatcctacggccggttcttcagcccacgcggaagctcagcctttctatgtcaactctccctacggacttgtcatggctcacgtatgtttaaaactgctttatcttatcctacgcatagcaatcctaactatcgttttcttttccgttctcagaatggaaacttgactaacactcaagagcttcgaggtttcctggacgaggtcgctcaccgacacatcaacaccgactctgattctgagcttctccttaacattctcgctaacaatctgcagaagacgggaaagaagcgaatcaacgaggaggatatcttgacggccattaaggatctcatggctcagtgctctggtgcttacgcctgtaccgtcatgatcgctggcttcgggctcgtcggtttcagggaccccaacggaatcaggcctttgggattggccagcagacagagtgcggcaaaccccgagggaaaggattggttgttggccagtgagagcgtggtctctgatgcttgttcattctctaactgggaggatgttggacctggtcagtctcacgtttcttgtcatagggagattcgtggccctttgtttcatgtgttctgatgttttcccctcataccgtttgttttgtcggcgcgcaattgttcaaccctttggaacaacatctttccccatcatacaggagaggctgttatcatcacccgaaacgccattacccgacgtcagtgcgctccttctaagcccttcgctcccgatattttcgagtacgtctactttgcccgaccggactcgactatcgacggtatctccgtctaccgagctcgaatggctatgggagacctgctcgccgaacaagtcaggaaggaacttgccaggcatggagagacagtcgatgtggtcatccctatcccagacaccagccgagtggcggctactcaggtcgccaagggcttgggtcttccttatcgagagggtttcatcaagaaccgatatgtgggaaggacgttcatcatgcctggtcaggagatgaggtaggtttcgtgtttttgtttgtattgtgtccagaaaaaaaaagcattgcgtggaactcctcaattgacctactactctcggtctctgatgttataggaagaagaacgttcgacgaaagctcaacgccatgccccttgagttcgccggcaagaacgttctgcttgttgatgactccatcgttcgaggtaccacctccaaggagatcattcagatggctaaggacgtcggcgccaagaaggtcatgatcgcttcctgcgcccctcccatccgacactccaacgtctacggaatcgatatgccctctcctcacgagctcgttgctcacgaccgaacggaaagcgagatcgctactgagattggtgctgatctcgtgatcttccagacgatcgaagatctcatcaagtcgtgtcaacagttcaacccgtcgatcgaacagttcgaatgctccgtcttcaccggtgaatacgttaccggagatgtcgatcaggcatacttgcagagtttggtgacgttgagaaacgataacgccaagttgaagttgggaactcaggtgggagaaggcgtgcatgaagtcaaggaggctcctataggttgctctggcccgttaagtaagtgtcgagctttgcagactgtttgctttgtttttgaataggaatattaaatcgacttttctttctcctgactttacaaagacggagctgaaggcgcgatcggacttgctaacggcatgtcgggagtcttcacttcttccggccaccagaatcctaacgacaccggttcgtttccttccttcctccccgtcccgctccatctgttcttctctatttcctccttattttcctctctgtccgctcttgatatagctccaaactgacaaacatgttcacctcgctatgacacagtcggcttgcacaacagctggcacagcgctcacaacgaacaacaataatttttctttgctctcttccctatactctcttgtccacttgcaccctgataaaacaaaaacaaaaaagaaaaagaaaaggagggcacgataacctgtttctttctcattacgattttctatttgtgcttctacttcttcggtgagaagcttgaaccgatatgaaggaggaaccgcaatacagaacaaagaaaaggaattaaaaaaaaattgaaatgctcattcgtacatcatttttcttctacctctggttccaacctatcttcctctatgttcctttcctattcgtttgcctttcttacaataccagtctatgccatcccagggtcttttttcttcttcttttgtgttatgtcctttttttttcggtacttcttatgtccaacctttatctatatctagagaatcgtctcagcctcaacctgagttcaagtttcaattcttcatccttaactttatcccgatcaaaaattcgattcgacaacgcatgtgaaggccagaagagctaggaacaagaacgaggacgaggatggaccccgagattaagagggcagtgagagcaataatggtgagggagagagaaaagatatgattttttttgttgagcagatagatacacatagatgaaagaaaaaaagggagggagaggaaaaggacgtctcaaatatcattaaacccttcacaattaaccaaaaagaagacacgaaacagacgataaggagagacagatgagcaacaagacaaacggatgattgaggattcaatgaaagagaaacaaaaaaggaaagaaaaaaaagagggtggtcgactctcagaagaaggtttaattaaagagggaaaaaaaaggaaaaaagaacaccacgtagagaatggaatcaaccccagatgagatcgttcaaaaatgaaggactcggtaaaccggaatgatccaccgagattggttgatcgaacggtaggtcccacttgtggccgtgttcctgcgtctggcccggtccttgttgtccgtcttggcccggagtgtatccgtattcggagtaagacatgggatccgaaacggtgtcgagtgacatgatgagttggtttgatccgtctaggcctgttccggtgaaactattgatacgttttgtagcatataagttcaagacggaaacggtcaggtctcaatctattcatctccgagcttctttttttgttttgataaaaggggacagaagaaggaagaaaaaagaaacgaaccttaatccaacatccgaggggactttttttttttggagggcaagataaatatcaaccaacacaaccagatgttaacaatgaaattcgacaggacgactctgtatgcgtaagagagagatataacaaataaataaagcgaacggaaacggaaacggaaacacaccaagactaaacatgttttcatcccagactccttcatccttcatgaacggcgtctgatcttcctgttttgaacctgcggaacgtgagatccattctctctgtaaccaagcccggatcatactaggatctttggggaacaacaccggtctgaaggcaaccgaatgacgtcctcatcagttcgtcggctcatgagttcatatcctcggaaagactcggtaaggacgtacggagtatcagcttcggtgtctggatcgacatcggctatggatattcctcggcgtttctgatgcagaacggtggattcagccaagccggtaaggggaagaaaacttgagagatccacaacgaaagaaccgtgttcccagagagaaagaaggaagaaaaaagaaagctatagacgaacctggtcgatggtacgtgagacccagccgacacccgcccaaaggaactgacagttcttgagcgcagaaaccgagacatcgagtttactatccgcctgagagatcacgccgaggaaaaggaaaacaaagaagaaaagagtgatcaacgatctggtttcaaaattctgtcggagaggaggaacgtacgaaagatcgaaggagtttggtagctgtaggcgtcttgaaaccgtccattccacctgctccgccaaacccgttagcagctccgctaaagctggacatcccatttaatcctccctgatacagacctctttgactagcgatcgctcgagcagccgcgttctttgcttcttcgatgagttgacgctcctcgaggaaagcgacggctgagacgaagatcatttggtcggcaaatgggttggcgaggatggctatcgactagagtagatttatacatatgagaggaaagcatgtcaatatgatgaaatggccagttctatgaaatcctgcatcgtcatgctagacaaggacaaagaaaggaaatgactaacaccagccaagtcggcataggacagcatgtttgctagcgtcctagcagatgaccgagagacctccacgtttgattccagcaggacttcctcgccttgagagaagttttgaagaagagacggtcgatgtaactttttgaatggtatttccaggaatgaacgagaggcaaggtaagcgatggttaaaagaaacaagttcaagagaaagaaacaaatgcttacgaccgtgatcttaaaaacgagcgttcgaaagacaaacccgatgttattcaatcatccagcgatcaacaatcggaaagaatgaaacgtacgaccgaatgaaacatgatgtgcagtaagaagaacgtaggcgactgtctcaagtcctgttgagcccatgatgaggagcgcgtgcgacgataccgaggagaaaaccccattggaaaaaaaaagaaagttgaggaggaaaaaaaatgagttctctggaggtaatcaagaaagagacatcaacaaggcatagagggaacggactctgtaatgcttgaaagtatgaatcgagaaatgcaacaccggatccatgctgaaccaagccaaggcaaacgaaacaaagaacaacgaaacaaagctaccaaagcgatcagccgaccgggcgagcgacatcccagaggaaaggaggaacaggaagagaggagtctccttctcggacgtacgcttggtagaaggaaatcatatcaccctgaagaacctcgagcttttctctcgacgaccgatcgagcgcgccctttggggaattcagaacatccgagatccgacctctgaagcgagtgatagcgatcaactgaacgatcgtttcgcaaacaccgcttgtcagttctctaccgcatagtgaaatcaatctagcgaagaaaggaaagaaagaaagaacaaacctccggccaaggccaaggggtgacactcccggccgggccctgaagctgaccggccacaagctcacaatccgcactggtcggtgacctgatatcgatctccgcttccgagaccgtggctgatctgcctgtaccgtacgagatgaccctacagggacgagacgttcgaacggaggatcacgatgaatgaatctcagccgactgtgtcgaagaagaacgacggggacgaggaagggaaggaaaagaagagaaagaaaccccttcccggagggaactaacctatcgaggaagaagacactccagaagagaagtcgacgacgagcgatctcgacatccgatggttcttgctgtatggatgcttccctatggagtccgagatcttgcagcatccgtatggcctgtattccggcgcgcgcatcatacgatcgatcagtccacccgactctttgttattttgttttctttaccttctacacgggaaaagaaagatgccccattacttcaggcaagaatcatgggaaaaagaatcaacacgaaccatcccgctgaacatccacagtccgctgtcccttccacttccaaactctgaccaagcgagaaggaccaggccgacgacggtgtcgacactggggaaactcaacaaagggaccaagatctttttggctgtatcttcgaacggctgagcagactcgtactgtctcttgggagacgcgcggagagggaggaggaggggatgtgttgagaaccgggaggtaagcgcgcagatggcgttcgatatgagcgccggaagagtgtttgctcggtgctgctccaagattctggggagagagagcccggcaagcaagaataagagaccattcattcagggatcaatacccatttgaagagaaaagtgacaatgccaagagagaaggtctcatgttctcatgcaaccattcgccacgagatcatcaagagagatggaaagggaagggaagacgatagaatgaaaagaaagagaaaaaaggaggacactcacgatgcgaccgacaagaacgggaaatgacaactcagatcccgttcgaatatcccaaggagatccccaaagatctcgtccttcgggtacaccccgagtctaccttttccttctcctttgaagagtctgtctctggcggtcgattttcgtttgccgtccgaggtgttggtcgctgtggaagaagagccgcttctggcggtgtcgaccgagggtgccggcctgagcggatcctccggtgacgaataggaagacggggttgaggccgaaggagagaactcagggtagagcatgttcgaagctgggccggccggtgcatggggcgaagacccggagggaccgaccaagggaacggtttcgaccggcggggtcgtcggctgttccagatccgtactgtttcgaagctcgaccttgactcgcttgaaaccggtaccggtgtaggatgtccttccaaactgtcgagattgaggaccgggggggagtgagaaggacagaaagatagatcagcttgagaacactcgcttctcttttcgttttcattcttttctttcctctctctctctcacacacacacatatcaaagatgtaccctgaactccaaaccgtcctcaaactcggtccaacagatgtttagaaagagtgacagcctgccgttccgaccaacggcaaaagaggaggtgaagacagagaagagaatagagagaaaaagagagagagagaggagaggaaacaccgagtgccaagcaagaaaacgacatacccaacgaaagaagggaacctggagcatcgctcggcctccaccgatggaagacgaacctggagccccatctggatcctgtggaccaggtggtggtggtggtggtgattgagccgggttgtgttcggccgagctataagttctcagcggtcgaaccgattcgttctggttctggtgttggctttgattcgagagatctgtggatgaggatggatcggatacgttgaaagcgacccattgttcatacaagctcgactggttttgctggtcgtggtcttcgtaggagacctcctgctgttggtgcacgtgctcgtttgaactagatgggtaagacctggaagaagaagaagactgatgaagctgtgggggattctgttgctgttgctgctgtcgctgttgttgttgttgttgctgctgatatggttgtggttgtgtgtacgccggatcggatggttgctgctgctgctgctgctgttgctgcagcaagttttccaactgtttctgtatatcccacggcagaggagccgaggtggagaactggtcgtgttcatacttggccatctcgggcgactaggaagagcaagcgaagcgagagaagagcacgaagaagcgagagatgacggatgggagatgacctccctcgttggtgtggatgtgggtagatggaagaggacgaaatgaatggaaaatagagaaaataaaatgaaataaaataaattgggccaaacagaaaacaccacgggaacacacgcacatacactctctctccctctcttacatgcttgagaacagatgcccgtgttcgctttgttattgtgttcgttgtatctggggtcagacgagtggccagctatgtactatggacatcccattcacgagcgtcgaacggttctctttcccccccccccc

SEQ ID NO: 2974 - DNA, 581 bp, Xanthophyllomyces dendrorhous
tcgaaaaatgggtgtatataccgttagctggtcaagtctctttgcaagtttaggaaccctccgagaagaagaagaagaagaagaagaagaagaagaagaagagaaagaaggagagaaagaaggagagaaagaaaaggagggggccacaaaacaagagactcaacttgacgttcaaaaacaacctgacccagtcccatctagcttttcctccttcgaacagttcgcccaacaccggcggcggtcccagcagggcgaccggggtccagacggtcaaggacgaaagcacgagggagagcaggtaacactcgatctgacggctcgccggggagaccgaggaggtgaacggtcggaggcctaggaggtggataaagaggtggataaagaccgaagagatcatcgtcgtgatgatcgttcgtcggagagccttttggaggggtccataaggtatcggttcaggcgagttcgccaacaaagcgaaagaatgaatgaagggaaacaaccaaggcaaacaccacttggtcagctcaaccaagcctactactactacaccaccacctcaggcccccccccccaaaaaaaag

SEQ ID NO: 2975 - DNA, 3154 bp, Xanthophyllomyces dendrorhous
aaaagaaaaaaaaaagaagatggcccgaaaagaacagacctttgactttctcttcttctcgccaactttcctcaacacggcctcttcctcctccttctcctggccgccgccgccgccgacgacgagcttcttcctagcgttcgcctcctcctcctcctgttgatcccaaagatccccgatctgtccggtccaccacgcctcgacagcgacgagaccgagggcgacccagcctgtgaacgcgcctgggtcggccgtcagagcggcgacccagtgccactccggtctatccgtccccctcttgccggccggtccggcgggggaagagatctcgaccgggaactctgaccgggggagggcgaggaggacgaaggagaggaggagcacatgaaccgcggtgagagagaggtacttgcccaacggaaacacggccgagagcgagggaagggggagatctcgcgtgtcgtcccctgcggtcgtgcccgtggccgaggtggtcttcttccgggaggggaacaccggtttcttcggagccttcaggttcaacaacggaggcatggtattgaagccttgttgccctcgtttttctttgcgtgtctttctcttggtcttcttgttgttgttccagctggaaacggtgcgatctcgtctgggtttcttgagtgttgatggaggtgttgtttgtggacgtgtgttggttgggatctagagataattcaagaaaaagaacgaaactcctcccataataaatagataaataaataaataaagaataaatgaaaagcaagatgatgatgaagaatcatcttcatctcctcctcttcttgctttttttggtctttcgatgtgacttgaacgtttcgaaacgaaaaagaaacgacaacgatcgaaaacatcaaaacgatggggaaaaacataaatatatcttgggagttgagcccagtcttagcacacactagcacaacgttccttcttttttttaaggtcaaggaaagagtgaaggagggggggggggagagagagaaaggaaacaggatagacacaaaaaaagcacacacacgcacaactacaacgacgacaacaacgacaacgaatagagaacagaaatgatacatgctagggtgtgcggttcgttgagaaccacaatgcagattgaatgtgatgagatagagagagagagggatgacatatgaaaggagaaacccaaagagaagaagaagaggaagaaagacttattttaaaaaagaaaattttaagaaaaataaaacaacccagagaattcacctagcgcaaagcagcttaggcggaagcagggtaggtctctcgggcccacttggcggcctggacaaggttgaccaaagcggcctcggtctccttccaacctcgggtcttcagaccacagtcagggttaacatcgagcaagtcggcggggatgagctcgagcatggcggcgattcggtcctggatctcctgctgggaaggaactcggggggagtggatgtcgtacacaccgggtccgatgacgttcgagtagttgtgctgcttgaagacgtccaacaacttgagggacgacttggaggcctcgatcgagacggcatcggcatcgagcctctggatggaggggaagatgtcgttgaagtcagagtagcagaagtgggaggcgatgaaggtcgagtcctcgacaccggaggtcgacaatcggaaagagtcgacggcccaggtgaggtaggcgtcccagtcgacccgtcggagggggagaccctctcggatggcgggctcgtcgacctggatggcgtagattcctccggcctcgaggtcgttgacctcgtctcggagggcgagggcgagctgcttgcactggatctctcgggagacgtccactcgggggaacgaccagttgaggatggtgaccggaccggtaagcatacccttgacgggcttggaggtcaaggactgggcgtaagcggaccatcggacggtcatcgcctcgggtcgggagatgtcagagacgatgatcgggggtcggacgcatcgggaaccgtaggactggacccaaccgttctgggagaagaggactccgttgagcttctctccaaagtactggaccatgtcgtttcgctcgggctctccgtggacgaggagatcgagatcgatcttctcctggaaccggatgaccttctcgacctcggcctccatggccttctcgtagtcctcggcggagagctcggacttgttgaacttgtttcgggcgattcggatctccttagtctgggggaaggatccgatggtggtggtggagaaccgggggaggttcaatcgcttctgctgggcggctcgtcggacggagaacttggactttcgctcaaagtcggagggcttgatcgcggcgactcgctctcggacggcggcgtccgagttggtctcaaagtctcgtcgggccttgatcgaggccttgttggcctcgagggcggccttctgggcctcgtcggccgagccggagacggcgtgggcgagggtggcgacctcggcgaccttctcgagggcgaaggagagccagtcgagctgctgggcggtcaatcggtcctcggaggcgagggtgaccggggtgtggagcaaggaggaggaggtggcgacgatgactcggtcggcgccgagggcggcgatggccttctgggcggtctcggcagccgcggcgaggtcggccttccagacgtttcgtccagagatcaaaccgagggagagcacagtcttcttgtccttgatggcggcgatggtggcgtcgagctgggaagcgtctcctcgctcggagagatcgacgtggatggcgtcgacggggagatccttgacaaagtcgagggacttgccaagtcggccgaagtaggtggtcaacacgatcttgggggcgaccttggagagctcggcgtaggtggaagcaaactcggcaccgagggactcggctcggtcgaggacgaggatgggctcatcgatctggacccactcggcaccagcctccttgagctgggcgaggagatcggcgtagagggggacgagcttgtcgagcgactggaggggctcgtaaccgggggcggcgtcagcggcgggcttggagaaggcgagcaaggtgatgggtccgaggaggacgggtcgggtggtgatg

SEQ ID NO: 2976 - DNA, 699 bp, Xanthophyllomyces dendrorhous
caccatttcttcatctccatggcggaaagatcgataccctgctcagggacctgtcgacctcgacccatggcaaaggcaatgtcaaggggggagagtccgtgcttggtgtatcgctcggggatcaagttgaaagagacacagtggtcgaggacgtgatcgtagaaggcaaagtcattgctgtgtgtgtgtgtgggagggaagaaatgggatgagttggtaaaatgaagataaagaaaaaaaaagaaaggaaaaaaaaaggaggcatacgaagcgatgaaatcggctcctcgctccttctgggtctgccatcgctgctgtcggacggtcttggcggtggcctggagatcctcagcagaggtcttgccagcccagtaagcctcgacggcctttttgatctctcggttgggtcctggggaagagaagtaatgggaaggaagaggtaaggagatgggataaagagatgaaagattagatctcggttgggaagggaaatgggagaaaagaaaacaaagagagagggatttgccaataacgaagacgaggagatcgacgatgattggaaaagggaggggaagaaaaaagaaaaaagaaaagaaaaaaagagagatggagatggagacgaaccgattcgggggaatccaagaacggcggaagcgaccatgatgaaagtgtgtggtgggtggtgaagagtgtgtgtgt

SEQ ID NO: 2977 - DNA, 32995 bp, Xanthophyllomyces dendrorhous
acacacacacacacacacaccaatccaaatgaaagaatccgatatccaaataccaaaccatcatcaccatcatcacctcaccatcatcactcgattggaaagaaaagacacagagatcacgacagggagagacagagagagagaagatttacgataatcggtcagaccggggcgatcgaccgattggagccgcccgataagccagccagccagcagccacacaagcacgcacgcaagagcacagcccgtgtacagcttttgctttcacgtgtctacacctacttttgctctgtgcacttactacccatactccaacgtgtgcatgtctctttcaaaaatagtgccggcacaacgattgcctagctctaagcccgggttattgatgcactcacactcacactcatagaatgttgaaccttattcatacaagcatcacacacacacacatacacacacacacactacaaagaagagaaagaaagaaaagaaaaaaagaaaaaaagaaaagaaagactaaggtctccttccaaagctcatccaaagaagcccttcgtcccaccccgacctcactgctcattcacaaacaccgaggcaagacccataccagacccaatgcacatactcgtcacaaacaccttctcgccagatcgcttggcatgggcaagcgcagtcgcaacctgtctcgccccggtcgctcccaacggatgaccaagcgcgatcgcccctcccccagggttgaccttctcaaagtccaaccccagcttcttgacagagtagaccgcctgggaggcaaacgcctcgttgatctcccaaaagtcaacgtccgaagactcgatccccgcgttcgccaacgccttcgggatcgccaccgccggcccgatccccatcaccttcggaggcacaccagcgtacccggtcgtcacaaacttgcccaagatcggaagcttcagcttctccgccatatcccgccggacgagcaacaccgcggcagccccgtcagatacctgggacgcgttgccagcatgcgtgcttccctccttcgagaacgccggcttcaactttgccagcgactcggccgtcatcccatctcggatcccgtcatcctcgtccaccagcaccgtctttgtctctcccgactttggatcaacaatctcggtctgtttcgtgtacgaatcatcacacatgaccagaccaatccaaaatgagcactcgggtctcgagagaagaaaacacatctcacacaactaaccttgacgggaacgatctcctccttaaagtggccagcctttctcgcagcaaaagccttctgataagactttgctgcaaactcgtcctgctcctttctagtcactccaaactctttcgcaacgttctcggacgtgatccccatcggaatcaacacgtcctgggcttcctggttggagagcacatcttccgagatcttctcaggtaggacaccagctccgtagtgtgtcgtcatcgacttgaaacaagaaccaaactcagtcagcgcatgcccagaggagagagtgagtccaactgaaacagattcctctcactaacctcgactccagccccaataccaatagagatctgaccacatgcaatcgagttggcgatctagggtttttatatttgagaaagaaagaatggcatgaaaaacgattagttcaggggaaaaccccaacatcacatcaatctcacatctgagaacgatactgacctgagtgatcgcttggagagaggaagaacactgcctgttcaccgtgttcaaagacgcactgcaaaaagaccgtcgttcgatccaatcaaaagaagagagatcaatgatctgtgtggttccttctccaggaatccaacgaacaagagcgaagaaaagaaaagaaaagaaaggaagagaaaaaagagacaaagacaaggaggtcgtacgtatgagggatccctgctcgaagctgagccattcgagccacgttcgcacctcctccaggcggaaggacatttccgacagcgatatcgtcaatcaacgacgggtcaaccttggatctctcgagcgtagccttgaacacagccaccaggagatcttccggaagcgtatccttcaagcctccttttcgtgcctgaaaaagagacccacagcgatcacaaagactaaaggtgtaagcaaaacaagacgaaaacagaaagcatatggacggatggacgaaccctggttatgggcgttcgaacggccgaacagatgaccacatcgttcgcgttcttttgcaagatcttggactttccagatggcattttcgtagtttgtttgattcgtgttgttgttgttttttttttcaaagaaaggatgaacgaggaagtaatagatgagcgagtgtcaagttgtggttgaaagatgggaaggaggaaggaacaagcgagaactgtttgctttataagtacgagcgtgtgatccggtccggttatatgacagccgcaaacaaagtcgctcgttaaccgaaagcatggtacatcacgtgcacactttgcaccgcctagttcaacatgcacatcgaaccacaccgaaccagcccggttcgcctgaagaatttggtttatcccagaaagaaaaaatctataggacacttctgcgtgtgcttaattcgcaagttgagccatcccaacacattcactcacacacacacacatcaaccctcccaatatgcgacctttaaccgaagaagaaaccaaggctgtcttttccagtttgtccaaactttcgcttccttttgtgtcccgccataaatcactgacgctcttcctttcgtcccttgacccaaacagagcttgccaactacatcgttcgtcctttcctttccacatgctttgtgaacgtactcaatgtcgcctgatcatcatcaccatcctcttcttctgtatacagggaaagaacttggtccatctcgttgatcgaccggaaggcgaggaacactgcttccgattacacaaggaccggttcgtccctctcttatatatcgaacgcgctttcctctttcgactaaagtcgtctcctaacttgtctttggtgccatctttctgtttcctcccccccccttgtgactcccggtttctcatgtcaaccctcactcacaacactacagagtctactatctcccgacaccccttatgaagcaggccatttcgatcgctaggccgaatttaatctcgctcggaacatgcttcggtcgattctcaaagtccggcaagttcaagttggcggtcacctcgttggattacctaggaaagtacgcaaagttcaaggtaaggagtgttgactctttcgatccgttcatatactctggttgactgcgaccaaccatactgaccaacatgtcactgtactcatacaaccacgtcttcaggtctggatcaagcccaatggagagctcccgttcttgtacggaaatcacgtcgtcaaggctcatctcggtcgaatcaccgaagacaccccagagcaccagggtgtggtcgtctacagtatgagtgatgtcccgctcgtgagtcctgccatcttcccaagctcgctctcccgtcgtgaaagaatcgttaagaaacaaaaggggaacacagataactcaatgttcggtgcggctaaactgacatgtatatgtgtgtctccctcttctttcccttggcgcgggcagggatttggtgtgacggctaggtcgacagttgatactcgaaagttggacccgacgtctataatagtattccaccaggctgatgtaggagagtatctccgagacgaggtttgtcctatcgctcactgttgcgaccgacgaagcacaaccaaacgaagtatactgaccttgtctcgacaactcttgcttctctctccacaggatactctattctaagctcttctgttcaatcttcctcaactgaaaaggaaagaagaaggaaaaaaagaaaaaaaaacccctctttagaaacgccttgttggcttttcgtttaccttttccccgacacctttttactttctttctctttcacaattctctcaacctcttttcgccgtgtatagaatacaatgacatcacacgtaaggagaggcgaataggagacgaaggagagaataatctcatgatttcatagtttcatattgcatgtttatcggttccaaaccttggtggccatttgtatagcgaacagagacgaacggcgacagtattgaaaacaagcgggttcataatgttagggctatcttgcgctcaaaccactatcacatttagccttctcgtgcgcccttgcctcgagcccaatcgcctcgggatggtgtgtatataataagctaaatgtcgttcacagagaagctgagatgttcagcgaagggaatagagaatgaaatcacagcaaagtgttgataaaataagaataaaaagcaaggcggttactcgcaaaaaagagttgcactctattggaccggacatattaaatcgcgaaatcccgcacgtgtgttcaccgtttagggattgtctcattaagtactcaacagaatatatccacccatccacccatcctacttccttctggtcgtccaccgattggcttacttctcttttcctgttgtcgaccagtgtctcaagccaaggttctttccagaagcccagagtccgaacatcgactctcagagtcatatcactcagagttgtctcctcgcctcccgctctagtcttccttactatgcccgagcttacgccagccacgacgacgctgcgaccagatgagccgctcccaaagcatcttagaccgtcacatgcttggacgaaactatggatcgccacaaagaatagcttgaacttttatcggttcgtttaattttcacctgtctttggtctcgtcctttccttctctggtcagagcaacatcgcgtgtaagacgggtgggagaaggagctcgcaagattcagaccataactgacgggtcttgtcgttttctacccaatctctgaatgctcatctgggttatatatacaaaaaaccctgttcatcagtgtgcatctgttgttcttcacgatcgtaagtttgttttgatggttcataaactcattcataggaggatacgtcacagaagcgaccaggcctattcttccaaatggttcactccttctttgtggccacgaacgacactctgatgattgaactaatcgagacttctctttctttcttggtcgacttgtcccgtcatagactccgctagtgtgtattctataatcccttttcaatcttccttaatcccggccgtatggcaaactgacagaccgagcctgtttcatgatgtcagttcttctctgcactgatgtacgcctcgaacgaacgtaaggcttttcatatgtctcgtattctttttggatctatctccgtccgactctacgatgttgactgaccataacgaactctttcctttgtggaaatctgttcccgcatttacagaattccatattgactatgtcgactgtcttttcaactgcgtgagcgctatgacgtgcgttcccttctgttttctctctcccgctcttcggtctacgagctacaagccaagcgaagtaagactaacacccatcatgctccctttggactgacggttcatcatgtaccgcagggtttgtggattggcgacaagtaatttgagcacgatgacttcttggcagcagacaatcttgttcatccagatgtgtatcggtagccctgtgcgttcctctttctctctctccctcccttccccactttctccttactcttatttttcattacggtctaatctcaccattgcatctggacacacgcgcctattcctctcggacgaaacagatcaccgtttcgctcgtgatgatcgccgtcagaagacactttttcagagtcaaattccgacatgtgatcgaaacccacagacggaaaaagtcgttgtcggaaaagcgatcgagacgactctcatttttgagcagagccccttccagatggtcgaccaaccctgcaggccctagcggtgctgatgagaacgacggaacggtagcaggatcaccaccagaggcatcagcaggaacatcgacagcagagaaagtaggagaaacctcagccgggtcatcgaactgcgacgaaccagggaaatcaccactgcgggctcagatgtactcgtctggttacacttttccttctcaatcccgagcggccgccgcttcttcttcctcaccctctccaaacgggctcggatcgaaaggcccgttcaagtcgtttgcgtcaatattcaatcgattgagcccgaactctgatttcgacgaagaatcgatcgaagagagaaaagaacgtaagtttgcgaaaaaaacagctagactcgaacaagagcgagctcgaaagttggcggaccaagcggagaaagctcgtcggtccaagggcggaggaggtggtcgagtcggtgggctgcacacctcgatgatccgacgagtcgagggggaggagccgatgctggtcaactcggcgggactcagaggaggcatggctgtagatcgaacggacttcgaactcaacaacatcgccagatccgaagccagcgcagatgaacacaaccaggcagaggtcgaaacgccaatagagacaaatccacgagcacggcaaggggaagcggaagaggctgagcaaccaacccaggaagagactgaggataggtacaagggggcagaacatccaagactgaagcatatcgggcaaatgacagagtcacctgcgggatcaggatcagattctctaggattcgttgagccagaagaaatactggcaaggtcgaacgcgggccgtccaagaagagtgtctgagcctgtgctggtggaccacccacctcagccgcctcaaccggttcacggtatgccctctgttctctttatttctctaagtctctctctctctgttagagtttgagtatcgtgctggacattctcttatcttgcctgaatcttaaaaaataaaaacgaaatagatacgttccctcgatcgaaaacaattgcattcgatccggaacagatcaatccttcgcatgcagcgcatcatgcctctcataccgggctcaacggcgatcacaattataaccacaactataacaacaacaactacaatcacgggaacgacaaatcaaaaaacttcacgaggacggggacgatcgagttcgttgagggtgatgcagcacgtttgggcagaagaaatggcggaggaaccatgttcgaacgaagtacgtttttccttcaacttttttctccgtgttcacaagaattcggatttcaaagatatagcgaaaatagaagtacaaaggttgatctgagttgaaacataacaatcacgacgaaccggatcagccgcaactcgtcgatccgaaggcgcaggtacaatctatggcccgtccacctcacttttccctcgcaccatgaccaatcgaacagctggcggtcgatcaactaagcattcggggtttggagggttccccatgccacacgagattatttcctctgttgccgcctggcttttcccgaaagcgacagaaaagttgacaagaacgttgacgatgcaacgaacgggaacgttcgccagtgctagaagcgcaggcgctggtacaatctatggaccaggcgggccgaagggagggggaggtgtggtgaagagcgtgccatacatcacgttcgacgcggtcgttggaagaaattctcaattcaaggacttgagctcagatcaactagaggagctgggtggggtggaatacagggctttaaaagttctattatggatcatcccttgtgtaagttctgaaagaagagtcatcgctccttcatcggttcaattttctgggctgacgtcgttcatttatttgctcgtccgcttttggcatcagtactatgtcggagtccaactcctaggttgggtgatcatctggccgtacgtaaacagcaagttccgagatgttttttcggatccgacgatccaaaagcaagatgtcgagattggatggtaagttcattttagttcttcttatacatgtatcgcgaaggacgagtcatagttgactgataaatttaaattggggatggcgatatcaggttttcagcattccaggtggtctcagcgttcagtaacacgggaatgagtctcgttgatacatcgatggtgccttttcaaacagggtacatcatgatcgtcgtaagttactcttcaccggcatattacctctttctacatacactcccaatttgtcgggttttcgtccttttcactgacctcttcttcaacaactgtccgatatggccttgaattggatagtacttaatcttcctgatcctagctggaaacactgcctatgtgagtatcgtctatctgtatgaattgcagaagaaaacaaaatctgacgagggaccgtccaccaatatggggatcgtctatacagcctatcttgtaagttttcgtctgattatgctccaaactcatccggatgatttctgacacttatctgtcgccatgttaactcgtattcctgagttctgcagccttcgtctcacgatgtatgcatcttcccttatgatctggtctcttgtaggccttgtgttgaccttcaagttggttgtttcgtttgggtcaaacttggtattgcagctggaacgtctccaaaattgtcccttcaacctctcggttacacgaaacatgtcgcttcttgctagatcacccacgtcggtgttacatctacctgtttccgtctcgtcagacgttatttttgctgatggtcatcgtcctaatgacgtgagtcatctatccgttttctttattatctgctttcaaattcatttcaactgaccgatgtttgccatttgggatttgaatataatggttgataggatgaccgattggatatcgttccttgtacttgatataggaaccccgtaagcagattattgttaaaatcgaccatggtcagatcctgatgatcaacatctgatctctttacatgttttcatgactggaaatgagcagcgcaatcgaatcgataccggtaggaacacgtatagcgagcgcgttccttcagtcggcagctgtcagagcggctggattcgcaatcgtgccgttatcggctttggctcctgccgtgaaagttctgtatactattatgatgtacgttcttttcttctcttataccttctggtctcttctttcttcgtcatcatatacggagtataattctaagaataaagctaatggcattccttctataggtacatctccgtctacccaatcgccatgtccgttcgagcaacgaatgtgtacgaagagagatctctcggtttgttcggagacgaagatcaggaatcgttggacgaggagagctttgtcaaggtagggggcgagtcaagaatggctggtttcactcgatatgtctctttccatgctaggtatgagctttctcattcccaatacatagttcacatcgtacaccgtccgagattattttgtcttttgttcacaacaggcgtcagttggctttcgatatctggtggctaggtgagctatgtttatctcgttgtcttcggcgtttttttagaaagtatctttattgacaaatgttctctcgtctccaatctgttactatttacaaagcccttgcgttgtggcttgtgtgtatcatcgagcgagggcagatcaacgagtcctcaagcgagagctatttcaatatcttctccatccttttcgagctcgtcagcgcttacggtacggttggactcagtctaggattgtcattcgtaggtgctataccctatatatatcagaataatgtcgtcacattgaagcttaactacgaattctttttctttttgatcatatgcacttggcacatttgaataggataactactcacttagcggaggattcaaagtcctctccaaattggttgtttgcgcggtgatgatccgaggcaggcatcgtggcttgccagtggccattgatcgagcagtaatgctaccgaatgagtttgccgaggaagatgctgaggttgccgaggaggaaagatcgagacagagcagacgaggcaggtaagatcttccaatttagctgaagccaggtagtcattcgcgtttaaattttgttcaatcattttttaactgggtttcctcagtacatactccttccgacaagggcctatggatgtctcgtacggccacgtccataaccgtcgagcttccactttctctgcgcatgttccccgtcctgggccacctcaaccgttcttccttccttcagccacgagtgatctagaatgcgctgttgacgacgacgatgatgatgataacgaatatcaacgaagatccgctgatcaaccggtaggaggttcagctctccctggtgttcattcagttgattggacaaaaccccctgggataggtaggttgggtggaggggcaccggggagtctgacacctgtgaaagagatgatgagcagacgacctagtgtagacacaccttgagtagactccgtctcgccgcctctctcctctcctccctccctttttgcttttacacggtttttatcggtttcaaaccatctcattcgcaaacgctccttctttctcgtccttctctgtacatcacgcctagctttcatcctttctgtctgatttctttttgcttctacatcaaacagtccaatctgagacataacatcatcactggatagaacgaacctcgtctgaatgtcttatcatctcttcctgttctatcttgacatacagctgcaatcttatctttctttctctattcgttcttctggtcataggtattgtactttgttcatcttcaactacccataatcaaagcaatctttgatgtcatttgcatcgagctttactatccggcataagatatccagggttaaatacacacaaattacatcccacgaaacagttatctactggaagagaaacagtccgcatcttctctcattaaattcgatctacacagcacaacagtgagcactcagcaaagtcgaccccccacatcacttatgagactcaaaatctctttccgtttgacccactgagtcttctgctcaatcgtatctttcgcacccagaacttcaaggttcggacccaatgtcgagccatgatagggtgacaagtagagacagagtgccagggcggaaactagtctgtatactatttgattgatgatcggtttgaagttaggaattgaaagaaaagtgaaaaataaatagattaatcatgctttcaagttgagtgcttcctctcgtatcgcgcaacgaaaagaaaagaggaaatcagagcctacaacgtaccaacatcttccgatttgttctctagcttgatggcctcgacaagcacgatgacgatctctaaagtccaatcaccttcctctgccgactctatatccttttcaagctcattcaatgagtttcgtcgatgtctcaatccactgacattgaatgccaaaccagcagctgagcttttcaacgatacatcgtcactgagaagattatccaccatgagcgtcgtaagaatctctcgcggggaagaagcagatgatgaggatgaggacaggttggcgagttgatgtgttgtggagaggacgagcgatgcaagaggaacggtagtgaatgcgttcgctaaaaatcgaagggatgtaagacagaatggtcgggagagggatgagccatgaccggaagaggacgcggagcataagctcaaaagttctaatatgggagggagggatgtgttggcatgatctctggggatagaagaggacgtgacaggtggcatggtactaaacgtcgacactcttcgatctatgatggcgatcctccaaagatcaatgagggggaatgacgcttcatagccgacgtttcgaataacttgtacagttgctttgaggaactcccctaggagatcttccagcttgatcccatctgggacagcctttgtttccaagaatggaacaagctgtctttcgaccaactcgaccaatcgtttacgttcctcttccccaagcgttccatattcactctgcccatccagcaatgatccttttaatctttctatcaaagctggatatttcggcgccgcgccgtagagaatcgggtttactgacacggcctgaacagcaggtaaaggccatgtggaatgagggtggggcgggaacgcctggtaaagaagaagatcgatctttgtctcaagttccgattcatttccacctcggagctcatctattttctcttttccaaggaaaaagacaaacgacggagtcgcacggatccctagttcgacagcaatctcacttccccgacccaatccgatatcaacggtggtgaacgcataagatttagccggaacacctttgtcgtgcatttcttgagatttcgattgagccagacgctcaaatacgggctctatgacacgacaaggagggcatgtacgtggtttggtgacaaacactacggtagctccatgggagttgaggatagagtggagagaagcagacgaagatgcaatctggagaggagaagttagcgtagatgaaccgtttgccgaggaagtcaattgaggtgcggagcccggggttgtagaggaagcttgagcagctacagaattcagaagagtcgaagcaagaccctgatactgggcgggtatgcctgacggtatgttcggccgagcctgagacgatagagggacagattgagttgggacgtttgatgaagatcttcgtgtgggattaaacatggcgtctatttgaggccttagggaggctccaaaaggagtcgagaggaagtccgagggaagatctgagttgaagatggcagaagacaatgataaactttgtacgcaaaacaaggaatggagatgttatacaagcaaaaggtctcgcaaacaaactcactagatatccaacttggtatggtacccccggttaagaagccaattgcatcggcagtaaatgagttgcactggatatgtacgcgcacgagacgatgggagttgaatggttagcgcggatttcaagatcaaacaacggacagcctggcatgcgtacattaaagtctagcaaatgatactacgagagggagtgttaggatacagcagcactcgttagcatgttgtatcgtaatggtatgatcacagtccttcaaaaacgctctcaccttttccgccgtccaatgatctttcaagccgtccaggtattcctcccaagtttcctcatctaaagcggtctcgcccatcgggatgatcttcaagggagctccgtgctgctccacccaatttgacaatgacacatgttagctttacgaagcgagcgcagatcaggaagatgtggatatatgagattttacatgagtggaagcaggctttgatttcagaatcccttgtccgtagtatacttcctggccgaatacaacgaccgaggtatctaatcaaacggtggacaagggtgaatacacacaatggtttgcataaggagacgattcgatgttttcaggctctcacactctacttctccacatgggatagccacttggaggagggagacttgtaaaactcacgccatattccatcgatctgtttgcctgttagtggaagagaaagcgacctggcgagaccattactgagatctgttccacaagcgcccggagcggcaaccaagacagcgatcagaccaaagtcaaaatcagttttcttcatagagatggttgggactatagtggaagagagcgaaccgtaaacgtataggtctactttggacgacatgtttgatgagcgacgaatagaatgaatgttgatggaagtagtagagagaggtcgggtgtatgcgcctcaacaacttcgtcttgacctccatcatcatcgtacatcatcatcgttctgcttctccttttattcggccgatcaccttctcgatgacattctctagtaaaaacctcaatcggttgctttttcaatccttatcgattgctcgtccaacaccttctctcgctctatactcaacaacctcacctatcaacccgtcgacaccttcaccctccgctcggaagagctcagtgaacccctcagaaattgctcatttctccaaactttcctctcaatggtgggatgagtccggagagctctcacttctccatcgaatgaacccccctcgacttgaatttcttcgcgagaagcttcaggagagtatgtggagggaggacgtacgggcaaaggagctcccaaaggcaacttggctcgaagggaagaaggtcctggatgtcggctgtgggggaggtctactttcagaggtttgtctcttacatctgttttgaatctgcccgagagatgatgatgctcactctttttctctctccctttggaactctttttttgttgaccctgacagtccttagctagactaggagcaaatacattaggcatcgacgccacgcctaccaacattcctctcgctcaatcccacgctgctctcgacccgatgttggatgcccggttagagtaccgacatcagacagctgagcagttgttggaagaacagaggggctcattcgacgtggtctgtgctctggaagtcttagaacatgtcgatgagcctcgagctttcttaaacgatctagccggtttggtcaaggtgcgtttgatctatacctatccttccgtttttctttcaatttccatcgatttatatctgacctacgactagtatatacgtatgtttctctctatcagccgggtggccatctcgttctatccactatctcccgaaccgcacttgcccatcttcttactatcaccctagccgaaactgtccttcgtcttgtatcccccggcactcacacatcctctaaattcgtaaaaccgacggagcttgacgaattctttgattcgttaggatggacaggtccagagagagagagtagaggtgtgatttacaatccgttgattgggaaatgggtgttggtcgcgaagaatacaggagagtttggcaaactggcgaactatctgtatttcgtgaggaaaccgttggatggataaaatttagctttccttctttgagaaaacgcagagcaagattgagttactatcatcgatgagcatatgtagatcatgacaatggagaagaagactatgagaggaagaatagaaaggtggacttagaggccaagcgaaatggtttacaagacaattagacacgatgcatatatgatttgtcaatggaaagggagagtcagtgcagaggtgaaacacgcggaaagagcatgcatatgcgcgcaagaagaggaagcaaattcaggtctctgaatgagagatgtctatgatcaaattatcagcagagccgaaggcagagagaagagcccaatgagcagcagagaacccagatcgatgataaaaattagaaaggttacaaaatgatagggagaaaaaacaaaaataaatcgaaaccgaaacgagatatgcacaagcacaagcaggacgatgggagtcaagccacgacgaattgcggaagtcaggaaggacagaaccgaaaacaaaagagataatggaggcagtaaagaaaaggtggggtatctagattataccggaaatgtagacaaaatacgaagacgacacttcataggggatacatgatcaagaatatctgggaatagaggaaggaaacatgaattaaagaacccaaggacaggaagcagttgatggagaaagcaaggaagttgatgtattttggaggaaatgtgagtggtcatatgtgatcttggaagtcactcgaggtctgttcgttcacttctcgtgagaaaaatgaagtgaaccaagaacagaacaaagacgacacttatgactaagtgattctctggcctgccccgccgccaccaccctgtacatttctgacgattgttccttccctcgccagctctcttctcaacacttcttctgctccacttcctcctagactttctacctgaaactcatcatccatcggtggagaatccctctctgaatctgagaagaatgtcggatgtgttaatgcctctctgtaggcgtttgagattgaattcgcgtcctctgttgaaaagggtgacgcgacgaccgatcgttgttgacccggtgaagtcacgagtggtcggaaaggtgtagttgtgattggggaagacaacggaagatgaccctctctgtccatcgattggtttgagtatgtgaacgtaggagacgtaggagcgagcattgagtcatcaccacgatttgagactgtagaaacagttccagcagctagggcacctgcctcggcactagccagttgaagtgatcccaagtcattggaccgagcatcttgttctcgcataatgggcgcgttcgaattcacagaggcccctccttttggcgattgtcttctgtgagtaaatccggccaacattggcgttcgagttcggagtcggcgaacaatcaagtaggctatgatgagagcggctatcaagaccaaggcactgaggacagaaacgaggacgatctggtttgaaacgacaataagaaggatctgcatcaaaaactcttccatcgaaatgtacagattcagtaaagatccactcaccgcccatttaggaatagctagaccactagagcttccttgtaggctccccccaagtccactgccggcaaggatacttgcgcttgagctggggtttgcttgagccaagctgagcaaactgctcacactgagtgttgatagactgcttacgcttgctcttgatacagaagacaacgttgttgatatggatgttgacgtgagtgtcgcaatagacgctacagagagagatgactgagaagcgatagaggcggtcgaggattgagacgccagagattgagaggctacggtgggtatggccgtttgacgtgcaatgaaagttgcctggtgcacctcggctccagtaagttgatctgaacgaatcaatgcacaatatcgccaagtattgagcacagaggataagcgaacagagcttgttgatcctgaagagaaaaggctgaagtgaagaagggagaagaaacctaccgccaccggggacaatcacaaaatatgcttgccaagaccgagtacccgtactgcttggcaggacgcttgcaccgtattgatcttcccaccaagcgtctgatggagaaaatgccagctggccttcctcatttgaaaggctggtccatgaacgaataagggtatccgatgaggcaagaaataaatatacatctactaggttggagcttgcgataaagagtggatagttaaaattccctgaagacatgcatacccgaacacactacgtcagcttcattccgcgaaaaagcagatctgacgaatggtcttgacatacatatcaacttggaccactcgttttgtattacgacagtggaatttgtagggaagcatgtcaactgatcgttccctacgtccgaacaatcaggatctgaggacaagagcaaacgaatatatagaatgagcgatgcgccaatttcaaggcgaaaaagaagcggaacgataaatacaaacatccagctgccacgggtccggtagatgttgctcttcctcctatttcatgctcgactgataaggcatgtacagatgagcgaccacgaaaaaaggtttcattcgatttgagttgtctgagcggtgggtcatgacgtctttgcttaagatcgaacggtagacttcttcctttttgatcggaagaggaagaagaagcggtcggatgccccctactggagagatgcatcggaaccgaggtagttgtcaagatgaacgaagaaacagcagaagtggcaggtgtagaaagaactgtctgatctcctgcagtctcaggctgaacagatattgaggtggatgatggaaaaccaacgacaacaggagctgctggtctgggtgacattcaggatgaggatgatgtaaaaacaagaagattttttgttttgttatttccacagtttgcacctctcatccactctcctttaccaccgtgttatctttgcttacgggctcattccttcgatcttccctaggtcatgtctctcaacaaactggtagagctactgatggtctcctcgatatctttggtccgagccctgccgtcagctcactactcagaaaacatgatggttccccgagcaacgtcggcctacgccgatgctgtctctggcggaggcagcatgcttaccgtgcgtctttccttctcattccctctagtagcgttatgttgcatgcatcgggttgtctagaatttttacctaatctgttgttgtgttgcaaacatcttgcccaatcagatcgttagtggaacgtatccggcggggttgggggaacctcttaatatcatcatttcgggtagttcagatacagacgttttagtagatgctctaacagacggtggctttcagaactacgctcagtttgtcgtctgtttcctctataatcgttctgttgggaaacacctgactaagatttggaatctgggtttctccttgctgtgtatacttacatcaggagcttgaatttcagcacgcaatgcctagacagctcgcttaccaactcgaccggccaacaggccaacctaggtgacggacagaacgtccgtacgtatcagttcttatttggtgtatgggcatcaaacacactatgggggtacaagaagatgactcatgatcttaacgccttgtttcccgccttgcagagactgagattgccacttttcgatataactatggggatacatttcttgggttagttcttatacttggtgtgcatcaaaactgtaatctttgctcatcagtctgtgcttttactctgtttatagagcatgcaaagaatctatcgtcggaggcaatcacttccgatactggaaacaagccaacacggacgcctactttcttgctgcctctgtagagatgaaccttacatgtaaggagacgactgcctccgctttctttgtgcgcatccgcgaagattgctttagaatgctaattatgtttgtttgtttcttctgataacatcgtttgtggaacagtgagacacgatattcagccaaatggttataaccttggccgagattggtttgttggtaatgcgtcgtcacacactgtggtggacacacactctctgaccaatgggtcatatttcgagggaacgagctcctcggatgggtgagtttattcagcactgtgaacaagaatcatctcctctcatccagttatcttggctggggtctgtcacaatcagatacacctatcgaacgaaggttaactacgtgtctggacttcttgcaaactcatctggtaagcaagaattacgtgagctttctcaagtctagtttttttcccacacatgaattcatgtgtacaccttgctgtgaatttggaaagactctataaaccatgccgataccgtttcggtcaatggtttacccgcaatcgacggcctcgtcgccgtcctgaccgtaacgattgatactcggccttctgggtccgatgcgaggtgtgtcccaggaatacattactctatcgtttttctttgtcgaatttttttttcagtacgcgcttaaagaaactgatgttatgtgagggtttattcgatgtttcattggggaatatctagtccgtcaagttcttcgactcagagcggcagcctccgtatgacgtctgtaccaaagatgctcggtacgctgaatggtctgactgctgggttgattgttggaatctactttgggttcacattctcctcttgatagaggaatagatcgccatctttgtcgatgtgctgattagatcatccggtcggatccgttcgaccatttttccattctttatcttctctccttctctccttctctctccgtacttgctgttgttggacaatatgttatctttctatccttaccttatgtcgctgtttatcgctgtatgtcttcctccgctcgttgtaatttctgtacgctcttttcacctgctgatttgatgtcttgtccaatgaatcgattgaattcaagaaatgacgacgatttctggatgatcgagtttctgatcgatcgaagaaattctaattttttcttctcttttattcagctcgagttgtttcagtccagtttcttcctcatcaacaacatccatattcgcacttgcactcacagacctgtaaatcgctactcgcaatatgaccgctcatgatatctcccagaatgatccagagcttttagcgatcgatgttaccaacatgaactttgcgtataaggaagagcaggtcttgaatgatatcacgatggagattcctcagggagaaaggtatgtcctccgagtttacgtttcatatcagtatgatagaatggctcattaaatgtctttgtggtttcatatgttccagagttcttgtcattggagccaacggaggtacgacgttaacttacaagcgtcattctatgccgaggctgatctctatccacttcatctctttcttccattgaatcagccggcaaatccactcttctcaagatccttgctggtaagagactaacccccggaacaaacgcccggatgctgggaaaagacgtctttagagcacctcccaagggaatcacatatctcggcacagaatgggcgctcaaccctgtcgtccgtggaggtatgtgccatctctcattcttacgcatagcgtcttgatttgagacgaaacactacaacatagagttttttttggtcgaactagatattgtggtggagaggttcttggattcagttggtgggtataggcacaaagagcggagagacaggttgctcaacatcttggatgtcgacctcgactggtccgtttcactttgtttatgtttcagggacattcattcacttgaataagagaggcggaaggattagacagtaagcttatcattacattctgttacataggcacatgcatcagatctcggatggagagcgaagacgagttcagcttgtgatgggtctcatggtttggcttcttatttcctactgccttccaccttctttgcattcataaaattccttaccgttatttctgtttttatttatttaaaaatacaggaaccctgggatatccttcttttggatgaggtacacgttcagcagtagtctaagttctggcgttttgtactaattcttttcctctatgatcaggtgactgttgatctggacgttcttgtcagaggagatcttatggatttcttgattcaagagagtaaagagcgcaaggctaccatcgtttgtgcgtctcttcgcctcttctcactcatccgtctcttgcgcttagaattgaaccgactccctgacttctgcaaaaattgctatcataccagactgcactcacatctttgatgggctagacattttccctactcaagtgattcatatgcaactcggttccatccctcaacagcctgtcgcttggcctcctgccagagacgattcttccatcgcgggtcaagacaagagagggtcggatctgttaagcgtcgctttgggttggttaaaagacgacagagcgctcaggagaaggttggaggtggaagctggaggtcccaaacgaggagccaggggcacaaccgatgtgggtctttcaatttttattccttgagccagtgcgcgttcatctgtcctcacaaagttattccttatattacagacaaaggatgccaagacgttctacgaacgatacgagtacaacgcccctgaagttcgatagaaaccctttagacttctggacggtgtctgaccttttctttccatccacatcgctctgatattacctttgattgtaccacttgactctttgcaagacgttcaacacgcatctgtacactttttctttcacattaccgcatcacaaccaacctgtttcgttctaggaatctatcatttttgctcactagacttccctcttagatcatcgcaagaatctttatatcgattatagctctttagatcaatggattttttcaacattttttgtcgatgggcacttgctttgaacagcatagaaaatcgatgtaagagacatttatatggtaacgattggaaacgacagcactagacagaagaaccagaagagaagcctcaagaatacaggtctaagagagaagtgaagggagcaaacaagcaagaaatcctttttgaagaatttttgatgaaagaaagaaaagacaagagaccattcatctaccttttctcctcctctttcttctcatcttcagctccagcccccgcttcaacagcaggtgccttctcatctacatcttcacgtaaatttgatgtttctacaggcagctgttctgggacgaacaacccatcgataaacgtgggcaagaacctctctgtcctttcgactgttgttgcccagaaatctttctggactgccgttctagtatcaggataagtcggttgaagcaatcgattcgaagagtggaggacaaggagcaggtttttgaaagattctggcacggcttcgtactacagaaaggaaagagtatatagatctgcatcagtagtgctaatcttcgacatatgatgtccatgagagtcgagatacgtacaacctgatctggtttttcggagttcataagtctatccaagcattccaggacctctaaccaaagttctttcaaggacttatctctaccctctgctccctccaactccttaaccttatcagcgtcatcgacctcactcaagaatactaagaacactctgcagattaaccccatcagcttcagcctactctcttccattccttgaggatcctgtaagaagacttgaggtttcaaaagctcgtcaagagtagggaacaagatggattggaaagcgagatgaatcgagggaaggtcgtggggtacagcaggggagccgggtagggcccgctggagatacgtgagggcacgcgttcgtagcggtcgagacgggtgagggacaaggtgggaaagagctttcagcggaggaagatagaattgtgtaacagctgatagttttgagaaaaaccacaaatgagtacaatttagcttaattttgtatatgcagaaagagagcaaaattacaacagaccttcttcgaaagaagacttagagttttcaattaagttcatgattggcttcttgagctcgaacagcgtgtccacagcgtgtaaagctcgttcgatagctggttcacttttttccgcgaaaagtgatacccgaacgtgtacaaagggtgagtgatttgcatactcagcatccaaaggaaaagtcaaggtcaacagagcaatatcacatactgaacgtcattttgaaggccccttcgtcctctttgagacttgatgcttactacacccgagtaatttgcgaactcgctcaggattccgacgatgcccgcaaagttatcagacgtcaatccaggtcctaactcgccagcaatgatcttatcgatcagtcctatagatgttttggaagcctcaggatgagagattgaacctctaactaaagcgagaattaatccccattcggtttgagaccttgacaaagctgtgtgtttaacatgtgatgtacctattattcttattgaatgtgcagttatcagacttacttgattaaactagcatcttgctccaaaatcttggcgacgccggccatcagttgctccgagacggagttaagaattggtcccgggagactacgcagcaagtcaagagagacataaagctgatcccgaagtgagggctagagatatatgatgaatcaggagtttagcccttagttatcagttgagtgaaaaggaagaattatgatatcacctcgatagagatcacgacgcataatcgaagcaatccaacaacggctcgttcaatcaacaatatactatattggctagcagaactcaaaagaacagaaatgtgctcgaatgcaatcggcctgcaaaaggaaaagatcgtcacccgaatttgtatcagtttattataacaacctttgtatatgatgtgcagaatggaatgaaaagacacaccaaacctcggccacatgagctcttgcctgacttgtcagactgacaagcatctccaacaaaaacaccgatgcaggatcgtatggcaaaggtacttctttctgggtttgagcaggggagtttcttcctgaggtacttccgtcccgggttgaattcattcgtgcgtgagacgacgcacgaagatgatagactcgaggagtcagccgtcgatcagctagatctttaatagctcgaagagcacaaagaagagactccacttcaagatgtcttttgcggaagagtagaaattcccaattcagtgctttttatcagcttataattcacacgggcacagctgaagtgcaatctaacgggtacgtacgtcagttggctgtacaattcctcaaatcgacatgatcctaaacagtcgattgttgataaggtggcctcaatctcgtcctctgtacaggttggtacgcccaggttgtcattactggatccatacgggcttagtaggtatgaagacagagtggataacaatccaacatccgaccgtcgttctcgagcttcgacaggaggagatacttgaagagggatcattgattgacctcctaggaaatcttccataagaagcatgggtgcaggcaagagagagtgaagaaatagcgtttggtacatctcgaagatctatgttaagttcacgaccgatgaatcaatatcaacaatacatttgaagttgattaaaagcaaagcaaaacaaaaatcagaatgcatcgagctcacctgagaccaaccctcacggatggaatctccatttccatttgcaattgtgaacaaaacaacagcggccaattgggctttaaagtttgtaccgaatcggacagaaagcgctgagacagtcagcgattggccttctacatcgatgaccgggttgttgatggacgattgagagagctctcgttcatccaacagtccagtagctgagaaaggttgaatcgcaaagctccatcagtgtgtatttgacattgtatttcttttcagagaaagaaggttgaacaggtgcctactctgagaaagagccatgacaacatgatcgaacatgtcgggcagatggaacgctccagcgatagttgcgcactcgcggaatccagtgatagccttttgaatgatataatcatcattgaacgtggtaaaccttgagcgaaaagaaacagaagggtgaagagcgcgtgagactcggcaacatttgtttcatggtacaaaaatggttgtcagatgatacttacgcataggcgatagcagaaactatctgcttggagaccagctggaacatggttcgatcaaaccgagcggtattgcaagacaggaggggacctgtagaaggagaagatcagtggatgagacctcaacaaagaagtacactctcgtcggtatgatcaaaaaaaatgaaagaacaaaccagctttgggggctcgagacaaaagttctttccatgcataatcgaatccaagctgccctgtgtgttcttctggcatgacaatctctcgcttcttgatcgaatcataaacctcgctctatcgtcatccacagaagggtgaggtgaagatacaacaagtagttcagaggggtttatccatcaaccacaaacaacatcaatgaagagagacacttactaggaacgagtcggagaaatcgaccccgtcgttaacacctctcaaatttcgcttatagtcatcaaacgccatccgttttcggacctgaggtgagaagagatcggtattcagcataatgatggagtaagcgagtacatagactgcatcttgcgacttgatctcagctgttttgaataattcatcacggacgaacagacagaccacacatagtcagatgtcaatgattaatgaattcaccctcgaacgatagaatatacagtcaacatcaacataccgggaccagaggcgaaatatatctcggcgaatgtttctgtgatccgattgatctgttgagactctcccggtaacctgaaagcttcgagcagatctcgcatagcctctgccacgagtttctataggttacataagagacacaaaaaagatagaatcataccagaagattagccgagagtgaattagctgatagtgtaacgatgacgacactttctcgatgtctcctatgagaactagaagaacgtatttgacgtacacctttaaagtcgaacatttctatgaacgccttcagtacctcgatgttctccggccgactgatatattctcccagaaccttcttatctaacctcggactactcttcaacaagctagcaattgcctggtttctcgaaagaccaggctcggtgattaacagaccgtgttcctctaaatatgtcaagccggtcttgggtttggtgttgaatcgagaggcaccgacgagaagaattcgtttgcgctccttcgtctctgccaggaattcaaaggaagggaaagtctgatctcgaggggttatgaaattaattcgcgtggtatcgatgataataaggcgttagaccagaacagagaggaaaagccacagaagaagatgggattgtcacactcacagccggccaagtctccccttgggattcgattctagcagccatactttgtactgccgaaagaagaatttgaagacagattgtttgggagtctgtctgagtatcgggtcctagacctggtgttgtggggtatactccctgtgtttggttgaataccaacaagaagattgtgaggaagaggatggaaattcaacaatcgacacaagaatatcatgagggaaagaactcactctagtcaagaatgcaacagttctttcaaataggtcctctctgtccatatcacaatcataatttatccaaaggtcgactaagaagctttctccttgtctgctcaattgagcgagcgcttccaacaggagtcccctcgtctcctcactaacggtcatgccaaagccagtacctgagggtttagaccccgtagatggtacatcccctgcgaccgatgatgccgatgatccaccggccgctcctggttgagatgatcccgtcaactgtgacggatggagagctgatggaggaggggctagtctatcgatcaagtagctgacgaatagttccaactgaggctttaaatgaacacgcatcgttccaaatagaatgccggtgacgcgcaaactgctagcgaaaagattggacgagtcgcccctggtcaattggaacagatacttgcatccttcgtccgagagcatcgatctcatctctggccaagaaccgacagttgaaccggcggtctcgagtgctgcaccaagaatagaaagtgcagcgagtcgcatcgaatcagtgtgttgtatgtcagccggatttaagagggtgatgagaacacgaatgagttctgtcggcgtggcagagccgtagggaacaaacgggccggttgaagcgggctcgatgggaagtggttcagctgctacctcctgagttgtcaactgatcgactggagtcaacccaacagggtcaatgattggtggtccgtcagtcactggagcgtctgaagacccgttctcctggactgctgccgcttgcggtctctttatcgattcagaaagagaggcgggtccggccgctgaaacagggatcgtcttcaagtaggtaaagacggtttttaccatcgactggacggtcgcttctgctgtgcgccgtagaagttctgtcaacgagaagcaatcgtaacgacaatggttccgcaaatgatatcagatttagtttatcaattccacgcgagctcaatacttagaccgattggtgaaatcgttggaaagaaaggagaccacactcaccagaaagtctcatttgacaacataagcctagtccggtttcgagcatttcacagacctctttgtctcctaaagcgataaagtctcgagatcctccccatttatcgactagcaggccgataacactaagaattttaagcatgacaacctcgtccccctgagaatcggaagcctcaaacttgcagtgagtcacggcatgggagacgtcagagagcgcaaatggaaggtcgtcaggtagagagggtccagaggtagggaacagcgagaggatggatagcagagaggtcagggcatgggaagttattggtcctgtcgtcaatggtgatcggataagagccaagaaaggtgcgaccaaggcgggaagcggagggagatctgtcgaaaccggcaacgaaagaaacggtcgattagctatgtttccgagttcagtacataaatgctaagatagttctcctcggtgtcatgtacgtctatctgtataagggaacagaatgtcgttgtgaagaatattgatataggaagctcggaacaaataacaaacctttcgggttctccaacactgtccttctcagttcgacaaagccagccatgagttcttcttccccttcaaatcctgtctcacccctgtcttctccgataacaggtcgttttgtcctaagatcgcttcgtccgaatgatcggccggagcccgagtaggacgaggcacgggcccaccttgagttctttctcatagctagtttgttgagtcataccgttgtccaacaagagaacatagcagggaaacaaacgattcaacattagttctaaatctttgatattatgagaggtatctgctattagaaagaacaatcgaacccgaggtgacattggtgatgttcgatatgacgagatgggtcggagagagatccatcttgcgaataagtataaaacctcctactgggctgtgacgaggatgagtgaaactttatgactatatagggtctgtataaagagacccaaggagtgaggaggagagatagaaaggaaagaaggtgaggagagaccgagaggaagatggaaacgagagggaattgacgatggaaagtgaaacgctgtaagatgttgaaccagcgggaggacgtccgttgatgtgtttgaagtcagttttcgaatagagcgactacaaactcatgtactccatgtttttggtgggtattttactgacacaatctttacatggtgcatatttttctcaatacttgatcaacacacatgaaactcaaatacagatgaccgttcagtcacagtcgaggtgactacatattgaccattgtctgaacaagccttggtgataggtaagactatgaaggacaacatggtcgtttcgtctaataggaaaagggtgaaagcctgatatagagaacaagagaaacaaacatttgtctcgtcaaggaacgaggtattgcttgcttcatgtagcatgggtcgacttctcctctcttcctgatgattgaagtatagctaggaagaagaaagattaggtaacctaagaacgaagtaaaagatgagactagaatggctatagaggaagactgaacagactacgaaatcaggttacatcatcaaacctctcccgcgaggaaagaagaacaggaaacacttaagaatgtttgtccaacttgccagctcatccggatccatcatcgctcctctttgtttgagctcatctattttctcctttttctctcgacctcacctctccgttctctcttttctcactctgtttttgtattgacccattttaatcagaaaagagccatgctcatatcaccaacatatctcattctcaatctatccttaaccgctctcgcttcggcttcatccttctctaccgcctctaccccttattcgaacccactcgcaggagtggattccaaaccacgatcaggcgtagtcaagaacgtcctagagactaagccagatgtcaaagggtactgcagtgtgagtttgcaaattaggttgatctcaccgctctccaggttcattctctatagaccatcgaagctgacgaagcacatgttcatgcagccatcgggtcgaatagaaaataccttgtgcgagtacgagacgctcgaagcggttaactcggaactctatccatggctgcatcgtttggtccagacccctttcttcaaatactacaaggtacgcctcggacctgtatagattgctttagtgttgcgtacacaccattgactgacgagttggcccccctttttgaaaatcatatttatggtctcgatcatagatcgacttatacaaggagtgcccattctggtacgagaacgttttctgcatgaacagagactgcagtgtagagactgctaacgaagtgagtcataaaggaggctatgtcgttcttcttgattgcatgcacatcagcgctcatctccattacttttatgaatttttccgctatcttagtcagacattccagagaaatggagggtagcagcattgagctctatcactcattccagtgaatctgcctctcacgttagtccgatcatgttcttttgctctatcaaacatctcgaggatgaacccacaaccaacattccaaggctttcttctgaatcggctcaatcagagaggagaggaaccaggatcttgtcattaccgagaccaggatttctgccagatagacgacgaatctcaaaacggtgaataaagaagccttctgttatcatccttgatgcttttcactgtacgcgcgcacgccctgacttgatcttgcttaatatacttctggtttctctatactagagggccagtttgttgacctgacactcaaccctgagcggtttactggatacgctggtctctcagctgctaaagtttggacagcaatctaccaagagaactgtttcggtctctctgagctctctagcacattactatcgcaaagctccactagcggcactctgtcttcaaagccaagtctcggattgggtggcctgagtgaaggtgttggaacggagatgagatctggtacggggtcggaggaagaggaatgcatagagaagagagtatactatcggattatttctggtgagttttcttacactgtcaaaaagccctctctgtctatcttgagcacacaggtagcttaattgaatgagagccggctcctgaatacaaacaaacctaggtcttcatgcttcgatttccacccatatctgtcacgaattccttgatcaagaaactggtctctggcatccaaacctctcgtgtttcatcaatcgaattgcctctcacccagaacgtcttcaaaacatgtacttcaacatgatcctcattcttcgagctgtttctcgagcgggaaagtatctcgaggcttacgatgtatgcactgggatctcttttcccgagggactcgtgccgttggaaggtgcggccaagtgtcggccggaagagactgtacaagaggagaaatatggagatgcctggacaaagattggcttgagcaaggtcgtcgagctcagtagaggtggtggaaatggagaaggtagacaagaggtatttgatgaaggcgagcttttccagggaggagatgccagagtccgttttttctcttccttgaaagtctgaggaacatcctgcgctaactacttgcgcatgtttatggacaagtgtagattctgaaggaagaattcaaagagcgtttccgaaacgtttcgagaatcatggattgcgttggatgtgataaatgtagactatggggtaaacttcaagtcgccggtgtaggaacggctttgaagatccttttcgagttggacgaatcttcattagagcaagtcttccagtactgaacctcgctttcaagtttctctctctgttctgctgacctcgaatcctactttttctttactttgtttcgaaataacagtccggctgtcaatccgaacttgctatctaggtcagagatcgtagcgttgatgaatacgttacatcgatttagcgagtcccttcaagcggtggagacattccgtcagatgtatgcaaaggaaaaggaaactgctgtcgagaagagttcaaaattcaaagaagagagcagtaattcggtgcgtcgttttctgatttttgtctggccttcacaggattgatatcaacttcaattgcccaaatccttttcgcgattcagttgacaaatcaatcgaatttaccccgctacccaatccccacatcatctttctcaacactattggccactcttcgccaacgcatctttgcgggtatcgaggtgatctctcgacatcttcaatcatggctagagttgttgagaaggacgagcgtgggaagactgggcagattgacggcattctgggaaaaacttagaggggagctctgaaccaacttattttcaatatagattgatgaatattcttcctttcgtatgattcgcatgcatttagtgatgccttgataaaaaattgttctcagacgggttgttaagttgccttttgaagataaattttatgtttttttttttttggctatctctcgaaatctctcctattggcatattctctagcaaagatgggagcagaaaatcacgccggctttgaccgtcagaaattcgatttttgattgtgacccatcaacaacaccatcacagttgtgattgcaagtcataaccgacagatgccccctacctctcccatcccactgttcatcaatcgaacccactcttcacagataaacgctctctctttttctcctagatataaccgatttctgtattccggcgacgcagatggctgggttacaatcatgaacaccaggtctagacggacgatcgtcagttggaaagctcatgaggatggtatccttggactagaagaatgggttgaagcgagttgtctactgacgtttgttccgcttcctgatctacttcttcggcctctacttgatccttcagaagaaagacaagccagtgctgaacttggttctttccgatatcttgtctccaggtcaggaagggacaataaattgaacctgtttgagcttccggaaacgcttcctattctcgggaatgcctcgtcaacctcatcc

SEQ ID NO: 2978 - DNA, 19721 bp, Xanthophyllomyces dendrorhous
tctaagagctctccacctaagttattgtacactatggatatcaacgccttaaactactgccggttttcattactggatattgaagcggaagatgagagtatgaaagggaaagcaagggagaagagagaagcttgggttgcggtgcctaatttgactaattcagaaacggttcgtcttttttcgttttgagtccttcttcttatctcattctgagaggatccttctttgcgagctctttcatgttgctttgttttgggttggtcaactttcagatagatattttccatttaccatctcaaacaagaccacatgctgctataggcttcgtttcgtctgatcctgatacgtctctgggtcgaggagcgcttgatcctgacaaaacaggtgttgttttacttcttgtctcgctttacataaactaatttagatcaacggattctcacagtttgttcttctttatgttgatctttttgcaaatcaccacaggactcgttatgttcgttcatttgttaacacctacaactatactggtcggtacagaatcaggccacgtcttatttttcgagtatgaaggtagggctggagatgtaacggatgccagacttgatgcgcatgccgtcaaatcaagttctttgggaagaaaggaaaagagcagatgggtgcgtaggtggaaggagaaaatacacagagaggccggtcagtggcatctcgtcagcttgagattctctatcgtctgagctgacatcaggttaggaacatgacagtgatgggtttggcagtgtctccttcaaaagacttcgcgttgtccgtatccgcagatcatcaggtcgttaagtattacctagacgttcgtattcatatttcatcccttcctgtaagaacgacatatgttgctattaaggattggacatctcaaatctgtgtatgtatctactcacgatagccctactgcccagagggttcatcgaggttcgagattttcaagattaatcagctcggaaattcctcaattcatatcaacggtacaggcagggtatgcgctgttgctggctgggacggaaagtaagttctcgccctcctctgttctcagaacatcataacgattgcttcaaacgacagcttgtagtccattgttgttcatttttttcttgttctttttttcttgcgtacatagcgtccgactgttttccacgaagtcattcaaatcgctaggcacgctatcatatcacagagacacttgccatatcctctctttcgcccataggtcgtcaattcctacgaatttcaacgcaactggagtacatgcgaatcttgagatagattcaggaactgaaaatggttcctcggacgaagaggaggacactgatgagtccaatgaagggggaatgagaaaaatgaacaggcaggctcttagtagagaccactggttagccaccggtggtgtcgacaaaagggtggctgtttgggagctcatggactttgagaagcgttctgtcaacaagaaatccacgagatagatgaatcttaaaggcattatgatggaaaaaggttagcgcaggagatgcatcagaaggtgccggttggttgattacagaacggaataaaagatgcttgtagtctgagatttgcacagccttgcttctgacgagatgcttaaatggcttgtggcgtctggcggctccccactcttctgggtgtctcttgctttgttactttccatcatctcccaccatcaacagttgactatatttgacgaggatccccctttcttgaaagagatgataggcttatctgtctacgagatcgttctcgccttttgtatgtatcaatctgttctgcctgatgttgctatgttagcctcgtttattcaaggcaaagacgaacttattttgatatgaatgatacctacgtaacgtaacccaatatccctcagggtgattcgttgttgacctcttctttagagagatcaagcctcgaggagcttacaacatccctcgagaagggccagtcttgttcgttgttgcgcctcacaataaccaggtgagctcttccaggtgataataaactcaatgtgaaggattttggcttatggtgtttccggtctatgtttttttgtcgatgtaatgcttctcagtttttggatcccattttagtcttctcggaaatttatagagagacaaggcggaaagtcggtactttgatcgctgccaaggtttgttccggttctcataagacagtctttaaattatatagtccaaatatgacgggttgagtgatggaaggcgtgaggtcgattatatgtccaatacttacctctttgcttgcttcctttggcgtgggtttatgcgatgggaacatagagtttagatagagccatcatcggtcaagctgcacgagcaatggatagtagttcgttcttacctctataatttttctccttactttgtatcgatcactaagcttcttttcaacttcacgcgcctctatacaattccagtccctgttgctcgagcgtccgattatgcttatgctggttcaggaaagatcagcctttcatctaccgaccctctcctcatccttggcgaaggtactaaattcatcaccgacatcaaaccgaaatcgactcttgccctaagcaaatccctcggaagtgcatctgccgagattgaggaagtcatctctgataccgaagtcaggctcaagcgagagttttctattcctgcaaaggagggtggcgctggcttgagggccacagaaagagttaggaaagaaggagagaacggtccactgagttacaaggtattgcctcatgtggaccaacatggcatgtacggagcggtctataaacggctgaaggagggaaaggcgatctgtatcttcccagaaggtgtgtgttgggtcttaacaacctaaatgaggaggtatgcgcatgttttcgagtactaaaacacatttctctttccttcctgaatcggatcataccaggtggttctcacgatcgaacagatctcttacctttgaaggctggtgtgacattgatgactcttggcgcgatggccgctgatcctactgtcaaagtcaagatcgttccagttgggttgtcttattttcatgcgcacaagttccgatctcgtgcagtcatcgagtttggtactccaatggatgtcccgcctgaacttgttttggagtttggaaaaggaggaaaggaaaagagagaagcgtgcggcaagctattagaaatgatttatgatggattaaagacagtgacgctccgagcacctgattgggaaactctcatggttcgtgttcttcctccctcttaaactcctgacactgtcgttttccttataccgatgtcgacgttgatctgtatacaatacacctctaggtcatccaagccgcccgacgactctacaaaacgcctggtcaaaacctgaccttgggtcgtattgtcgagcttaataaacgttttgttgaaggctatatgcattatgaacacgagccccgtgttcaggcgctccgaacacatattatccagtacaaccgacttcttcgagatttagggcttagagatcatcaagtcgagagagcgacgagagctggtttgagatctttggggctgttggcttatcgggtggggctattgggagcgtggagtgttttggcgctgccgggagtgatcctccatgcgcccatcttcttaacagcgaagtacatcagtcaccaaaaggcaaaaggtaactttgaaacccctccgattcgagctctagaaaatcatagtaattgactcttgcttaaccttctaccaaaaacgatgaactacgttctattagtggctctggctgaatcgaccgtcaaattagcgggccgagacgtcctcgctacgtggaaagtaattgtttcactcgtcctgactcctatcacttacgctttctgggccgctctagcgacgtatttggcttataggcgggatgcaccatcgcgatgggtttggtggatgcctgtttgggtcgtgcttggtctcccctttactggaatgagttcgttgaagttcggagaggccgccatggacgtcatgaagtcagtctgaatttgactttcctttgaatgttctttactgcgtgactgcaattaaccttcagaggatcaggactaatgtgaactgactcgctgtctcttttcctgatgttggaatggattaggtctctgcgtccactggtgatcaatttgattccaggaaacgatgttgtcatcagaaaaactcgagatatgagggttgctcttactgaagagcttactgaggttatcaacgtacgattttctcttacattcgtcaaagaccacaaatcagtgaatgtatgttaaccaaggtaaagactgcatttctcataaaatagcactttggtcctttaatgtacgaagacttcgatgaaggtcgaattcaacctgcagcgaccgttcagcccgtttcggctgatcgaagtcgatcaagtactgcgcaaaacatcttctctcacgtatgtatgtttgtctcatctagtcatcgtagagtggatctgaaagtgggctctatatcctctatattctcgaatcactacagcccatgagttggatcgacgagaaactttttggttggtctgccgcttcttccgctgaagaccgagctgcccgtcaacgaagacgatcgaagagtcaaggaagctcccgagcggaaagtagagtcgaaagtacgcaaggaagtgatgtggagaaagagactgtcgagcaagacgatggtgatgctgattacgaccaggtgagtagaccttactatcatcactttttgtggttcgtttatctctgataccttttccttacaaatctcaacgattttggaacacaattatgaacgagaaggtgattggaattctccatcatcatgcctcgtccttcaacaatactgccgcgccaaggtcttcatttaatgctgggctcgaatcatctgatcaacctagtcagatccgagctaggcgaaacggacagacttacgccgaattacaaagtgcaaagaaggcagctgcagctgctgttgctgctagcggcgtggaaacgaagtcgaaacaagaattgaaggaggatgcatagagagtgaaaatgaagggtaccagatgataatgctggggaagtgggagtaagacggtgtacatatctttccctggtctttgattggtgcttcttctctctctctcctttgaactccgcatctggtcgtctaaatcttaaatatctaatgtttattgttttaaaatgtgcgtttttttcatataatcaacctggtttggtagaaagaacgatcagataatcgaagccgcaaaaacaaactctcaaagctaggagaaagaatgaggaccattggttcacacaagagaggatcagtccttctcctcttcttcctcgccatcatcctcagctccacctctacgattccttcgtttccgagcttcacgatgccttctcttgtactctctcgtcagttcgagatgctcggtctcccatctttgttgggcttgctctctgaattgatgatggacgaacagccaaatcaacgtggatcaataaaccggctgcaatcaaaagtgtcaaatgaacaaaagaaagaaaagatagcagtgaaagaacgaactcggtatccaccctccagaacccgggaacaggtcttggtttcccactctctacttccaagacgctctttgcctgaacttttggtccttttgctctttctgtctgttcgagatgaaggaacgggaaaaagtaggggacctcggtgtctggtctaaaagacgcggttgaaggtgcatggcttgaggtttgattgttgacaaaagtcgccaatcgatgatggctagtggacaaggaaggggcaagaggagcgggtgttggtaatgaagcggtcagagtgggatcctcagcttccgcatcaatgtcaagatccaaacctagagagaaagatgtagctgtagaaagcaaaaaaaaaacaaaaaaaaacaaagagtatcagtcaatcgcaaaactcttatctagctgcctttctaagagtcttgaaatgaagaacaagagatatgatgaaaggaggagggacttactctcctcagcagaaggagcaaacaagcccttcaactgattcaccttgactttgacttttctctcttcttcatcttccatatcaacatcatcacctgctcctccccgcagtctcatcacaccttcgccttgtaccacttgttctcctggttcttctaaatcatcccagcctctgagctctctcatggccaactcaattgggtccaactcctcctcctccccctcttcttcttcctcctctctaatgtcatcctcagatgacgaagatccgacaaaagagacattcttctcgatcttgtcactttcttttcctctaggtaatgtaggaagtgggatcgtgtcctggttagagaccggattggcattatgtttgaactgtttgttaaccggaggaacaataatattgctttgctcctcttcagtatcgtcctcatcatcatcgtcatcatcccaaggaaggatgaccttcttcggcactaaaccggtatcttcctcaccatccgactcaaaggacagtgttcctcctccactcgtactctcttgacccttctgcttgatatctatgtcttcgtcttcgtcgttgaacgaaaacccgagagaggaaagaacgttgagtccttgtttcttctcctgagcgatctggtggtatagaggatctgccttgtcgatcatgagtggaagtccaacaggctgcttggggttggatccggaattagtatcaggagtagatttggaagccggcgcagaagtaggaggggaaaccacaacaggtttggaagtcgagatggttggatgagtaaggttggatggttttccatcggcatcgtcgacgatgtcctcatcgtcagatggttgactattgtcagacatcaaagattccatagtaggttcgggcgaaaacgaatctcgaaggagagatcccttctgttcgtgtatatccgcatcttctcctagtgggatccaatcatcttcttcttcgtcttcgtcatcatctccgccctgtccttcaccgttggaaagatcttcatagacttgagcgggtttgatagactgagacggtgtgatagaatcccacctagaaggctctcttccatccggtcctgattcatccaagatcatactcaacaccaacctcaaccgctcctgtctgcccactaccaccttctcctcgtgatcttgattctgatcatggcctatgttgatccacctgacaacaccgtcctcgccttcgatctcctcacatacccactgggaacgtttgtcgaaacattcatctagctcgggatcgcctagcatatgttcacctaagtgggttctattgtatcgtctaggatcaatgactacggttcgcgcgcgtttcggaggatcagctgactttctgccagaactcgattttcgtttgagcggcgtcgtgcttgacgtagggagttgatcagatggaaggtcggatgaaggtcgaggtagagtaggtcgagggatgggatgggatggtttaagaacgacaggatgaatcaagtgtccgaggggagtgatatgccaatgctgttttttaatcccgttttttatgcaatcacatcagctactctttctgccctacaatcaagagaatcaaggaaagaacaggcaagaaacgctgaaagaaagcgaaaaagatgatgattagagacgaactttcttaatctttgctttttcaacatcaaccacttccatatccttcctttctatcccctgaacgcctctcgatagttttattggcacaatccctcctttttcctttctcgcctttctccttttcctttccttctccttctttttctctctctctttatctgtcagtccatcggtcaagccttggatgacagcacgctcggtattcattctagagacatatgactgcttggcttcttgaattcgaagaaccatccccttccaggtcgagccggtgagaatggaagtaactctttgtagttgaccggatgttatacttaagttcatatagacgaaagatcgtggaaatcctgtatttccgtccgttcgttcgttcgttcgttgatgtattcagttttaaatgtattttttctggtgagcaagttgaatattaataaaaacaaccccctaatgaaagcatacgaaccattcccatcggtcccaacaccttccaacccatgtacgacaccaaatgaagagaatctattggtaagatcctgatgggtcaatgaggggtttgtcaggcctgcgatatgaagtctcctgacactcggtgtttccttctctgttgatgacatccttttctgcgttctgctcttttgctttctatctcgattttcttgctcctgaatcgttcagaaacggtgtgcgtcgtgtagttgcaagaaagaaggaagaggtagagcggaagggtggatgagagaaagagtaagggttgaaaggaatcgaaatttgaggtaactctcttaacacgtgaaacgcggccaaatttcttttctgcattacatggctagactattctcaaagattttcaggcaaatctgtttttttcctttgcattctttatgattcagatttacaaccacatcgtcatatgttgtttcatgcgaagcgtgtcccaagaggaaaagaaacggtgtgatgagtgagggtgggaacgatagatgtgaggagttcatcaaagagaaagagaaagcgtgacataagagcaaaaaagaacagtcgatcatagggggagtgtttttgtgaaaagaaaaccttctcaggaaaaaaaagacaacaaagagaccgagaaggaaagaataagggacagtgcttctaacgtaaacgagaggctttttacaaatggatctaaactaaggacaaagaaaaaagaaaaagacgagcagagaaggtcaaagtgtactccctcggagtttacttctcctgatcaggtcggagctgtcggacggtctttccggcgatccagatctcctggttgttgatgacgtcgagctccttctggagatcctctcggtaagtctttcggccgttgaactcgagcgatcgtcgggtctccgatccgtccttaacggcggcgtagaggtccttgaacacgggcttgttagcctcgtagaacttgggggcccagtcgagagctcctcgtcgggcggtggtggagcaggcctgagagaagcgtaggcagatgagatgagtctattgaagaggaagagaaggatgaaaactaaagacgctagagaaaagatagctcacgttgtacatgtagtccataccgtacttgccgatcaacgggaacaaggactgggtagcctcctcgacggtctcgttgaaagcctcagagggggtgtgtccgttctctcggaggacctcgtactgggcaaggaacattccctggatacctcccataaggacacctcgctctccgtaaagatcagagatgacctctcgctcgaaggtggtctcgtaaaggtaaccagatccgacggcaataccgatggcgacggccttctccttggccttaccggtgacgtctgtggattagagaatgaaacaagggcagcatagtcaggtcattgaaagcttaatagaaagagagggaggcacacgtaccctggaagacggcaacggaggagttgattcctcgaccctccttgaaaagggttcggacggttcggccagatcccttaggggcaacaaggatgacatcgacgtcggtggggggaacaacgtgggtctaaaggtgaaaggaagaaattagctgctattccgaaagatcatagattgagagctggagtacgcaaagagactcacatcatccttgtagacgacggagaaaccgtgggagaagtagagagtctttcccttggtaatgaggggagcaatctggggccaggtctgggactgggcagcgtcagaaaggaggttcatgatgacggttcctcggttgatagcctcctcaatggagaaaaggttctctccagggacccagccgtcctcctgagcctgcttccaactgtgttgtcgagcgggaaagcacaaagggcgaggcgagggaggttaggatttaagctcatttttattttattttaggatgaagattgatctagccacgtacgattctccgttctctcggacaccgacaatgacgttgataccgttatctcgggcgttcaatccctgcccgtgaccctgggatccgtaaccgatgagggcgagggtatcatccttgaggtacctatcaaattgagataatgcagaagaaagtggggaaaggtcagaattcaagctccccaaaggaaaaaaattcggccgcggtttgggaaagaaaaaaaaggcaagagaaaaaaaacgtactcctggagcttgggcaaaggccaatcggctcgctcgtaaacggtctccttagttccagcaaagtcaagggtcttgactcctcgctgatgtgtggtcgatagagatgacagataaagacgtccaggaatgggtaaggaaggggaagaaaacaggagaaaaaaaagtaagctccacgagaaactaggctgaaatctcctgctatttccttcggcttgacctcccaacctcctagcaacctctcctgctaccccacagtgaaactccgggcgtctagagacatcctcgaatgattctggaggtagcgattgcaagaaagaaagaaagaaagaaagaatagaaaggaggaatagaaaggaggaacgaacggtcatggtaggagcagcggcggcggcgtttcggatggcaggtctggtaccagcgagaacggtggagaatcctcggatggcaggagcaggcctgacggcggcggcaagagcctttcgggcgatagatctggggatggccattgtgatcaagatgattaagatactttgttaggaaagatgtgagtgcgtttgggagtgatggaagaaaagaggaagaaaggaaaaaaattggaaaatggcctaataagcctcgcgctacaggccgagtcacccatatttttttttctttcctccttcgggcgttaccttttgccttctgcttcggccgaaagagacgattaattcttccatcgtatgttgggataaagaatgtgcttgttggtcatagatatggctgtcgcaatagatataacacacacgtaggatacacaatgttctatctgcagagcgttgaggcaagacagagaatgaatgagtatacgatgaacgttttttatttatttaaattcacctttcccacccgaaatcgttagtcgtctgaacgccagtgcaaggagaacgagaaggtccatccgatataaagtaaagaactactagacacacacacacaccgaaacagagatggaacaaacaagaaaggaagaacggagaagggagagatgagagatggacattggtcgagagaacttctttcgttagaaaggaggaccgggaataaactgccaacacacacaggcacacacacatacagaaagctacacgagtgaagaagaaagggaagagaatcaaacaaacagaaaccctcgaatctctatccccgctcgacattgcccgtcttcaactctggcgaactggcgacctttgggtttccaacgctgctcactccatcggttgagagtgtagactgtgtcggcctaccggcaaacgacaacccagagggcgtgatcgtgttgctcgacgtcggctccgactcatcctcccgctcggacgccgagccaggtgagttgacgatttctgggtggctcagtcctttcccatgtccaccttcttttggctcattcgaaccggtcgatgacgaaacctgctctccctcctctttctcctcctcctcctcctcctcttcttcctcctcatcatcctcctcatccgccgctctgccacccagaactaggccgccggatggagagaacgagatgccgctgcctttgagaacctcctgaagactcattccacccaacacccggttgccggcctggccaaccatctgctgcagtgacgcagaagccgcgttcgggtttgtcccactcgacggcgtcgacgctcccgggtgtcgatcgaccggagcagtgttgaacacatgggggacagagagcggggtatcatgtccgaccttgttgttcacccggctagttatccattctctccactcggcttccgaccggtcacccagaatggccacaatgcagaccgtcatgttatcgcacccgatcccgccgatttctgaactcggggcaagacacttctccatcatatcctcacaaatcttgacgagtgaatctccattagcaatagcccgtcgggtaaagtcaacaacctgctgagaggtcaggcaatcccaaattcctataaatcgagggaagtaagcacgaagagatcgatcagcaaccacagaacgagctagctcacagagcaaacgcataatataaggagtggcctcaaagacgaaccatcacaagcaaccacaaggaactcttcctcgccggtccaggcgtgggagatgatatctggatcgacggtaacaacctggtgttcggcgtccaatgaatggttctgcttgaattcaaaatcccccacggctcgagacaacgcaaggttcccattcactcggttgtagtcgacaaatcctccagcagcgacgattcgcgcggtctctttctcatttgtaggcttgtgatcatggcttagcggctcctcctttccaccaaccgagaggacagaccgtgagtctccggcgttcgcctaatgataggtaggatcgggccgcagaagaacaatgtcagaaaggtgtactttccgagttcttggggtaagcttgtgagaggaaaagaaagaaaatccacttacacagataaatctattatcgggtgtaatcaacacggcaacggccgtgcagcctgaagggtcgttcacaaactttggatctgatgattgagcatatggaagagatgaaaaatcggtttatcagcatgttgattgtttgcagcatgtggatgagtttccttgtccccacaacattctagacgagataaattgaagaagacgaaccggctcgaagggcgtcatctgtgcccaggaaagccttcttgaaggcgacctcgtaattcccctctgcatattcgggcaactcgctcagtcgagtgtgtaaagtggagccggtatattttgccacggtcgaaccaccgtgtccgtcatagacggcgaaaaaggcggggtgtttagcatctgtagaagacgacgacgaggggggcggaagggaaaggatggtggcgtgggcatcctccatggctgtttgaatagagccgtcgagtttagaaagagaaatagagcaaagagagaaaggatctagatgagcaacgatccattgggagagcaggcaggcagatgaaggccgaggaaggagaaagggaaggaagaattatgagcgaggtgaaaagggattttttttgttgttgtttattcatcgacggtttgaaacgtatcggctgagccgagtcgcccgagctagattcgtaggcgatactggatgctacctcaactccaagattgagggaaagcgatggattgttggctgacgcgacacgaacacaaccgatcaagtatataaactcccatgactggaatgaaaaggggccaaggcgatggttctctctctatcttccgcatcctggccagttgtataggtgtgaaaacaccgacgagggaagaaggagaggagggaagacgccaggaacgtacatatacgccagccttgcatctcactgatagcataagcaaatcggttggacgaccccttgtcggtatgtttttcgacgactgaaacaagagatacaaagaaggaagaagaaatacgaaggaaggggagccagtgaagtatagacacgataattggatgaagcagggttaaacaaattcaaccgaatcagtgaaccattaactatgactacgtggaggaagaagaggggagaaaagatagggggaaaaggaagaaaaaaaaaagaaaaaggaagaacaagaacgggacgaacctggctctgaaagagtttgaccctgtagtgaccgagaggagaaaatattcgaacataagcgagcgatacaggtgtatgattccaaaggcaagacgacaagaggaaagggtgaacgaagaggaaacacaagaggtcaggatcagatgcacgtgagcgagtgatactatcgatccatctttccttcaaacgcccgtcgattggtaacagagagtagataaagaaacgagacagttctcaccataatgtatgtatgcgtgtgtatgtgtacgtgtgagtgagtgtaggcgattctaaaaaagaaggaattctaaaagagagacgagatggagaagaaagggaaagagaaaaaagacgagatgaaagtttcgactgttcatggcacaggtggagaaggagacgatcattacaaaagctgtaatcgcgttattagacagagttgtagtctgtgcttttgggcatgatactacatatcctcatagttgtcctactacggaagattgtatatgtctctgaatttgctccatattagagaacatttgaagtatgcattacgaaaccgccgcctatttctataatcaaaaacataaatcgcaaattatccctagtatttatcacggaacttgtacgattgtctaatacaaatttcacccttcggctacgtcatcagttctaattcctttccagagtcactgctctctctcttatccttctctgttcatatctatcactcaatcatcgtacactcgttctactgcatttctctcttctatcatcgtccatgccctttcaaaagacattccagctcgctcgaaaggcaaagggagctcatttagtaacggatgaagtcgttcgagcactcggagatggtctcaaagacgttaaggttagtgttgctagtcttcgtccaaccctccctctggttcgtatagtcattcaccgtttcttcaccttttgtatcttcttctcctccttttttttcctcactctctgcagattggaatgttgttcttattcatgtaagataccccgtctcttgtttggctgatgaccggtccgtctctgtctgacttttctctcgtgtctcttcacttttattcagtaagcacacctcggcaggactcacccgtttgtctatatcttgcattcatctgtctatgttgcttgacaacatcgaactcattctttatgattgtttctcctagttaacgagaactatgacccagatgttcggtcggacatgacgatggcgctcgataagctcgtcccagaatctttaccttggcaacgttcgtctctggtgctcttctctcttcgccatacaatttcctcgattcaggaggagaaagactagacctgtttgagacctgacggagcattgacttatctaattcagatgttgacgagggaccggacgattcggttagtcatacaaagaccacgctcgtgggtaacacgatctccatccctgttagtttttttctttccttaccttaactcgctgtttgtgtcttccctgtctcgtgaggattctattgttgagacagaccacctgctttacagatctcgaacgggaaacttcaactaggaacatggcaaggaatttatctgatggaattcagacatctctcccatgtccgaactgtagtcgctactgtattgtgagcttcttcgttatcgcgcaagatctcttgctcctgtatcgctctttctttctttttccttatatcactcttcttgcggctttccgacgcgccatcgtctttcgtcatctctcacaggggtgaatagaacagtcttctcttcttcaaattaaagagcaagacaatagacatgatttcgtatctatcaatcgttaattccatctgaagtgcaagtcaagaggatgatgaggagaatgagagaaatcgttcaagaaaaaggaggagggacagagaaaccatgaaagattgcgctacttgaccggatggtattatattcggtggtcttgcctcctgcttccaactcgcgccgtttctccatccttctcgtcgtcatcgtcgtcatcgtcgtcgtcgtcgtcgtcgtcgtcgtcgtcgtctttgaaggttgactggacaggttgataccctctttgtctcttcaaaccttccatctccatcgcctcatcctcttcaatctgttcccctgggtgagtgtgtctcccgttcatgactcccctctcaacagattcagaatcagaatcgaagatcacttcggaattagatgaagagttgagtgaagaagatgatgaagcagaaagaaacggtccgccgaacgtatgggatagatagacgttgatgagcgaggtaatcactaaatagatcacgaatgatagtgagaagatcactaaatacatacacatgtatatgagagaaacatttaaagagttagttttcattgggagtcgtgagaaaatcaaagtaaagaacacttgagaaggagcaacgaacagagcatgtatgtaacagcgtcgacattttgagagtcaatcaacttgagttcttcgtccgttgcgcttaaaaagacacatctgtttgtttcgttttcgtatggttttggtgtcatgaaatttagttgggtgtctcgctggaagtctcagaagagacaagagaagaaaatggcgcaccctatgagaacaaggagatatggctgcattccatcgtgagaaaaatacggctgtcaatctccaatttcgatcggcaaagaaagagaaggacagagacaaacgtatagatgttgccagcccctgacaccccgtccgccaggtccttctccactcgctctgtctttcaacacgaaacagatctctacaatcctgacgacacctgccgctcccagggaaaggccgagcacctggtgtaccatcgtggctgtcatcgtccgttggacgtggcccgaaaaggcatagccagtcatgatgaaccttgatattcgattttgtatttacacaatattcagagtgagcttgaactataagttcagcagagacggatatagaggacagaattggacaaacaccatggccggtacaaaattccgttttcgaccgagcgacattaacacgcccaacgacccaccagcccaccaaagcactcccagtgccgtatgctggaggtctgatcgagagaaaagaagaaaaaagacgaaagacgaaagacatgacaaaattccatgtaagcaaagataacaagagaagacggaaacacaacaatcgaacaaagtttacctttatgagaccatccatccgagtgtctcatcgagaaagtctgaagagaataaacattgacccggtaagattgaatcagtcggggcataagtcgactgaccgcaaaaagaagagatggacatacattgatgattcccttcatggtcaaacccagcaagtaaagccttagaatgatcgtcagttcatcgcgcttctcagcttatagccggacgaaagagcagcagaacaaaagtagggcggaacgtacgaaagtcgtgatcatcaatgagtcctatggcaacacaaatcttagaaaaaaattaactaacttgacacagacaagggaaacatgagatatgataaagatgaacgtacgtagagctcttggctgtgacccactcgtttcatccaacttgttccacaagacatcgcgatctatgcgagtcaacgcacacagaaaccctcttcagtcaacaattcatcttgatcctctccaacgagcaacctttctgttcaaaaagcaaaagcgagaaagaagccgccaggctagcctaagagtgaaatgaatgggaaaaacttaccgctaaaagggtgccatataaaataaagctgaccccgaacgtctgttacatatgtgcgttccattcaccccgtgatatagaaagaagcagaaaatatatcatcaaggcgcgagtttctaagatgagggcttgagtcaaaaacatacatgatgcgcataacattgtaacttctcctctcctctgcagaaccccatgtaagtttgtattccaagaagaatttgtgtccagccgatcaaagggtaaagccttccgacgacagcatggatccaatgtggaatattccgaaagcgagcaatatgaagcttgagatatactccggacgacgtttgctgtggtttcctcaggtagaaggatgtatagagacagtgtgagaatggagctcaagaagaatgggctggaagaaactgagagatagacggaccagaagtagaagcaggatgatgatatttgctaagactccgtcttgtgaatcctcaaagaaaccattgcgaacgcgtcagtctcatcagcttattcttctttttgatgttgattcaattccagatacagcaaagaagaaaagattgcgtacggaactgtgttgggtcaacgaaccaagagaaaataatcagctcttcactccgaacaaggaattcgataacgctcgagtggcaaggatgattcaggcccgtcctgcccttctaaaggagaaagtaaagagagacacactgaagccggatattgtctccctccatgatgatgacctgctctctcaaagaatgacagaaatagattccacacacgagtatacctttgaattagtcgaccgtttcctcaaaacagatagaaaagcgttcttcacgtttggagaagtctttttgttagaacgaacagaagactgatcaggatgggactcgcctagaatgtagccagcgctcgtcaagaccatcgatgttgtctgcgaagtgaccccggaacgacccaaaagaaaggatgatcagtcatttcggtctaagactcaaagagaaagataaatcggcctttcagtagaaacaaggagatttagacaaacctgaactggaatatgaaaccttgactttctagaaacgacccaatcaagccgcacgttatatacacacaaatgtcagtcatagcatcaatttactttggataatacacgccccgctcatcccaaccaaacggaagaggaaagaaaatgactagaagtcacgagagaaaggaacagaaacctacttgatcccgagcaccattcccagaggaaataatactccccaaacactcgcctggaggaccgcatgtagttttatcccggtcgagtgcggctcagaaagatcgaccgccgatgctgccggatgagagtgtcgttgggagagatgatcgttcagcaaaagatccatcgttcgtctctttcgttcgtcctattgttgtctcgtttggctgagttttgtgagatgagacaaatggaatgaagagaaacgatttagaggatgaagtgaatcaatgaacgaacgagcgagcgaacgagcaagcattctctaattcccggcgcgtcatctgtttgaaatgcgcatttgatttcctcggtcaaaagagcaacaacctggggaagcacaaagaaagattttttctcctctccgttcctaggaccagtatgaacaatccattcaccaaacgcacagaagaactaaatagattttacaataagcaaaatgataagatagagaagaagaaaggcatgtgcatcgtagacgagtaggaatgtggaaagtgaataagagatcttgca

SEQ ID NO: 2979 - DNA, 36969 bp, Xanthophyllomyces dendrorhous
agtggcatagcgagccctatgatttttaaatgaaataacaaagaaactgataaaagaatattatgtcgaataagattaagaagcaggaaaagggaagagtcaagatacagataaaggatgttatggaaatacaaaaaggagaaaggaacaagaaggaaagaagaaggaaaagtggaaaagagcgagatgagaatggacaggatacactctgattcactcatcagtctcaccgccctcgaaatctaatccctctcccaagattttctcttcgttctttctcttgcccggcccccgacgtctgataacggaatcatacgtacaactcagaccgcgtttgacgcagtgggcgcatgttggccgagttgcatcgcatctaaaaacgtaaacaatgtcagggaacacccggggaaggcaaatcaaaccgaagcgagatgacaacacaggacaaaggaagatgatgcccacctaagtttgcgacctcgacagaaatgacaagccaagctgactttctttgttccctgtgctagtgatctgtccggccgaccatcaacctgctcgctagcctcaggttccttcagatcattcccactttctgcgacagacgtcgccgacgacctactaatcgtcttttttttggaacactttcgatcgatcgaagttgaacctcctttagttgagtggttcgtctcctttctctttgcagtcagccccttttcggagccactcccaatctcatgaagttcgacttttgtcgccctaaccacggcccacgttggatccttttcgttgtacgtcatagagctgctaccgctactgctcgtcgctgtccagttgaaggcttgatgagagtcttctccagtttgctcgaacgaactggatcgggatagttcgttagggagatcggtaggtaacgaagcgttcatcatagataggtttgtcaacccgacacttgtcgtgggtgggtaagatcccacctggaatgatcgaggttcgatcgtcgccgctgctaacgctgccgtcgtcatcagtggtaagccatgggtttctgacgaacggcgatgatccgatgcaaacggggaaccaaccgcagtcaaagaagacgccgaggccgaagaggatgatgactctggtgcttctggagtgaaacacttctgctgggcttgtagccgctgttgtccgagtagtaataacctgctttgctcttgtgtgatttgaagaccgatcggatgggacgcgtaatcgttgctcgacctgaacggcgcagtgttggcggagtacggagaggatgaggacgacgaagagggaccaagaaacgactgagccgggatggatgaagacgaagatgaagacgaagacgaatgggtaaccccgaggggtgtttgttggtgagcaggagatccagatggcagaggtgcgtacatcagagacggattgttcatccaatatcccgattgggctgattggatggatttgaggtgattattgctgtcagtattgagatcagaggagggcactaatgaactttctgtcgtccaagagcccgagatgtcctgaacaggcaagcagcctttatatcgataaaattgatattgggaaagacaaaaagtagtacgttgattaactaaacgttcgtgcggtcaaggtgataaatatagagaacctatggacttaccttcctggactgtcgacaaggttgagcttgttttcggcgtcaaacctaatgatgatggcaaggatgaagtggacggggaggacgaaagagtcgacgaaaatcccgacgcaggcggattgtgaccgtaaggaaaccgagacacatccgatccagaagtctcagatgggccggtagggaagtgatgagaaaacaaggcagaactagcctggtgtggccagagtttgacgtccgtgatagatagtcttctctgatgattttgctgttgctgctgctgctgctgctgctgctgcggataatgatggaaagaagctctgcgttctgagtggacggcaggcgtggaggatgatggcgaaaacaccgatggggcgatactcaggtccaccgaggggcctgttgtcacatagtccttcggcgcccctgtagacggcacagcgcttgacgaagaggcgatattaaagcgacgttcggatgcttgtttttcgttaaacatttgctggtatcggttgaatgtcgtttcctcaaaagggcctgtagcgacgaacggcgcgctcatagcttgttggtcgtgcgcagaagagttaagctgattgttgaccgaggatgtagaggaagatgaggtcgaagagattggtgtggggatgagatttgagttgacaaaggaactagtgttgtgagactgtctcctaaacgggaatcggtaggctgaagacgacgatgacgatgacgatgatgatggggtgaacacatggaatagatggacgggtcgggaaggtccgacagccgggttttcatatctgttttcagtaaactcctctccccaaatagatatcccatcaagagcttcgccttgatcgaccaagaacgtgctgtctaccgaaggttgttgagccaacagagccgactcgatcgatccagactgatccgcccaagccgttgaggcgatcagaggtgaccaatccttcgatcgaatatatgtcgggccagagttgggctgttgccggccggtatagtctgttcgccctgacgaaggaattgctttgttttctgattggttatcctgatataaagggtagtaatggtgagcatgatacgtatgtggttgatcgtgtgatttccagcctaatgacatgtcgttgatattgttgctgttactgctgctgctgctgctgctgctgctgctgctgctagtagtattggggttgggatcatggttgtacaacggaacgccgtgtgtcggaggaaacccgttcatagagcaaggagcagagggctgtttgaaagggtgagctggatgtggagaacactgaaaggcagttgctctcggagggaggtaagaatttgcgtgaaaagattgtggaaaggctgagagttcaaattgagagacctccgaagagccgcaaaaactggagtgaagtgcggttgaacaggtttgcatagacagaacgaagccgtctaccattctttccgagggaaatagatagtagaacagaggcaaggaaattagaataacgagaagcacgagtgttgtgagtaagagatctctgtgtatgtatatatatatgtatatggggaatagaaaagaaggaagaaaggacaggtgccaaagatctgagaagaacgaccgatgggttaagtaaaagaagggagggaccaagaactcacggagaaaacaccgctacgatgattgatgtttacgtcaaccgcagatcttcgagatcgaaaagagtcagctatgtcgaacaacgtgccgcagtgatatcgagtctggagaagaaagaaggacagagaagacccgaggaaaggaggggaggtatcgttgcaaaagagggtatagactttagccggtagaaacaacgtcggtggttaagaataaatgcatagttaaagaccgaaattgattgtacgtacaagaagaaagaaaagagagggcgtaacgtcgaagagcgtgtggtttaaaagagaaagggatgcaggactgattgatcgaatggggcgtttcgaagaagacttctcaatggatgagaacgtgcttccttcgataagggatatcaaaaatcagcgagatgggaacaggactcttttgagggatgcatccaggaataggttatgtgttctgtttagttaaagtttctcttaaggagagatgaccctcgacgaggggcttctattatttcggccaaagagcttgaaccactagactgaacggccaatgaacagggacaggttcagaaagaggtaagaacaagagccaaaggatgtaacccagcggcgaggaggacaaggatacaagaaaatgatgaatggggtgaagataacgaaaaagagggaaagaaagaaagatgggatcgatcagtcgagagctcctcccaccacgtgtttttgtatctgaccacaaaaaaaagacggacaagaaaagcgaaaaagaaatgtttgaaagctctgaaaggaaaggttttgcccttttcgtttgccattctcccttccctcgccattgtcttgcgcctgtcgccttcatgttgatccattgcccagcccaagttggatcctgcccgttgcatgtgtcctctccgtcggcgggctcctgccgtcctgccaatttgtgaagaaatatttgatcgacagacttagtcgaaaacaccgaaccgtgtttatcctatttttgctttctcctctgcccttgcttgtctgggtcttggagaaagcagaaggaaaagaaaaaaagacattatattgatgcttattcctccatcctcttacccagtaggagaagccttgtgttcccaaacaaaacatacacagacccaagcacgttcataccccctcagttagacgccacaagagaccaacaaaacccgaagaagagaaagagaaaagaaagaagaaacaaaaatggggagctccaacaaggaaggacttcgtatggagtgaaagaagtcgatagagaaatatatctaaagaggaagggagacagagaataacgagaacatacctgattattattaattttcgtccagattcgatcggttgatgccgcaggattttgaagagaccgactgcggaaaattcagaagaagagatttacagacttgcccgtacccgcccgcttaactccgtacccgcccggtccgctaaatgcgctaaatgcgcctaaagccaagggaagatcctttagtgtaacttcgagaagaataatttgaataggtaactgaccccgctgggctcaggagaaagaagagaaggaacaactcataagacagctgagggtaggacggcaagcccggttacgacctgctatgaccgtgatcgcccacgtcggctatttactgattgggcccggagttatttatcatctgttcttctcccctctcctcgttttctgctcttccagtcacacaatcagcatcgacttccttccttactgccgccagcagtcagacattctgaatgagaacaaagaagacgaaaagagaataaagaagaagaatagaaagaaaaagaaggaaataaagaaacaaagtaaacaacaaatcgagaaggagccgaacgcttaaattgaagtacaggaaagaccaaacgtggaaagaaataaggggggaaatcattttcagccgatcagaagacgactcccactgtgggaaagagagagaagtaagggtgatcgatcgatcgatcgatcgaaggatgtaaacatccgaaagtactaaagaacaggtcgcgacgaccttaacatattcaaacaaataaatcaatcaacaaacaaacccactcgcttcgcctacatcctccctcgcgttatgtgccatcatggtcagcttccatttaccttccttctcatttttctgatgatgctttcttctttataacgatcatcatcagcatcatcatcgccgtcgtcatcatcgtcgtttcacactcttttcgttttgttacgttacgttacgttactctctcctctcatctttctgcctgaatcgagatctgcaggtttgtttgatcttccttgtacatatacaacaatccacgtgggtcaggaaatgaacgcaaaagggttaagaaccaacccatcttttacgttcaatttagataaacaaatagaaacaaattcaaccgacaattacacgaatacacatgcatatgcatagaagacgaacagatatgcgtgattcaaacgaagaaggaaggcacgtggagtttgtttggatctgagtttgctggaatgccactccactcttctttctctgggttttacgctagggagagacgaaagagagatacagatccacaagaggcaggaattgaggagtatagaagggaagaaaggaggacagagcgcaaaaaaaaaatctcgcctccctagaaggaattaaaatagagataagatcgctgtggacacgattgaggatatgtgtgatgccagaacaggcggatgatcctttctttccctacctgaacgtcctatagttctatctcttcatgttgtctctttgcttacttgtttctggtttgttcattttttttaaaaaatctccgtagatttatcgagaccaacaaatctcggaatgcaatttgttgaactcggctcatccttctcttcttttcgttcttcctttttgcttccgactctcacacttggatagatttcattttatggaaaaaaatcatccctagtcttcgtatatataccaaaaaaaatcctactctttttgaacccacaagatgataatgttgtttttttgatcgaaaacttgcaagcaatgcggcgcaaacaatcctacaaaagctcatcaaatgaggtttgttcagtccgcgctactgtcagccctaagctccccacaattagaccctttcgatttcctgtgggaggatcaatcccccctgccgcttgatttcgtccagaatagtcatcacccggatggacgtttggtggttgttccgaggtgattccaccgagcccgcgaagatctgtcgaccaacttcgtcctgttcgaaacacttcagaagagaaattaaacgaagaaacaaagaataatgagcgtcgaagcgcacgtatgcgtgtctcctttgttcatcctgatggacctacgaaaccgaaagcgttgtccgtgttggggtcagaacactcgaccgtttcctctctttcatcgttgtatttgattttgtatcctgtaggtcttgagttcgtttatttttccatccgttacaaagcagaaagagcacgcatatttgaaatcgatacgttccggaataaacaacagcggttccgactccgacagttatgaaaatgagaagaaagaaactaaactcacgctaccatcacaccagacactgtcaaagttccttccgaaccttgaactactacttggttgactgttccagcggccatacttccactaattacagcctgtgcgctaggtagctcatcaaatgataatactgccgtggtgtgtaagtcgactgaacgactgatcgtcatctggccgacgatctttgggatcgacgatatctcggcaggatgaggaaataaactgcggaaggtcaataatgataggtcaatgaatcacctgcagaattgagtttactttggatggtggagaaatagagaaacgattgatcaaaaatgacaaacgttaaaagcgcccaatgaagcgtatatggcatgaggtccaggcttagatgacatgttcacatgtttgtgtgtgagtgttaatgtgtctattatcatttacctttggacgatactgatagatatcaagagcaaatgtaacgcttacagagctcctccaccgagagaaggtgcgatcaatcgatgaccatcgtccatatctgtggaaatacccggaataatacactatcattagatcaggtctctagatcaaccaagagaggaatcagggcaaggaagacactctacaaaccaaaggtcttgaaatcttgtgcaaggtctgcaaacacccgacgcacagtcccaatctttcctccggcaatcacctgcaggaaaaaaaaaggtagaagaaattgggaaacgagaaaagacgttgagaagcccacgcgtcagcattgaacattttgccaacattctgtgtcgcgatgtctccaatcaaccttcgatcggacgaacttcctggatagctatcgtagcaggaaaaaatcttgaccacatggcttccatgaggaacaaccttttctcctcagaaattcgaacgagctcttctgcctgcttggcattgatagtgaaacctttctcgcacagaacgtgtttgctgcgttggagatatgtagtttgtgtcaacatgatatcgacaagagaataagcagatatgaagaacccgcaccctgctagaagggctgctttagaagctggataatgattcgagttgggagtcccaacgtacactacatcaacgttctgttgaagagagattcgatcgttagtgatcttcaactctttctatctatttgattcttaacaaaaacaaaaaacaaaaaaaaaccaaggggtacgaacagggtcgttgaatagatcaacggcagatccgtatcctttagcaatgtcaagtccgagttctctgataaacgcgtccgctctgtcctttgaacgcgatcctacagcgaccacagcgtgcttatcgaggccagaggaatgttcatacatgtacgattagtttagtctgcgctcatatacatatgtttaccataagtttctactgaccttaaagtcttgtcctcgggtggatgcatcgatcaagagatccttagtaaagttggtgctgatacctaaagagaacatgaaagaacattggtcttgactgatcaatagaaagaaatctatcactgagaacgaacgaaagaaacgaaccaccggtcgcgagaataccccatcttagtacctttgtttgaggttgttcggtcataatcagagcctgaagatctgcagaaaaatgaggaaaagttaggtaagatggaagttcggagagaagaggatatgatctctcagttgacgtcaccaatccgcacgggaagggaggtcaggatcccggttagggttatttgagctcgaggggatcttgtgtcctgctctacatgcattacaggatgagtccactcgattcaacctgctctctatcttgtgcagttgttaagttattcattttgttcttgttctgacttcagacaatgatcaggagatctcgatcaggctctctttatccctgtcgcctaggtgttttcacggcggggcgaattatatattctcgaaacgattgcacatctatttgacaatgcttccatgtccggatcaaccgatgagttccccaagatggaaacacaattcataactcaagtgttcgagatacgatcggattgatggatgctgaatgaacgattgttcaagaaaagaggacgaatgcaaaatataatgaccaagcactcccggagcggttcaccttattcaaaccttctacacaccggtatccatcgaaccacagctcatgaccgcatcttgtctgaaaaggtccactaagctaacaggaagtgatgctccgctccgcaagccaatctggtctgctgactgtgatcctagtaagaggatagatagagaaagaaaagaaaaacaagaggccactttgcaaaaagaatacacgtttcaacatctcacggacaaatcagtatatctcaaccagccagcaccatgaaatataaggccacttgcgacccaagtgcgcgctttgtgaacgtgagcgtccctctgcagcaagagccggctggagagcgaaagccaacgaagaaaagtcagatggaaaagtcaggcaagtcgataattatcgcgggtgactaaccaaatatcgttcgtgggccgccgaatacgcagcgagtgcttgcccgtggtgtcttgggaagaaaaaccttttccctctcggtcgtcttactctacgtctccttagaaaatggtgagaataacggaccttacagagctctccttcgccggctgcacacctagacgacattccagtatctctcttcccagaagttaccgacaaaccgacagaccgatacgactcgatgttcattgacaaaggatgggggcgagaatgcgtggtggtaatcaggtggcggtggcgagttttcgattcaaagaaaaaaccttgagcgtttcaatagaaatcgagtggttgggcgtttcgaggtatcgacacagtgtcagggagatgagattagtttggtacccaagtcaactctagcatcaatccggtccattcatcagaactcagaatccctatccttctccccaaaaatcgtgcagccggccgggatctcgatctatgtttcccccttcatatgggggagaaaaaagtactcatgcaaaactcttttccttttcttgggcgtgatgattatctttctagactctcgctgttgatctcctcaacccttccatcgagtctgaggcccgacaacacaagctcaagaggcttgtgcagagccccaactctttcttcatggtcagtgtcgcaattttttttaccttacaatcgttcgcgtgaccataggtcgaatggcgtaaatctgaatcgagttattggttatcttttctcttaatatccttgggccatccaacaacaggacgtcaagtgccctggttgcttccagatcaccaccgtgttctcgcacgcttccactgccgttcaggttcgttctcttttttcgatcttgtaaacagagaccataacttgtcagctgacctgttgatccaacaaccgccacgatcagtgtggatcgtgccagaccatcctctgccagccccggggaggaaaggctcgacttaccgagggtatgtcccatgatttcttcatcataaaaacagtataactcacgatgtattttttttgcctttcctcattgtcgaccactcataggatgctctttccgacgaaagaactaagtttctgttatcggatgatgcattcaaataaaagtcatgttctattctcgaaatctgcttcgctcggatcgatctcttttcgcttgctacaacaccccttgagattcactcccatgatcttctcgtaccttttggcttgatccaggggtgctagtcttcaggatggtgaacaggatgtgaaagactgatgttggcttattgacgatctacgactatttgctgtttccttccctctgcttgccaacaacaaagagacatgcgttctcaaagtcacagttcggctagggattgactaatcaaataggcttcgagattttggatcaactcatagtacatcggctcttcgtttcttagttctaatgcgtgtgcctcactgaccccgactgcttacaaaagcgtccttgaaataagatgactatcgtaaccatgagtgtacatcacagctttcatttctctttcatttctagcgcaagatccttcatatctcggggacatcttgtccgaaacgactcgcatcgttttggtttcctatctagtcttcttgaccggaggttgtcttgcctctttctctggtttatctgacatagtagcgaaatcctgcaaatctctagatgatgcagtcttggtaggatctcccaaaaacaaactactttcgcacaagcgatggaaacctgaagagtatgtccattttgtatgaagaaaacgtcctagacatacgatctgcatacacaaaaacggtgaacgaaggcgagaagatatggcagtagatgttcatccatttattctagatgacgacacaaggaacaggaacaggaaaggaagatcactccaaagcgagagccactagtttgagaatctcctcggttgatcttccttggttcgatagatccttggcaatagattgccatactggtgagtgtttcggactcgcagcggtgcagagatcgatgacgtgttgtcgacgttcctgttcaacgtgagagaatagagaagaacattgtcagtacagtggcaagtgataaagaggatgaaacccgagagagatgaatcacaggcagagaaagatgaatcacaagcagaggcagagaacaagagatcgaatacataccatctctccgtgttccatctcgaatttgtaccaccaaccccaagaatcacccagatccttgttcgcctcgaccgctcggccaaaccaatgtctcgccctctcgatcttcctatcagtccagaacaaacgagcgacaagagtgatgatgactgggtcatcgtttgtctttttgagggcgtcggccgctcgggtctttcgttgctgtcgaggttcattccagatattgattgcccataatcgaccagatgtcggacattcttgaatacctatgcaaatcaaatggttgtcgttgttgaatgatcagcaaatcttcttcatggaagaaaccaaaagagaaggtagagtttgaaatgtaaaagaaaataatgaagagaagacgaacctcttgaaagaacgacttttgattgagctatacttcccgctcgttcctccactcttacactctcctcccataattctggattctttgggttcagcagccttgccttttccaacaaactacgagctttaatgaccacgcctgcatgttcttctaaacgcgaagaaagcaaccaaagtggaatcgagtttgggcaagccttgacacctttcgagtatgtttctcgggctagaggtaattgttgagtagccgtgtagatctgacctttgatcatgtaaagcttgtcgaacgtggggaacttctcaataccttgtccaagagtggaaagcgcttcgtcgagcgcgccttgttgacgctcgagcaccgcggacttcatccaaatctatcagggccgaaaagagcaaaattaaaggaaagatgtccacacaagacaagcggcgaatcagttgactgcttgataaagaagagaagaaagaaggagagaaacacatccaagagttcctaccttgtccgtaccagcctcctgtcgagcgtttgccaacaactcttttgccctgttcaacgctccattctcggcttccaactttgcggccgctagccagatctgttcagattcggggttcgcctggaaagcgttggcgaggatgtttctggcgccgggtacatctccgtgcaaccatttctccttagcggccatcagccagagtacttctgctcgtggacaatgctgaaccgatttggccagaagcgcttgtaggtcgtcactaaagcgggagatttgtataagaagaacgaaggacatcagcgtcctcctgacaagtaaaagagaagagtgatggtcgaggtataagtcatcagaacacgcactaggtaccatgagccttttcaaactgagcggccgtccaccagacctgcctcctatcgggaaagacgttgatgaggtatgctctgaccgctctgctggtttcgatgtgacccctagcggccgaagaatcggcgtcatccatccaaatcttcatacgttggtcttcctcgacatcgatgtgtaatgtcgctttaacgatcgctctggcggtgatgggcgaaccttcggattcacatctttcggcctccctcagccaggcttctctatccatcatgacctgttggtctgccaactttgccacaccggaagccatgataccttctaccttagaaacgtcacccgtctgttctgtcaatctggcagcggcgatccaaatctcatgagacgttggaatcgtctttcgggctttgttgagaaccttctgagcggcctgaggagtctcgagtcgcgcaagcgtaagccaaagatcgacagaggtcggaacaaattcgaccgctcgagcaaggaggatccgagcatcggcagggtcggtctcaaggttgacagtctctttccataaagtaaccgagttcggaatagtctccacagctgttcaataaagtcgaaagaagggaatgaagtgttctcttgaagtatcagaaagcgttgcttatgctcatgagtacagacgagagggaagtctaaacgaagatgagcgaaccttttcttaagacgttcttacgtctgttgacatcagtctccaaaacggctgctttcagccaaattttcaccgactgggggagctctcgaacggcattggctaagatccgcttcgcattttcaggaatctgatctccaataaatacacaggaagggagaaaaatgaaggcaaagtggtaagatcgagacatacgcgctgcaaaggctcggcttgtgaagatcccgagacaaaaggagtccacgtacattaagctctgccgcctgtaaccacacgtcttcgctctttggacacatctcacaacctttagcaataattttcctggctgccaccatctttttggcatgaacctctaacgcggcagctgcgatccaccctggagcgtgcttggggttagtcttgataactgaatcaagtagggcccgggctctcttgatgtctctgtacgatgaatgtatagatgaaacgagacacataacgcgtgatacagaccagataacgaaaagttttcgaaaagataatcagtctcgctggtgtgtcaatgatggagaaaggaatcatgaacctgaaaggacgaaccctatctgagcatcggactggacgaccatgctgttaagatccgtaaggtagcctttagaatcgaccgtagtggatgatccatttgacgtgtctgccgacatctgagatgcacacgcacaatcggatggttgatttttagtttctcctgcggacattgatcaaatcatgagaggcccgacaaagcagagaatctattgctgacctgatcgagtttgagagacaataccttgtctcgagcgttaccgatctctaccaaatttgtcatcgccccgctctctgatgctccggcctgtaaaacgtttggttaacggcaaaataagagtagagggaaaggcgcatcaattgggtagcgattgacaaaaagattggaggaaagaagggtagaaactaaccatctgctcttcgcttaattggccttctgtcgcgttcgatgccatgtttgtcagtgtcacactgtccggtacggcgtactccctatcgaatctcgggtttcgcttttgttttttacccgtcatattggcaacttctggtaggttttcccattcggagtccgtgacagcggtgagtcctcgttttaaatcagcgaacctgttttaaagtatgagtgtgagtgtgaagaagtatgtttgaggcgtgtaacagaagaaaagagaaagaagaatcacaagagccactaagatttattataataaaaaaggagaagagaaacctttcaaacagagaatagacggactgactgggtttgaatctttggttgggccaaccgatgagccttcagttgttcctcctccgccgcctctctcctcgcctttctcctctggtcgatcctctcgtccacactttcccagattcgatctgcttcttcatcatcctgttcatacacggtaccagcaaagatgtttgtctcctcatctggatctttgaattggtccggatcggcggtgatctcttcacctcggcctgaggcagccgcgtcctctgaaggaccctgatctcgagcaggaccgatatcggatcgagtggtgaagccggaagctctatgaagaggaaagagaaacaaagaagcgattgagagggcgaaatatgaatagaacagaacagaacagaaaattaacagctcaagcatgggtccgaaagagatagaggccagaaagagaaaggaacgaaccctcgaccgagacctccgacgtaggaaggcggagctgtcatcgtcaaaaaggctagcttgttgacatttccacccctggaggtcgagttgatgacctggaatgagttggactgcatcctgtagagtgtgtcttccctgaagggactgaagaggtggagagagagtgaaggttaatggacaggttgatcaattgtgcttgccaggccttacaatctttacgaaggactttctatgatatcgtactagaagcattcatagtatatatagataacaaccctaacacacgctctttgttagggaaacaagctaggctggtcgcggagaaggttacgagctgtgtaaccgcagtggttttcgaaatgagcggtggggagttcaggctctgagactggaattgatgaggacaggggtgcaaatagacaagatcgttatatcaaaaggatgagacacaaggacggggcacgagagtaagacagaatagaatatcaatagaacatccgcgacatgaggttttcgacgggagagaacaggggaacgtggattaacaaaggatccaggcttgggagcctatgttatgaatgacaaaggaagccggtctcatatgtgaccctcaaactcaaacaactaagcacaaaaataaacaagcatagaacgtgctagaagaacctgcgctagaagactatatacttatatgtcagtgaattggaagaacagaataaatggagaaggagtagatgaagcgaagcaacctaaacagtcgtggattacagacatgtaacactcaggccacattcctgacgctttaacgcggatgattcagactccattcgagcagacaacagatctcttgccagcataattctctgatctcatcctttgataccttctccatcaagttgacccgtccttccaaagactgaataacattgaccctcttttttgcttcggttcgagccgtccggacatctccccttgaattagggtaggctttgacgagcacaggatgattgatccgatcgaaccaccatttggcgttccaatattctgaatgaccctccgtccgatgaactagcgcgtgatagtaatcaaatgtgccatacagctctccctcgtgagcttgagcgattagatgggcggaagagtagtcagagttgagtagatgaagcgcagggagcgcagagaggggtagggtggtgcctaagataagaccaaaagagagtaataaaagtgaaagtgaaagaaggaaatacgtcaacggtattctttcaaattcaattttctaaggaatatttgttcacagggacaactaggaaagaggcacgcgcacaggcatctatcctagaggttaacgatttgtcgaaagggttcttgggattgaggggcccgggtgcccgatcgagtaacaaatggaattcggttgggatcttggacgagagcgattgaagaattgctcttgaggaaatttctataggctccatctgagtgagcagagaaagagagtggcaacctctactatgtgcaacagaaaaccaaacaggatggcaagaaggataatgaaggtgatgatgatgacgatcatgtgaagagctgcttagtcattcaaaaccctaacaagtgccttcgtcggtccgcacaccttcctaggcaaacctggacagaaacaggacaatgcaggttgaacttgaggcgcacagacagtgggctctctctttctgagtctcattagagtatacatggatatatgtagtttctgtctttacttttgatcgtctaattactattcccaagttctcttggcacgatctcgcttggcctagaggaacgaggagtagagtataggagaatagagtgaagggagtagagtgatcagttaaccatagtaaagaaagagacaagataaacaagtcgttagcctacctttctatcctcgaacgcttgatccttgattttcagcttttccgcaaactgctctgctttctccatctgctgaattgaccgcttcttctgcttagagctcgcttttgccttgacggttccctgtccacctaccgtctttggagactgattttttttcagtcggacctcatcagcaggtgagacagagtgcttccctttattcactggtggtggaggaatatgagggttcgatgaggttgacggcaagtgagcgaccgatcggtgagcaagttcttgaagagtgctgtcaactcggtgtttcggtgtagggactgttaataggagagcaagtgagtatttgaacagggtgatggtcaggatgttgtttataatatggctagacacatgtgtatatatcagataaagggaaacctaaaccaaccggacatcaagaagcaagaaggcgagagaaaggaaaggagagagaaggtataggacgaaggcgaggcgggagaaatgaacgttgctagtcggggcgaacgtttgttcgatttacactataaagcatcctattcgacttgacagatgtatcataaaagtttcatattcaatataatcgatctttaccaggatactttatactacaacaattttgtgtcccacaagattagttcattagagaattttgtatcatcgtctatctatcgccatacgaaggctgtgcatatgattcgactgtggaccttttataaacactaatagagcgaatcattgtcaagactagaaagtcggataatacaaccttttgcacatatcactacaactcttgtagtcagatttcctaataggatacagccagcgcatacatccgtgtgcttctcccgtcagagtcatatgtttcgattcctcctccttcttctttcctcttgaccacgactttatccaaagccagaacctctttcaggtttcccaacctccccccccctttgttcccttcttcttttgaagactttgccttctgcgtccatagaagcaagccttagaagtagtcgaaactttctccccctccttcaggttcccccagcagttctttcagcaggccttcagtggttgttgcacttttctcagtaaaagaaaaggaaaaaaaaaacatcgagcttgccaccctttcgatcccgtcgtcctctttcaaaagaccccatccgttccctctcctttcgtccccctcctgcttctcctccagacgaatcagtgctcgtcttctcttgatccgaatcaggtctcttttgcctttttttctcaagaaatccgggtttcttcggatcgtcaagaggtgcgcatatagtcatcctcccccttttttccatttattcgtctttcccttccttctggccacccaatcgccacgcttcactctatcttccctctgatctccgttctcaatcactgataacgtctattttactcataccatacagtctttagtgtcgtagtcgagcgttttttccctcctccctgaaagaaaacaatcctccctcaagtctctacaaacccgtccaccttctctgccacccgaaacaaactcttctaaacctctcctctccttgggtccccttcgaatttcctcttgctttctctcaccgaaagcgaatcgaagagaactctgtccgtctttccctttctctttcccagaaaggaattcggatcctccaactcttttctcgaccagtatatgaacgccccttctactacctacggctactcgtcccagaagatggctccctcgatgtcgtccccgtaccgagcgcccttccagatcttccatcagcaggaccagcagctttccgcttccacccacccagccgcctactcccacccctccttcaatccctaccaccaggtctgtcagcagcaggagcagcacgccttccgtcctgccccacccgctgcccatacgttgcctcacccaagcttctccttccaagctcaggtccagaagcagcagcaggcccaacaggagcgtgcgctggctacggctgctgccgctgccgctcaagaggcgagtagagtcaccgcccctccttctggtgaatctagtcggccggctttagctccccaggtggcgtcgtcccttccgttggctccgttcctggccgatgcggtctggtcgctactgaagagctcgatcaagtccgagaccgtggagaacgctggattcgaaggtggacgagagagatctcgaggtcggaagcgatccgaacgaggtgctagagattactggaatgatgaatcgtattcaacgttcgtcccctttccttctttctctatcttttcctcttattcaggagtgctcatttcccatttccttatatcaacctctccacctatgctcagtgatgccaatggatactggatccagacctctttgaacactcctcctcagatgactttggacgactttgaggcttccccgatcccactctcttatcgaacgaacccttacaacctcggtttgagcgcgcctgattcatttgtccggttcattcaccaaaccctcgcccagaccttgatctctccgaccggtgtcatccttgccctctggtatctcaccaaggcccctcttcacgagggcggcggtgaggaaggtcatttgtttagacaagagctccagacgttctcggattacaacggtgaggaggtcgccaagcgagtgtttaccctcggtctccactgggccaacatgtgtctcgatgacgagacgttcaccgctcgatcttggtcggacgtcactcggatccctatccaagagatcaaccgactcggtctccttgcactctccaccatgggtttcaatattcacatcgatgttcctgagtgggccacttggatcgagactgtgtacctctcggcgaatgacgagatcgctagaaaagccctgttcgacatctcggacgccttggccaagagcgaggcagccagggagagcgaatcccagcgggagcagtggcagattgcccaattgcagcagcagcagcaacaggctgccgaggagcagaggcaacgagatatccaggaacaaatggatcgagagagagagtgcaacgagcaattacgcttggaagctcttcgagtctcgcaggccgctgccatttcgatcaactgggcccactcttcatccacctccggtcccgccccagttgctcccaagcaggatgcctggaacatgttcgactcaaacacataccaccaggaccgacagaccatgcagtatcagcagcagcagcagcagcagcagcagcatcttccaacctcgtcgacctcccagattatcggccgagctcaacaacatgagcttcgccaggtccgtcgacatgagccttacgctcggtcccagggtcctgctaccggtcaccaagccgagcaggcctacccggtctcatttactagacacaccgcctcggccccagtgctgggagccggctgtgcgcctttgcagcaccaggctacctttgggaacgttggcaatggctcgttcggtttcggtacgggcatgcctcagttgatgcgaatgcctaccgcgacttgttggtagagaactggtgtaccggatattctttctcatcacttccattccatcttttctttttcttcacttcttcttttcaaaaagagaaaataccaaaaatatttccttcttttcctcttcttccttttccgttacattctagctgcctatccgtagctatctcttttcttccatttatgctcctaccccttttataattgttgtctctcaaatctccttttgcgcaaccgttcaaatatttcatattcgtcttctctttttgcatttggcaatacttcatctgtcatttgcgctcttcttttaatctggttttctcctcttcctctttaaagaaaaaaatacaaacaaaaaaagacttttttttcttgtttaccttccctttcctttcatctttgctctgttttcaacattttagatttttagaccgactctttcttttttcttcaaaaaaaaaaatgtgagcatctttggcttctcccttttgactggcataagactgaccctgggaaacacttcaaaccacaggttcccgagagatagagacgatcacgctggtatccgattgtttcctctttactctctggaggctcggccgatggacgtctctctttgtggatcatgaaggagaaaaacgactttttcggattctacaaactttcaggttgtccctccccccctcgccccaaacctccttgctcccaaaaacaataaaaaaatcgacaaaatcctttttacccattacccaaaaaaagttatggtttttttcccctttctgtcgtcgccgtcgttttcattggcaaatcttttctccttttcgagaggtgggaggtgggctttcttaaggagtcaaactctttcttctttatgatccctcctctttctctcttccttccccctttctatgttcccatcgttgttttttttgctccttggcctttttttgtttccccttatccgggtcatgttcgaacccttgtgcccgatcctcggccggttccttttgtcctctataacatcctttgcattggtctcctacgtatatttctgatatccttgaaggattcatcagtttagtttcagctttgacgtagactagctcagttccttagtctctgttcttttctcctttgctgtaaacattcctaacgtagttttatctttgggtgctgattgtggaggacgagaacccttattgagatgtgttccgaaccccagaaagcgatcgcacgagaacaatggaggctactgaagagacaacgaaaagttgtgcatgacttacgctcgtttatggtccgagcgctataccgatgttgataggtctcaacggtgatcaatggctgccggtgaaaaatcacactcagcatcaccgaatgaaatcaggtttgttaagaaagaaagttcggcaagcttggaggaaccaaggagagtttgtttgagcgttagatgggttcgtatagtttgtagtgaagtcagatggtctctacatgattggatgtcttgtgccacgatagcacgtctgtctgctcttatccaaccgagagatgaacgggtataagcacatatctggtgtccatttctttcatgtttccatctcgttcttatcgacgaatacaaacaaacgaatcaagagagaagaataggaagtataacaggaaacagaaagaaagaaagttcaaagctagatccgtcgaagaagtttctgataggaaaaaggaacaccttgatcgtgtgagagagaatgtgattctgatagttggaatataacttgaatttttttaaagagcagaaaaaaaggctcgaacgagaaggaagagtcagacgaaaaacgaaaggggtcgaagacaatgacagtgtaaagaaaaagaaagaagagaaagcaggatgggagtgtccagattgatgaatagatgaggaaaaaatcaagataaaaaagagacagaaaagaaggaggaccggaggaagagaacatatgttttctacgggtatatctgttgatgagctacaaggcggcgaatcgtgttcctttccccatcaagggagtaaagaaagtgagaatcaaggtttgaacgtagccgcttacgattcaactgagagagataaacaattaagagcaagaaaaaaaaaggggttgactccctcttcctcacaagcgatatggagagaactacgagagataggacaagatggagaattgagtgcatcggaagtaaagtaaagaaagaaagaagagaaggacccaaatagttaaaaagacaaaggtagagaaaaagaaagaaagagaaggagcaactagaatccggtactggactctctgaggacaggcccagagatgtccgtagcgtttactggtcttctctgaactcttcctacccctctcatccctggactggcgaacctatctaggaatgggttttcatttctcccctgctgctgctgctgtcctatgattccatgaaagtcagcatcagccatgtacgttagggtatcaacgaatggattcccacgttgttccatcactggctgctgctgttgttgctgaaggatcgatgggtgagctcgctgctgagcctcgaatgaggtaggactcgtaggcgaatgagagccgatcccagcaagcgcccggtataagctcgagaaccttgaagaagcagggccgatagaatgagagtcagcagatgaagacatggcgtctgggtgggtatgtcgctcattgcttggtggaccgaaagcgtagaatgaagagggccgagcatcagcgtcgaaagagccagatcggccgtgaccatccgcatgatgagctcgctcagacatcaacgttaccgcggccaaatttcgaccagtcaatgtagggttcatgctcattctccggtgaatatccgctttggcgttccttcgcattttcttgtaaatgtaaaatacgagcaacaaccagagactgcctccgacggagacggtaactccaatgatgatatctcgcttggttgtgttgctggaggatgaatcagtcgagctagatccactgctggacgcggctgcagcagaaacgagcgggtaggcggtattggctaagtcagcgatttgactaaggatcccagtctggttgtagaacgcagagttggacgccttcatctgagactgaagatgcccagaagaagaaggaaggaaacgaaaacgaagtagacacgtcagcacaagtctctgactgatctgagcacttcatctgcaaaagtcacaacagtagaactcttactgaaagatcgtcgaccatgtcggaaggaatcgttccctgccagagcgtcaacgcttcactggccgttccactcacactggctggttggcttgtttgttgtaaagaaaatgacgagtaagaagaaggttattatgaaaagcaagcataaaccaagacatgctcaaacagagaggagtacagactcactaggctttcaaagcgaatgtagagactgcagtgtcgttcagacctaaactgtcttgaacgaggacagggacataatagatcaactgagcaatcaggtccgtgttgttcgctacatccacccaggtcagacttcctccaaacaagatctcaacaagggtttggtcggctgagatgtcactactagaaaaagtggtctcatccccagatgtcgtcgattgggatgttgtagaggcaggcagaatgacggacggcaggtcggttggcaaaggcgagacggtgactgccttggatgtactagatgcactcagagagctcgagtccattagagcggacgagctagacttgatgatcgagctcgcttgaatcgacgtggtcttgacggtaggaacggcgagtccagtttgactgggaaggaagatgtcgttggttgtggatgagctggcagaggatgaaacagccatggaactaaaattaatgctgtcgctggcactagcactggcgctggtggacggagtgtgtgagtttgccgttgaactcgattgggaagactcttttgaggaatgagacccagaaagggatgcactcgatggctgggcagaggcataactgctgaaggatccgctagaatggtaaaccgaggatgtagtatcattcccaacactggcagtcaacgtagcagtcgcaaaaggatcggacgctgtgctggtgaccgagacatttaggccggcaacagatgtgctggaaacaacattggacgtatatatatttgacgcgacagaggaggaaacggaggctgcgctgtatctagagtctgtggtggtagaaactgaagtggagcttgagacggaagacacggcagagtcggaagaggagggagcggagaaagtcatcgaagcagttgaagaagaccaagatgctgaagccgtggcagtggacgaggtcgccgaggtgatgacagaggacgaagttgccaaaccggtggatgaggtggagtcggatccaagctttgctgttgacgtcgacgttgacgtcggcgtaaagatggaggtagagaccgagatactggacacactacctgcagagacagtcgccttagaagtttctgctagtgctacagatgctgaactagaggagacaggggtagccgaactaaaggtcacatgctgtgtggacgaagagtccgccacagtcatagaagtcgtagccgtcgaagtgacggacaatgatggtgacagtgatgaagctgaagttgacagcgacgaggacgagaacaaagcagccacagaggcttctgattcgctggacgtggctggggttggagcagaagtctggatggaagacgacacgctggacacactaggcgcgaaagacgacccgacgtacacagaggtcgtagtggaggcctggagagttgcctgtacggcggttgatacactagacacagaggactgctcaacaggcacagacgtcggcgaggcgagagtgacaggtatagatgagtctaccccaatggacgaaatggtcgagacaacggccgacgaggtagatatgatcgattcagatactgctgtcgaggaagctgaagcgagagaagaaggactttcgatcgtgctcgtaggaatatcactcgaagtcatagtgaccgtatcggcatacgctgatgtagaggttgaatctatgggggatgatgaggctagggccgcagtacttctagaggaagtaatccagacggacgagcttaagagtacttggctagaagtgggggtgagcgtggcagttgcggtggtcgttgctggttcggtactagtgccggtataggggatgatggtgacagtggtgacgtctgtagaagcgatcgagctgacatcggaagtggtggtcgcaacgatggatgagctggatgacaaaaacgacgtataggcagactctgttgtagtggtgggagagggggtgtatgctgaggcgctgccggttgagaaggtcgatgcaacgttcacagacgatacgctcgcgaccgaagcgacactatagtcactcacactcgctacagatgcagtgctataggtgctcacgctagcgacggactcgatgctgtaagatcgtgcgacggtttctataatctcagctgtgtgagagatggaaataagggaaagccaaaaatggcaacgcaagaattaacaccgcgccggggttattttgattagcatttgaggatacattctgaagtataattggtcgaaaacatgatacgaagaagggaaagggcacgaaaaacaaggaagaacactaaccgaggtcgatttcactcgatatctcggtagcctcgctgaaggaggattgcctcttcgctaaacgggcatgtttttgggtgcccgctcggtgggagaggtgagagagcgcagcgctttctgccgagacgagtgttgacgtattggcgagccatgaggctagaacgatgagccatggaagcggtcttgtcaggtttaagcgcatcatagagtggcgaggaggaacagagaaggaagagaaagagtataaaaagaaagaaaggaccggccagcggaggaggaagacaggaaagaaagaaacgtcagaggaacttgactgtgggtgtgtaggagatactgcgatggagggagagaagaagagaagggagttgaagatggaggaagaagagaaagaaagagaggaaggagaagatccagagaaagatcaagagggaagggacaggaaggaaaggagaagatgctctctatcggattgaccgtcttgagaaaagaacgagagtgagggaatgaaggccagaaggtgaacgagagtaggaagagggacaaccgacaacaattacgacagttacgcgtcagttacacttgagtttcacgctacccccctagaagtttcagggaacatcgtctgttatccgcagcaaagaaagtctagaacctatggaaagaggctcagggcgccgagcccagaacgtctgccgaaagaaatcgaccagaacagtaagctagtgaggttagagtacaatgggtgactgggtgggtgtacgagtgtgttgagtgattctacgagtcattcaatcaccccagttgacgaacgagcaagcttgtacactcaaatcagatggaataagttgcagcagatcaagaagatcttctcaagctcatggcagagaactgctataggcagaaagcatgtgcgatcaatttcagtgtgaacacatacgcacacacatattaagcagatccattcacatctcaaaaactctcttctgtttccttgttccattatccataccttcaaaccctccctcccgtcgttccactgcgtacttttttttttacgactctactcctttaccatacctaccctgagccactgtttatcgcttctgcatcttcatctgctgctttcgttgctgcttcttcttctccttctcctccaactgaaggtcgaggaaagcaaagcgagcatgtcagcaatatacctttctttttcttccaaacacccatcagtcagggaacctacctttgctttctccttcgggctaagcttttccctctcctccttctttttctttcgcctatcctcctcctccttttccttcttgctcagcccgccgtttgcgtccttctcctcttcctcccgctcctttgcccacacgccctccaaccctttccacgcgtctactcgcgtccgcttgaactttcggctgatttccggctgaatcttcaacacgttcggcccggatcccaccaacgagtctgccaggttgcataatacgtgtaagtaagacgccgccaaggcttcattcacaggcaaccgtaacgtcaacgtaattgtcagaggcgccgggtggttcagcgcgtattttggccacttcaatggaaggtcagagatctgaagagaatatagtttcccaatatcagtctcggtcgaccgttctatacctctatatacacatatacatccagaacagagagatacatacaatcaaactcttgaacacctttcgagcctccgaatcgatcaatagctcgaccaaaccagatcccgcattctgcccgagaggagacagaagttgagccgtcacgtccgggtgctcgctcatgatcgccaggtcggaaggcacaaatgatgaatccgaagcaagtcgaggaaacgtctggttgccaccgattcattgtttagttccttagttcagaacatctatgtctttcttttctctctcttcacatttccaagatttacaaccagatgaagagaagggggaggagaaaggggaaggtactcacaagatcccatcggccggttctagcccaattgagcccgtacttttccaacaccgcccaagtcccacttttcaacccgttaccattcgatgcatcatctcctttgacaaagacacccttctcaacttctttctttgccgctgcaagcttacttccagggggtaacagcgttagcatcagacggacttcgtcttccgggaccgggcactgaacctcccactgtctgaacaggaagaacttccagagcaatcggaacggatctggtcgaggaatcaaagagagtgtagtgtgaagagaaagtacgtttcgccggccggatgcgtacgtcaaaaacgttgaggtcccgtcggcgatcagcggatcggctgcatttggagcaggagagagtagagtgaactgagattgaatcgtcgagagactagtttgatacctatgagcatgtacattttcgtatgtatatatgaaaggagacagacgaggcataagtgacgagcgcgaggcataggattgagacgatttgcagaagaacgaaatagacgaaccatctcttggcgattgttctgttagtatttcgtccgacaatgtaccatacgaaatatccaaatacggctagcaacaaatacggctcataagggaacagagaaggtctgcacggatttaggcagagaaccagaagacagatgtcagctcaaggaagaaagccaggcaagaaaaagcggaaaagagatgtagatcgtgcgatctctacaggtgagatatccagagatggaagaatgaaaaaaaaagcattcgaacctaaaaacaagattcttccagatgacaaactgagtaccggagaaattgtctgattcccttggctggcgtagctgaccgggagcaatggcatgacccaacgaagaaaaaaactggctcatcacgaatgatgaacttaatggagtagtgggggtggatcgttgttgatatccaagaatcggcaatggaaaagctactatcaaaaagtaacaagtcgattacacaaattcttcccaaaattcatgattgtataaaaattaagccgactctcttacattctttcttccttccctcattacaacccaatccacactttcattccgaccgatatgcctccctcttcagaagcttcaggctcaagatctgacagcgtctctggatcagaaatcggctctcagcgagggtcctcctcgtccccccaaccggaggatgagatccccgccacctttgcctccctaggcgtcaactcactcttgtgcgaggcctgtgatactctcaacttcaaagcaccaacctcgattcagaaagaagccatcccgtacgctctccaaggaagggacgtcatcggacttgctcaaactggttccggaaaaacagcggcgttcactatcccaattttgcaaaaattatgggaagagaacgcgggtacaccgtactttgcctgtatcattgcgcccactcggtgagtttctgttcgatgttatgtatcagtacgatcgtagtccgacgattccaagcaagacaagactgactgttttgaccattgctacatatgtacctctttgcttacttcatcagtgagttggcgtatcagatttctcagcaggttcaggcacttggcgcgcccatgcaggtccgctcccaggtcctcgtcggagggatggacagcattgaacaagctcgggcgttgaagggagagacaggaggtggtaagccccatgtgattgtatgtactcctggaagattggtcgatcacttggagaacaccaatgggttctcgttgaagaacttgcagttcttggtaagctaccatccctactttccttgccttggctacaccgagacgttcgattgactaatcgcttcttaaataggttttggatgaagccgatagattgttggatctggattttggaccgatcttggataagatcctaaagatcattcctaaagagcgcaacacctatctattctcggccactatgacatctaaagtcgccaagctacaacgtgcatcattgaataacccggtgcgcgtggaggtctctaccaagtaagtttcaacctttgtttttttttctgtattggcttttgtgcaaaacgttttcttgtttctctcagaggtatagaaaccttgtcgttcaagttctaacgttgtcttcaaaccaggtattctactgtgtcaaccctccttcagcactatgttctctgtccttacccaaaaaaggacgcccacctaatttatcttgccaatgaactatctgccaattcgattatcattttcacctcaacagtccatgacgcccagcggttatcgattgttcttcgattgcttggtttccctgctattccccttcacggacaactcagccagagtgctcgattgggcgcgctcaacaagttcaagagtggaggaaggagtattcttgtagcaactgatgtggcttcgcgtggtctcgatataccttgtacgttccgtttggttctgtcactacatgcaccttctcattcaatctcagctatccgttactcatcgaactcttctttggtcaatcttgtcattcaattccctctctatagcggttgatatagttattaattactcgatgccttcgaattcaaaggactatatccaccgggttggtcgaaccgctcgagctggtcgatctgggaaatctatttcgataattacacaatatgatgtggaaattcttcagcgaatcgaaggtgttattgccaagaagatgaccgagtttcccatggatgccgaagctgtcggtctacttgaggagcgagttggtgaggctaccagggtggcgacgcttgaaatgaaagatctaggaggaagcaagaggaaacgaatcggggaggatgaagggggcaatggagggggcgagggcagaggagacaatggaggaaagagaggtcgtggtggcggaagaggtcggggcggtggaagaggcagaggtggcggtagaggccggggcagcagcagatagaaatgttctttcatcatctagctattcttttcatgtctacatcgagaattaggcatgacatacagatttgaaaatatatcgcatatacgcttcaaaggccagtacaaagaaagggtagcatctcttactctaattcttcgatctcatcaactcgaacatcatagactcatccctattgtacatcccatgttttaaatgaacacaactcaacgtcacgattcaatcgctcgaaggtagtataagttagaaggaagacatttgaaggtagataaagacagcctaaaataatttagctgcctatttgcagtgagattgattacgtgttgatggtcgtttattcacttcccccacacttttcttcccgctcgctctacgatcatcgacgttcttccaccatcaatcgtctccgcactttactcaacatacctacaacttctttctctccatctaattggtctgtgatcagcttctactgttgatggaccctcatgatcagcccataactggtagacgaattcgtccgcgtgctcaatcgtcgaccatgatgtcagcacatgataacccttgccaatcgtcaatcgtcaccaccctggaggatcgcgatagtaaaagaaggaaggtcgaagatctgggttctcgatcagttgagtctggtttgactaaaagcctgtcaaacgaagatacaagcatggtctcgtcgctcgcgactcaagatgaacaggcagaggtatcgggtagtcacaacgaaacacagatagacttgaacatcccctcatcgtcgagtgtacctcagtcgacattttccacatcggcctcttcccttgatgtgagttctcagcgaccgttccttcgcctgtcatgttcgaatcctactacagctgctgatgtataatatatctttaggtcaattcatcaccatctgccgacactgttgcctcgtcgtcaggaacaaatacttcctctcccactcatgtctctccttccgaggacccactattctctcctagagcccgagcacaggagctcatatcgagagtctctttggaactggagcgagataatgcccatttccctcggatggactatgtcgatccttctcccatctcatcactcttccacgatatgccttccacgacaccacgcgcagaacttccatctgaaccttcaagggatcaacaggaagcctccatcgaagtctctccatcagcaccgctatcatccgaagaaccccaacgaccctctgtccaaaatcctcagccttcaccgtcacccattcagcgtatacctactggaaccagtctgatagtaagccaaattcatatctgtactcaaccacaggtattcttgagaagagcatactcactttcagcttaattttccctctggcttggccatcaggttcaaggactcgttcaaacagtcgcccgtcctcggctgaatgattcttctcaccgtcgcgcacgtccctttgcgagtacacatggtagtcgttcgtttcacaaccgttcgacgggtcatgggtctggacaagttccagttttcgggactcgcagatttgctgatgggaacgccgctggcgttgctcaacaaaacgaagtcatcgaagacgatgatgatggtatgcctagtttcgaagaacaagcttcattgatagggggtcttttgagtatggctaccacagccacggctcgtgtaagtctatacatttttctactctttgatatactttataagtcattgagttgtcgagttgacaaccgatatggaacttgaatgcgaactgaactaccaatcactttgacagtcacttctgtccacaacttcagaccttaacgccattccctctactaccatatcgtcttctgtctccgacccagtcagaacagacacacccgacgaaccatctcatcaacctcttgctcagcctttcaacagactaccttctcgctttgcctccattgttgacggtattcaacggagactcaatgctcttcggaatgttacctccaatatttcatctccaagacctcacattgtaactccacagtcttccaatacggacacgcctcaaacatcgagcagtgtttctcctcaagaggaaggtatcgaaagggtccttcggcgattcatgactgaagcctttgagcgtcgagacagaaccagagagtcgggttcggctcgtgctcaatctccttcgttggacgggagatcagaagcagtcgaaggacacgataccaacgcagcttccgttgaatcagaccagagattgttagaaaccttcctgtcaggtctgcaaccaagcctaatggaagctttgatggagttcaataacagttcgtctgaggaagagactgtagaaaacagaatggaagcgaccgaaggtgaaatgagtacacttgcagctgaggaacacatggatataggaggaatcgagtctactacaagcagctcttcaaatcgagcagatgctcctgaatcggaatcgcaggtaaatgggggacggagaatgaattggatgagagttcatcggttttcggtcggtctttcttgagacaacttctgcttatcatctgtcatactcactctagtgtcttcatgacttcctttatacgatatcagcctcgattagcacctgcttcgcgcggcaacggaccttcgccagatggtgcaagcaattcttctacctctgtgccaaatcccatccctatggatgaaagagtcaatgtaacggaaccttcacacgtatctgggtccagtccaaccaaccagggcagcaacgtctctggcaggagcagtgtgttgaatgttccgggagaaagaactgttgttcctcttatcatgggtaggtgtatcgccatctccctgatcttcgtatatgttgtgttactgatacatctctattcaaattttgaaatgagcagttggtgtccgctccgttcgagcacaagatattccaggtatcttcgcttccactaccgctaatgaagaccagctctcagctactgccgctgtcagtcgaaggactacagccctaaattccaactctgattcagttcgaccaaatcgtcaagaacttcgttccgatcgttcaagaagttcaattgatacatcagccaacccaactagaaatcggcccagcccttatgcctcgtctctgcccgctcgcttgcttcgtggtagaagttcacaaacaacgtctgtctctagaacactcgagagtgatgaggatgctgttatgagtggtggatcctcggactctcggtctgcccactcccacacaaggtcaagtggatttggtttacttaggcgggctttaagtggcattattggaaatggacctgcttctccactcagttcgcctcaaagcattgttacatcgactgaatcattaccgagagcaactctagccaggacgtcagctactacgagcgactcctctgcagatacgaccgactccgccgacgaaacggaaatcaggagaagtaacagcttcatcttgtgggtaattggaggcttgtatgctcctgatcaccctatcttgactgcacctggattatttacagggcacttggatcatgatgatttgtggtatgcctgtcaattaaaataagctatatgagtgcccactatcgaggtgtccttcaagaggctaatccagagttttactattgtggtggcaaaactttccaaatcgatgttgctaattaggactcttgccgaacttttaggccaggcgaaacctcccaccgcaacggcgaccgagatcaatagctcaggccttactatcgtccatggctcagaaattgctggtctagtcaaacggggccatatacatttgaataccagcgatcgatgcgccgtctgtcttgaggactatgatgatgagattgagtgtcgaattatgggttgcagtgagtctagagacatcgtctaacaagcttcaagcactggtacttaacattgatgatctactgttgcactagaacacgtgtttcataaagtcggtcgattctttagtttcttttttgcgtagattgtcgagcctcatagtgcatcttgttgttgcttttgttcaggaatgtatcgacagatggcttaatatcggtagaaatgcctgcccagcttgtcggactaaggttagctccgtgtttattcttgttgttgcttgtcatcattcctcctgatgatgtttttatattgacctctttctaatttattgcaacgtgtagggagtgaaggtgaaggctgacgagcaagaatcgtcggtcataaattcgtctgctccggaagacacgatctcactcaatgctcaagcagatacaaattcatgaatcttgatagatttattcacctttgttgcgaagaacttcatttgctccaggctcaaggatgtaagttttagaactggtcatatacacagtttacgatctctctgaacttcgtcttgattagccttctgcaattcctttctcgtttcgtctcgatatttgatgctgtatcttcctccagttgcactgagctttccagcacatcattccccctcacagttgatttcaaaaatgttccccttagtctgggcatttctcaatattccatttcttatcagtctaatcctcggtttttgttgattatttattagtttgatgcatgtactttcatgcaagtcatgatcgacagtgtgatttagcacccttctttacgccagcgcatccagcattcaagtgcttgccaggcagagtcgagcactccatcgttaaaagcagtagaagaaggcgacaaccacagataaaatacagcgccgtcctgactctgatcaacaggccagatcgtgtccggctgagagtatacgatacagatcaagagtgaagatcattcgttgtcgatcagcaaaagctcgctgaagaacagaggtagtaagaggaacaaagctgagtctctcagcacagccggctagccacacagtcaaccacaaagcgggtcaatcgtcaggaccactgcccgatggcggcgatgatgtgaacaagaagcaaccactgcgatcatggcgagagccagacggcccgacaagtggagcgccgtcgacctgaacgaatcccctcagctcaggtgggtggccgagaaagagcggcagaacagaggagcatggtctcagcgcgcgttgcgcgatcaagtgggagaaggaacgtgatgatagtgttctgaatggcggtttggcttgacggttgaagctctggagccaacgtgctgtatgacaagccgcggctttgatgagctgtttcttacttttctggatgaccgagtgagataagaaaacacggagaaggacattgtgtgacgag

SEQ ID NO: 2980 - DNA, 1551 bp, Xanthophyllomyces dendrorhous
atggttgtttatcaccgctttcttctgcctcacacgcaggcaaccaagcatcagttccggtgtcggttgacgactctgctttcctttctgcttgttcttttctttcctctttgcttctactctctagcatatatcatggtccgttggttgctgggagctggacgcttttctaccaagcggagcaggtaagatcaaggcgcagacgtctttattacactcaaactcccaggagggagcaaatcattggatgtagcgtaagggcagcgagaaaggactgtggacgtaagattgaaaaataagaggggcttcatacggtgagagtagaagaaaggatggctcgttacaaaaagggtggaatgaatgtcgagaaaggcaggtggagagagtgatacatagaggataagccttatgaaggaggaggaggaggaagaggaatcggaagaagaagaagacaaaacaaggaggacaacagcgaggagagtacaagatgagaggagatgcgtctggaaacaagtcggaacaaagtcacaaacaactttcaagagattcatgatttacctgcgggatagaacgaatttgttctaattgcagaacacaagttagtcatcgatgaacagaaacagaagtagaaagaaggaacacaggaaagatagatgtagaccaacctcagcaaataaacagtttatgtgaatgctaaggaaaggaaaagaaaagaagagaaaagataagaaaagaagagaaaagaaagtgtcgagcgcagatatatgagtacgaacgcagagcaaaacacaaagcagaacacaaatgccaagatgagaagaaagataaacgggaagacgtgaaaatggatgatgagaaggaaggtaaagagagtgaggccaaaaggacaccaagactaacagccacgatggaaagagatgtctgccaagatgtcggctggaacagaccgagtcaaacatgaagcagcatgattccaacataaagaatcatccttcgcttttttcctggcaaacactgttcgttccaacccctacagaaccaatcatctctgtttctttcagcaaatattggagtcactcgagtgatcagatgaaacccgttcctggcgctgcagtcctttgtaaagacttattaaaatacttcaaacactcgttgttcacgtacttctggctagacaatcaggacagcggaacgatcatgcaattctgcaagtaagaatgatgaggatgattgtaggaaactatgagagttgaagagattccaagcttgagggagaaaagagaatgttagctagtgcactatcaagtatatatacctttcgagatatcaagccaaggaaacacaaggaaacacaagcaagagtgaagagataccaggaaagagcaaagatgtaccaagggagagttaagcaataccaagagagagtaaggaaggccaacgagctacatggtctcgatgctgagtctgttgcaagaatcggtctacgttgcgcaaggtcaccctgcgggttaaaccgggtcaactcatgacattatcatctatgtacctaag

SEQ ID NO: 2981 - DNA, 434 bp, Xanthophyllomyces dendrorhous; identical to SEQ ID NO: 1437

SEQ ID NO: 2982 - DNA, 322 bp, Xanthophyllomyces dendrorhous
tcgccagaaagacaaacatctcgacgtctcgtcaataggcaactgagaaacaagagaaataaacttagcatagtactcggccaccgagcctgtctgcctcagctcctgcagctttctgtcgatctcccggatgggatcgacttctccaaatttcacccgaaggtgttcagcaaagctcctgaaggctctcagccatgcagaccggacaagggtcttgtcttcgtctagaaaggtgtcaacatagtcaaacagaccaccacgaagagaactgatggcaaaaaagtctttactatgcccggtcgcgactggaaagtgatcctgc

SEQ ID NO: 2983 - DNA, 624 bp, Xanthophyllomyces dendrorhous
aggtgtcaacatagtcaaacagaccaccacgaagagaactgatggcaaaaaagtctttactatgcccggtcgcgactggaaagtgatcctgctttgagcgaggaatcgacggcagtcggatcgtcgggagccatcgaacgtctcaggaggcactaccgagggctcaaagaagcgggaagagtctgtgatgtcaacagaaggcgccagagccaacgcctgggtatgagccagttgttgttcgagcgccagaatacgagcctggctctgagctacaaactgatgacattggttctcgtcatcaacaggaagatcaggcatgggttgatcagcaatctcaacgctagaggaagaggcctcttgctcgtcgggcataacgcaaggggtggtacaaagatagaacgagatgggagagagaagaaggtaggagaaggaagaaagaaggaagaacgacgacaagagggaaattacaaaacaagagggagaggacgcgtctggagataagccgagaacgaagttacaaccaccacagaatttacaattggacacacacaagcagactacaatgatcacaaagcgcacgagacgaagagaggaggaggtcctatggtgaagaccctcaggtta

SEQ ID NO: 2984 - DNA, 3347 bp, Xanthophyllomyces dendrorhous
aaaggggagatagctaacgactacatggtatatatgtcattcgagatgttagaccaaggaaacacaagcgaacacaagcgaacacaaggaaacacaagcaaccacaagcaagagcgaagagataccaaggaggagctgagagataccaaggaagagtcaagatataaccaagagagagttaagatgtaccaagagcgagttaagcagtaccaagaggctgttgtaagaatcggtctacattgtgcaaggtcaccctgcgcagatcaaaccaggtcagatcatcacaaacagtttgaaagggtgtttgatcaggagtggctcacatcatatatattgagtatatgttttgtgctgactatcatcgaatcatattactaaatatttgttgtcacaacatcttactcatttcatttactcaaagtttatcagaaaagtattgctaataattagctcaattcagataaagcgcaaaaaaataaatcggtatgaggtctaaaaaacagaacttcccgtgatggcgatacatgaccgaactttggcgcttcagattttcgatgacctatcaacaaccatcatttcataacgccacatatcagttgtgaaaaaaaaattattttgcgaaaacctaggatgattatggtttgataaccttgacgagggtcagacataatctcaattaaaagattgacaaacggttatattgagtgaatatagttgacattccaatgtttggcctcacgaatcatatatattcagctctgtcatactatttttcttcttcaattttattttaaaaactttgatcacaacttgttcgaactcaattgatataacgcaggattttcattctattatcagaaaatgaacatgctctcgtctatatacgtacttctggtcccctatatacaatccttaataagtcatcttctggctagcaattctgtacgagaatagtattgaaaagttcagcgaggtattgcccattgacaagttttgtaactgaacagcattttctcttgaccgctataaatcagcaattttgatatgttcgtgatctatacgagttttgatgcgaaactcattagtatgaatatcatgctctttgtttacgatgttctgctacaaataagaatctctatcgttctcaatttcatacaaacactggatttgtttcatttacgtcatgaataaacaagattgtcatgatttacgtttcaacctctcggaaaagtgtcaagaaatatatagctttgcatgtcactctgattgaagaaggttggtattgttgcgatgatagcctcgtgacgtatgagtgacgatacggctatattctccaatcaagacaatgttctttcgagtaaagataaaaatcgtctgacctcagcgactcctggtctaaagcaaggcttcattttgacgtacgtccggtcttagctcgaagtcaaaaattgagagaatgaaatgacaacataaacttatatccatcgtggaacttgtctctgaggtatctgaactttactcttgcgttgaaatgtcatttgttacgacatatcgtttttgttgaaccattcggcattgtaaaatgaaacatgtttgagcgccgctctcgtgattcgtcattaataacattgtgaaattgaccacattttatggttgacagtttgtcttcgatcgaacattgacattaagtgaaaaacaactacagtcagcacgatagttactgattcctgctcacaactagttatgaagattactatccttatcgagaaatgaacttcatatactttctaggtataaagctgatcgcaaatctttaacgttttctactcaactgcacgaccaatgttcttcgagaagtttcacatcaagctatagacattgcgttattttcattaaatcatgtattcgaggaatgatgattattgaaattttggttgcaaccaaagtttgagtgatgatggatatcgtacgattcatgaatagatttatcaggtcaaactgtacttgtgttgttgacttgttggaaatataaaatctctgacgatcgtgaacattgttattcacaagaaagtcgatagtgaatgtatatggaagaattgtatccttatcatttgttgatggaatgcaaacaggcaagtcaacgagagtacgaagcttcaagtaccatgatgacgggagcaaaaggaatttgacttacaaaagacgtgggcgaagaactacgaattaggacgaattcaaaaatacttttactgcaatagactgtcatttatgcaattgagaaagctaagggcttttaagctttcaatgtatctaaaatgttgagaatgtatgaatcttgtatactgaaaaggaagaaccgttatcaggtgacgaggtaatgagattctattcatggttatcaccgcgtgtgaaaaccaacgttcaacgtcacgacataagagcaggccttatttattcgaagtagagatatgctcatctttgaaacagtatggagtcagtgatgtgtgtcataattcaggcgtcaaagcaaaatgccacgttggaacgttcaaggcaaagtagtagaataaaattagtgattgacaaaaaaaaaaaaaactgtcacgacaggaacgtcaataaaagcaaaaatgaggtaattgggagtacggattgcgtccaacttataagcacagtactctcattctttgttgtgcttcatgcaaagattgaagaacgaaacgggttggagcgtatatagagttgaaagttgaaaacaacataaaaaaaagagattatatataagtcgccggtttaatttatagattacaaaatttcctgttctttatgcagaacagagcaagtcagctatcgataagcacgggatacgaggaaaaaagagaacaaaaaaggaacagataaaaaccagtctcagcacacaaggagttgatgtacaagctgaggaaaagtaaaggaaaaaaagaagaaaagaaaagaaaagagatgataaaacgcatatggatgagaacgccgatagacgatcacaaacacgaagcagaacacaagtacgatgatgagagaaagaataaaaaaacaatgaagagaaaaaccaaaagagaaaatcgaaaaaaaatatataaaaaaacatatagagagaaacagtcacgacggaagaagatgtatgccaatttgtcgactgagacaggataaatcgagtatgaaagaaagcaagtgtaagaaacaagatgacagaattgattcgagaagatggtgccaagaacaccttcaataagggctccgttcgagagagctatgtattccgactcccaagacgacttggtgatcgatggtatgcgcttgcttttcca

SEQ ID NO: 2985 - DNA, 2198 bp, Xanthophyllomyces dendrorhous
  misc_feature (1816)..(1825): n is a, c, g, or t
ttggtctgatcatctgggtgagatactcacccatgtatccatctatccgcccatctgtctatctatcttcatctgacagcatcctccttccgctcttctgtctctctctactcctctttctgctgcctctgctttatctatgtcctctgcgtgctctatctcctctctccgctcgttgattcatcttccctatcgctcgtccaaccgatgatcgcttgccatgtcattcctttctgcaagagttgtggcatacttggggtcagaaacggacacatcatcacgattgactatggagacagtgtgtggagccagagaaagcagaacaacccaaaagaaataaactacaagtatcagactacaggaaacaaactacacgagacaggagaagacatccctaggcaaaggaaaggcaaagaagaaggggaacagaaagaaggagaggaagcgaaggaaagcaaaggaaagcaaagggcacaagagggatcacaacgaaaaaagatagagaaagacaaagagaagactggaatgacaaacggcagcacacaaggaccgatcgtcccgtccattctgtttgccgtgtttgtcctgcccgatcatctccagacatggccgcttagcgatcgctagcttggctcgcccgcagaaagctgctcgtcgtcgatgaacgccactccttgtctccggccgatctgacatccacacaggtcgagcctgtcgaacggaagcagaaagctctgcagagaggaaacgctctgaccggacgaccttggctgcatccttgatccggggagacgccagtttggcaagagaaggagcagaccggtctaggtcatcgacaagctcgaccttgatcgttggtatcgtcggccgtcgagtctgtttgccaaacagaggcgagctagcaggtgaggagtcagaacgctcgacaggtggagcagacagaacggacggagcaggcgggctagacagagcagatccagaaagcttggctgaagataggtcaaagcggcgcttcgcaggacgaacgtccgaccgcctcttctcctcgtcactaccatcatcgtcattgtcgtctttgtcatcatctatcactcttcgtcgcttaggtgactcgaagggaggccggggcacttggagtcgctctcgatcgaccatctccgtccagctcgctgatcagacaaaaaatcaccagaaaaacatcagtcacaggcacaacaagggcgagcaagaagcccgggtgagaagacaggagaaaggctcgacagaagagagacacccacaagaagccgcctgaggcaaaggcttcggtatcgccgatgggttcagaaacgcatccatctcggcatccgtcatcggctccatcccccgcagctcgaagcgctgtatgggcgtgaggctcttgagatacgacctctctcgacactctgtcgtcgtcgtcggtagtctgtgcgaacaacagaaggatggaagaacagaaggatggaagaacggaagaacggaagaaccataccacgtcagtctagaaacaaacatctgacaaactgaaggcgtaagcagccaaatgcatcactgacctcatagcctcggcctttctgacccttccagccctcttgacgggctgaggccggtcgccctgcctggctcgactggccacgttggcccgttcattctgcgatgcagcgataagaaagtcagtcgacacgaccgagacaagccatgacaaacaaggacggcaggcgaaagaagagacgaactatgggcaagccctcgacaggatatctcttcgccggccggagcggcttagcggcgggagcannnnnnnnnngttcggctaacgggtgtaggcgatgcgggcatgggctgcgtgtccgaggaaaagtgcggagcatccaatgaggcgtaagaggggctgaacgcgtgtaaagcatatgatggggaagacgcataggagatgctggaagtgtcagaagtgctggaagcgtcggaggcgccggacgtatcagaggtgtcgagaacgttggagacggaagaggcaggagggagggaaagactgtaacgagaggacgcaaggctgaggctcatcgcggtttgtatgtaatgctagtatccggactgcgtcgaacggtagtgggacaggaaatgagacaagtgcaccaggtggtgtgcgagcagggtgcaggtgagtgtgagtgtgcaag

SEQ ID NO: 2986 - DNA, 27949 bp, Xanthophyllomyces dendrorhous
gggttgtaatcggtcgatggagtgttcgtggttgatggtcggaagagtgttgcaacacaaaacagcgcagtaccttttgtactctggacggacaagtgtccagacagataagcgggctgacaaacaggtatgcggctcggtatataggtcgatgtgcaagtagagcacttacagaacacccggcctgatcacttcatcgacgcgacaagataggcagacagatcaataggtcgaaaggtcggcaggtcattcgctaggtaaaggactggcttggtacaagaagaagtcgagacatctgacatgaacagagcgaaagatcacaagagcgggaccagctagcgcgtcctgagggcgagcgactgtccggacggccagctagccaccagactaggcatgaccaccctggccatcggtcgtctatcactgagaagcaagtcaaagaacagagtggaagatggcatgacacacagagatcaaacagagaacagagaaaagagaacagagaggacaggggaaacggggaaagaaaagaaatggagtaatcgaggaaaacaaaggggaaaagggactgcgttctgtacgaccaggaatggcaaacctgcgtatcgtacctggccaagctcacaccacacagctcggcggccgacgtccgggtacaagacactcgatcgcttgctcgtccgttcgctcactcggtctgtgtctgagctctcttcgtcaggcagactggtagatggacatgtgtggttgttggcagcagcgggagcaggaacagaacgaacgagcagtcggatcgagacatggtcagcttgtgcacaagagaaagcagaggcaaggcagtagaacacatgaacatccagaggagaaagccatcagagtgtcagagtatcagagcaccagagtgtcagagtgctagagcatcaaggtatcagaccgtcgggaggtcaaggtggacagggatgtcagtccagtcagcgacgctgcactctggaacaaccgaatgagccgccgacaagagatacagccgacaagatctttgcccatccgtcgcaagcgagtcagttactagccatggtcggtacatgcagaatcacaggtactatcacaggagcctctacgggcactgatgctggtattgacaccagcacgggcactgggtaagtgaaacggagatggaggcttgccggactcgacgaccggatgtagtccagctagtgaccgcgactagggatgcgatcgtagttacgacgactgtgcctttcaactgtaaccctaatcatagtccggtcgtacatcgagtatcaggccatccacaccacgagacgacgactcatctagagaactatcaaatggcatgccatctcgcgaaggcaacctcgcttgaccttgaaaaaccttgtctgttaggtcttgtctttaccctggcatatattatatgtctcttttagatgaatgcgcaattgatataagaaagaaattcacccggcgatatacatttagacaaaagttcagcatttgaaaatgttgtcaggagcagcaaattaaatgatacagaacacgtagatgtacaggctgtaggccttgtgaaagattacactgtatggtgacaatttgcgtgaggagagagattctacggacacgatgggaagaaagcgaaatgataggaacggcgcagaaagccttgaacgcgcgaccaactagttcgtcttggcaataaggagagatggccaaaagaaaacttattcgtgaatttgtatacaacaatgataccacaggatcagcatgagagtagaaaatacatgtcaaagcgcagcacgagcccaaaaagcagaatgaaaggctggaaaaatccaaaagagggatgaacacggtgtagaaagaagatcgccgtcttattcgatgcgaaccattgctacacctagctcaacatcacctatctcacgcaagcctccctcatcctcatcctcattcaattcgctttcctgctctacggctcgagctgaaatcaattgagtatcctccggcattttgatgaaaaccgacaagtatatagttcgcgaaggtaggtctgctaatactcgatcctgaacggacaagacacttattgatgaatccactggtgccgctacacccgtaggattggtgagttcgggtgtcggatgtattgagaacagattctgaagaacagatggcatttgtgagggaatcagaacaggtactggccgtttaaaaggaggtttgattggctctataggaataaagagagaaataggctgaagagagtccccaactaaggtcaggactgataagattatcggtataggatattaagacaacctcgatgattaaagacgtacacataagtgtttccagtcgaaagcggctgtattgatcctcatgttcagctggtcttctccggtggtgacctcccataagtcaggtgttctgcccaatgatatctcttttgttgcccttcgcctttgattaggtacgaagagtgtgttgggcatgccaagaaagctccgactatcgagtccatcggatgtgaggccagaactgttcagtaggtttgctatcgctcgaagctgagcactattggcacgttgaatctcttcacgatcctctgtagagatgttaagagataacagatggctcctaagacggcgccgatacatataatttctggtcaagaaacctgttgagatcaggagggacgcaagcgaggagatttaggagccggtcgaatgatgaggcgacatcgcaagagaggggctgtgtaaagacccggaactacacggagtacaaaccagcacataataaaagaaggatggccacggtggccacgaaagtctattgacaaccacaggaactgggggtcagtcactgctacaattggtctatggcccggatatgaacaaatcgaggagttgggataagataagagatggagggtcagcaagggcagggttgaaacctacgaaaacatagagggtggctgaaggcctgctcgggctacttgaaacagtagtagctattggagataaggtagaagtagacatgcttcgttctccaaaaagttgaagagtgtcgaaggtcaaagacggaaggaggagagacgaagttgatggtagggcataactggaaagcatcgctcgggatccttgtaggattcttaaaacgatgtaatgcgggtcttattcgcctttccttgttttccaagccctaaatagcaaaattgatcttcgcacttccctcatccatcatctaacaatgtctagatcttttggtcagaagactcttatttcgttatgaccatacgatatagaaacgacctgaccatcatatattaatttatctgatcacaatagtctttgttaccggaaacgccaacaaactaaaggaggttcaagtgggtgtgtttgttgccggatgttcactcttctttgtctaggcgtttctgaccacccaggcatgagcggttcgttgtattcctaggcgatcctttcggtggatgccaatgggattcaggtatcctccgaagctctagatgatcttccagagattcaaggcacaaccgttcaggttgccacagcaaaatgcactgcggccgctcttcaggtcagtttatcggactcaacccaatatttcccagcatactttttcgtttgtctcttgagattgagatttctatgacgactgatatatctgatttctgtagattgaaaaagcttgtgtgaccgaggacacagcgttagccttcactgctctcaatgggctccctggcccatatatcaaagacttcatggaagctgtcggtcatgaaggtaagtatctggacacaacgtattttctgggttacagatgactatagattatgatgatgaatgtgctggttaattacttgcaggactgaacgcgattctcgctggatttgaggataagtctgcgactgcaatctgcacatttgcctactgccctgggcctggacaagcgccactcatctttgagggaaggactgaaggaaagattgtgcctgctcggggtgcaaaggtctttgggtaagcaattagcaattttgaatactctttgtggtcatacaggaagttgcatctctccggatgtttgttgtttataaaacgaaaggaaacgaccacctggcttgagttctgactatagcattctggttgcttcatttccttcgtatattcagatgggacgcagtctttcagccggacggattttttgagacgtacgttcaacatcttactcgtcctttctctctcgacgccgtaaaggtatcgattcctgctcgtttttcgtttgacatttgcgcgagggatatttctacaaaacaaagtattaacgacacactgttccaaatctctgtattctcacacttttgaaccctcttcgtacaatagatacgctgagatggatcccaagaccaagaacactatctctcatcgataccgagcattggcgaaactaaaggatcatcttaacagcctaccagagagctcatagatctagatcatgtatggaatcgagagaacctgacagattgtgtttgaacattcttaatacaaaatgcccgatgtgcatttaatagatttctcatattcacgttctcctcttggctatcgcttgcattggatgtgatatatgatcctttctcaagcctatcaacagttctctctttgttgcatgacctctcaaacgaccctcataagaatggttgagccgagatatgtactttgtatttctttcaaagaaattccccaataatgttgaagaggccgtacatcttcattgatatatccttgatctcttcaacactattaacgtacccaccactccgactgtgatcccacctaaaacaggtaatgtccctcctaaccaacttgtcagtcgtttcccggttttccagctcttggctctcaacttgccccatgttgagtcgccatacgccacgtcttcccaagctcttatttccccagactcccagccacctagtacagcgcgcatcatcggctcatccatctctgccagctcgtccagactccaagtatcacacacgtcaatcatccagctcattcgacgtgctcccagcggaccacccacaccaggcgcaatctttcttaattccgctcgaagctggccggtcttcaagattgcattctcgatgttgtcaggtaaagataactcgattcgttgccgaatagcggcagctaaccggggtcctcgaccggatgtagagaccataatttgaaggggacctttccgaatctgagagccaaagtaaaaatcacacttttggttgacgaaggaaagagaatttgagatcgattaacaattgcaaatattgattcatgagaggaaatcggaaagaagagacttacctgagggggaacatcggccacatttaccggtattcgaagctttctagataacgaacagatccttgttgataatgggttatcgtcgatggctgtcaagatcatgtcgaaccctatcaatcgggttcgcaatcaatagttttggatagaatatacagaactaattaacatcatgaccatcgttcctacatctgccgaggaagctctcagaaacaaaaagatatattacctgttaagaactcttcctgctcatcctcttctgcccattctctctcaagataacagtcaactaaaccttcgacgtctactcgatgtttgacttcgtccgttaaaccttccctaggtgcaatcaatgtcaccttagctcctgcctctaggaggtagtataaacgaccggtggcgactaccccacctccaacaaggagaactcttcgaccatttagtctccaagctgaaagaattgggtaaatatgatgtcagtattgagcaatccatccacatatcaaagatgaactgaatgatgaacctagcatgaaggaagtgcccggcacgatcggaggaatctcagttttactatcagacatactcaggtcagtcgggtacaaaagtttcaagattcttatgtgacttgtatggcgagccttttaagatgttgaaaagggtgaaagagaaacgactgaggatcaaagattagggatgaatgacgaaataagatatggctctgaaagaaaagatgatcgatcgatatatttcgttaaccctaacaattgcaactgaaacattctaatcagtatcgatgtatggatgtatttcaaccaaatttaacctcaatcaaaaggtagataaaactagatttatgaacaaatagatgacatatgtatatcaggaatctatcctgtgttctttatatctttggcactctgcctttcagcctggccttctcctcctttcgttcctttttttcctccttcttctcggagtttctcttcagcaaacccatcatcgtcgtgttcttcctcgctagatctctcttaccaatccgatctctatccatagaagcagcgcctaccgtcaagcttgtctgtccaccggacgaagggttcagatcgaatccgtcataccgactaggatccccccattctttcggttgacccatcacagccatcgtcggaatcgcaggaggctgccaatcgtcttgttttgaagtgttggtcgaagtgtgtgcagtgacctcaggcatggagtcctgcgaaggcctgtatggcctctcggtcgactcggtcgatggccgataagactgagatgtaggcagtgattggtaggttcgaggcggggaagaagtttgaggtgcatacaggcgctgcagggtggctttgctctgtgtctcgatataagatatatcttctgccaccgcctatagatttagtcaagacagaaccgccattatatgagtactatgaaacggtcgaccaagttcaagaagaaataagattacaaacgaacgttcagctggatcttgtagccgaggattctgccatccgtctgatctagatgaagaatgacttgatcgatggcctccatcaccttgctgaccccatcgtccgcttcaagcaaggaatgaatgctggcctatagatgtggaaaatggagtatatcaacggacgtgaagaaaaagaagagaaggaaagcggacaaagatctttaaacctctccagagtagttgcttacctcttctaaagcttgcagttctgctcctagtcgtttctccatctccccttttccatctcttcctatcctgccactgtccgccctctcgcccgccgattcccactcccagccgtccaacaactcttctacattagcgagaattacatcttcctcctcgtcattttcctcttcttgttctccgatcagacccccacctgtaagcggcgtgagaggatcgttggacagaagtagcgcacgcgagaacgatgtctcggtcttgagcttgaaaggttgcggcggctttgctcgcgcagagccgttcggtatagaggccatgtttgttgagacagagagagcagcaggcgaggctggtcgtagggacgtctggggtggtcgaagaagagagggtggataatttggctccaaaacagaagatccatttgatgtgatgacggatgccggtgagacttgtggctgactcaggctaatgatcggaggggccacgaaggtttcgacaggcggaacacttgaagatttgaccgaagctggaatttgggtgacaggaacaggtgatagattggtggtctcggcagaggttggcaaatgcgtggatgcagggtggtcaggcctggaggcgaaatgagagctcgaggacagttgatctgcctggtgtgataatacagctaattcgaattgagcagaatctgctcttagagtagttccttcgccaggcttctttcggatctgccgcgctctggaagagtccgtgttggcggattcaatatcgtcgctgggggagagaataatctcccgaccaagccccgaaggctgccgagcaaggtcttcacggactgagggttgcgaagaggtagacgtccgatgtggtagttgtgaggaggatgaggaggttgaacgagagggtgtgggccggactggatgattagcagaagaaggaaaaggcacgtttatactggctggttctacttatcgcaaatcgcgtactttatcaagtcgagctctgagatgggtgtttccaactaggccaagagcacgtaccttgttctccttctttaagcattttcaaatctatgcctatcaacctgggcattcgaccattcatgtattggcggaagatcttgatgctggcctcgatgaaagcagcctgttcagcctcccgctcggttgcgtaccggtaggtcttggacatcgtcaatgaaaagtgtaagggctagaaggatgggccatggagatgagcgagtcagcttacatccgcatctgtatcagagaggcagagaagaagagaagggccaagagagaacgaccgacatctacaacttcaattgtccgtaaagattctagaccccaagttttccccttcgagaatgttccgttggaatttctttttgctttgtgaatgaagcatttttcggactgagtagaagctgttttaacgtcgaggttgctgtcaatagacggtctcgccttcatgtggatgtacagttcactagaggttatactagcagatactcttgaggtagagctggagacgaaaagaaacatactggataagatcagatacctggacttgacacctccttcatctgtctcaaatatctttacgtgtgacacatatgtttcattcaagttatcgcctgagagtcctgacgtggttgaggttgatgatgatgcgtgggaagagaaaagggaggcgatgatatctgtcttcgtggacgggcgagagtcgtgagggattggttgaggtcgtgacatcggctcctgaaaggggtgagtaaaagctgatgcagctgctgaatgagagcttgagagcacagggagacgaaggtaactctcaagggggtctgtctgataaaatcaatgtagacggtatatccgtcgagcgagaacatggacgagatgagagggaggcgagagatgatcatagttacgtaatgatcgcgttagagaacgagcctgatgaatttgagcgcgtacagacttcaggcctcaaagttgatagataactcatcaaactattatgctgctttacgtgtccaactacacatctcggaggcgctgtgtcggtggcgtcagcaagctgtcaacatgatgctagatacagagcacctttaaggagagtaatcataaatcggccgtacatccgcgcgtgcgtcgacgttcggtcgcaagctcattgccgtctcccgagtcggcctggtgtgatacacgatcggatatgcggagccgatcgatacggcgaacatggagaaagagaaggagaaggagatgcattactcagaacggaaatcggagacttcagacggaatattgtggtcatcagccccatcaacggtgtatcaaggccgaaggcccggagtacgaagaaggtgaaaacggcaagattgataatgtcaatcaaaactcaatgagcgaaatatattggagtaagagcggttgattggaaaacgcggaagcttcctcaacagtgggactatagaacaagatagcttagtgacctactacgttgacgaatataactactagggctttttttttttcgggggtccaggtcgatcggcagtttggcagataccaactgacctgggtcaactgattggtcggcatctactgcgcacggcgttaccacacgttcggcatagatgatcaaaattcattacatcaaacggatcacggcggccgtaggggttctctgtatgttccccctcaaaccgtactgcgcgtcggcacacataactaggctcagaactgagcctgacagagccttgccgagactgacagagaaaacatgaccgatcagacggcctgcgcgtggggagaagacaaaacagacagacgaaagaggaaagcagacgacagaggacaaaaaaagacagataggacaggcaagaaaaaaaaaagccagtcgggacagtcccagaccaataaatataccccccttcttttcctctttggttccatttcttttcccccttttcttttcctcacgacttcccttcctcccctctctccatcatcctccctagtcaaaaaagccgtgtgtggagtcgctctctcatacttagcagacagctattgctttttaggacctttctttctctttcctttccgtccctccgaccacctatctctttccgtttttttactctcgagtcttgttaaacaagttttctggctatccgcataccctccaaaatatattaaacacaaccccttaatcacataattcatcatggacgagaagaagcacacccctgatgctgtccctagtaagtattttatagttacagaaagcagcatcgttcccttgagcgcatctcttttgcgttgaaggatttttcttcgtccctctcagaattctgccgagctaaattctatttttaccacttgttttttttttctctcaaagctgaggctcccgtcgaggagaagaagaagcgagagtacaaggatatggagcacaagagcgatggagacaagcacgctctcgttgatctcaacaccgttcgtcctttgtttttttcttcttggctctatcggatctaaacggcctgtcgtcattggctattgaggggggctccacgtactaaacccgagtctgttttccgtacacgtttacagattcaattcactgctgacgatctttacgacaaggataaggtcgatattgagcatgtcgttatggaggaggtcttccagcttcttcagtacgttttcttctcgtcccgattgctcttctaccgtcttaacgccttttcgtctcgttctgttttcacttcaggtgcgatgagaacggtttaacttcggccgaagctgctcgacgaattgagatcttcggtcctaacaagttggctgagaccagcgagaagtacgttacgtctttccaacatatcactcgttccattgcatcggtgattaatcccatctattctacctaattttttgtagtgccttcctccagttcctttctttcatgtggaaccccttgtcctgggtcatggaaggagccgcgcttgtcgctattgccctgtccaacggaggaggacgacctccggattggcaggatttcgtcggtattgttttgttgctcctcgtaagtttcatctttttcttgaaagccttcaatttaaaagagcgagaaactcacgttgtcttacacagatcaactcgactatcggtttcgtcgaggagaggaatgctggtaacgctgttaaagctctcatggaatctcttgctcccaaggccaaggccaagcgagatggcacgtgggccgagattgaggttagtctttcccttattttgtcagtgaccacgatcacaaggctgatctcttgaacccttatctttcacagtcttctgagttggttcctggagatcttgtttcgttcaagcatggagacgtctgcccctctgattgccgattggtcgacgctgtggatgtttccatggatcaggctgccttgaccggagagtctctccctgtcgggaagaacctcggtgatgagtgcttctctggatctacctgtaagcagggagaggccgagggtatcgttatttccactggacccaacaccttcttcggtcgagctgccactcttgtcggagctgagaacgattccactggtcacttgcaagccgtccttgccaagatcggactcttctgcatggtttccatcggtatctttgtcctcctcgagatccttatcctgtacgccgatttccgatactcttaccgagatggtctcgacaacatccttgtgctcttgatcggaggtatccccattgccatgcccaccgtgttgtccgttaccatggccgttggagctcagcagctcgccaagcacaaggctatcgtcacccgaatcaccgccatcgaagagttggccggagttactatcctctgctctgacaagaccggaacgcttaccaccaacaagctcacgatcgatatgaacgaagtcaagacttacggacctttcaacgctgaggaggttatgatgcttgccgcttacgcttcccgagtcgagaacatggacgctatcgatggatgtgttgtcggatgcaacggaggacctgaggcttcccgaaagggtatggagcttttggacttcattcctttcaaccctgttgacaagcgaactgctgccacttacgtcgagaccgccaccggaaacatccgacgagctactaagggaatgaccggtattatcattgatatttgctcccgaaacaagacttccgagatggaggatcagctcgagaaagacgtcgaggagttcgcccgacgaggtctccgagctcttgccgtcgcccacgaggatgttcttgacaactcccgagagaagggtgctcctggaaacggattcgagcttattggacttcttgctatcttcgatccccctcgagacgacaccaagcagaccatcgatgacgctcaggctcttggtgtcaaggtaaagatggttaccggtgatcagctcgccattgctaaggagaccggtcgacgacttggtcttggagaccacatgtaccctgccaaaatcctcaaggatggaccacccgctggtggcaagtacgccacccttgatgagatgatcatggatgccgatggattcgccggagtgttccctgagcacaagttcgacatcgtcaagcgaatccagggccttggacacctctgtgccatgactggagatggagccaacgacgcacctgctctttctcgagctaacgtcggaatcgccgtcgagggagctaccgatgccgcccgaggagctgctgatatcgtcttgaccgagcctggactctccaccattgttcacgctatccgaggatcccgaattattttccagcgaatgcgaaactacgccatctacgcctgtgctgtaacgatccgaatcgttgttggatttgccgtgcttgccttcgcctggaagttcaacttccctcccttcatggttcttatcattgccatcctgaacgacggaacgatcatgaccctttccctggaccgagtgttgccctccatgactcccgatcactgggacttggccgaaatcttctcctacgccgttgcctacggactctaccttaccctttccaccgttgttctcttcatcgttatgcacgacaccaacttcttcgaagacaggttcggtgttgaggccatcaaggaggtcaacgataagaggggtcacatggttatctacttgcaggttgccatcatctctcaggctttgatctttgtcactcgatctcatggatggtctttcatggagcgaccctcggttgccctcatgcttgccttctgcctcgcccagctcatctcttccatcatcgccgccttcggagattggggtttcaccaacgttcagtcgatctctggcggttgggtcggaatcgtttgggtttggaacatcgtttggtacttccctatggaccttgtcaagttcgccatgaagtacaccgtcatcgcttggttgcgaaagcgatctgctgccaaggccgaggccattgctcagctggagaacggagctcctatgcagcgaaccgtctcccgacacgagtctttgtactccaaccgaacgtcgttccttaacaagaccgctcgacgagtcggactcggaaactccaaggtttctatgtctgctgccgagcagcagcgattcggatcggctcaggccgctcagactggtgccactttggcccgaaacccttccagggtttaaagctttggtttctccgttcctcttacctctgcttttcattcccaatcctattagactttgtttcaatcccttcgtctgtttcgtcaaccataatttgtcactattcaacctatctcgttgtatattgacttttcttcttccgctatcccttgttcctctgcccccctgcatttcccgtttgtttctactttcgtgatgatagacggcaacttattttcgagctttgttcctgttctttctctttttctttttataacaactcaagcgtcacataaggctaccccccatcgcccccttctgtcttcagaacccaaagcttgcactcgccatgtacactgagggatccgacccacgctcctttataaactcgttctatttaaacctcgctgtgcacaacaaattaaaaagggaaacattttggtgcctcttttgaacatataggagaaaaactgctcgagcagaccgactgagtagggctaggtaactacttgtagaaagcgctctttacatacacacatgatgtcaggtatactgaatcgactagagttttgcggacgcaatactccagattgatcaatccgaccgtccatcaaaactgagccgcagagaactactaagcagttcgatcatcttcattcaaagctgcccatccggggtcaaaacactttgcctatcatcggcactcacggtccggaaggctgacgaataatccatgcttaataattctcttgtcaatttgttgtaaccttcatcttatctatatttccttcccgcgtggatcagttctccgaagtaagagaatcattcgacgtggttgtgaagagaacatgattgcacataagcaaaggcagtaatctcattctgttcaagcattcttttcttcctcttcttcttcttcttcttcttgatcctttgaagttttcaacatctctcgtgagaagaacacgcgtccttaagtcactcgtaggtctctttacttcatgtctttgtgaccggaacgcgtctccaagctcagagagatgttatcattgacaaaacatatcaatctcatacaatcaatctttcgtcccgatagatatagttggaaacgttcaatcgaaacacgagagctcaaccaatatcttctacagaaaacaagacatctcgtgaagagattgtgatctctgttcttgaaccagaagattacctcaaaacaagtgccgctctgctctcggcgtacaccgatccggacggagcagaaaatccgcatggcttgttccctacacatctcagactggaaccagaaacttttattcgttcgatatctcttctcttcctctcttcattcttgcattggcttcacccagactcaataaatttgttaccaaatatgatcatatactgtcgatattcacaggtcttttagccaatttatacgcccagcggatcccctcatcagtaacccggtacaaggcttgtctggcttccgacccaactgtgcctgtcggtttggcaatctggcaggccgtcaaggatcggacgagtacagctggtgaaccgacggctgaagaacaacaagaggaggccttggtcgaggcgtggaataaagaaagacggacagaattagatgccgaatttgagcgtgctgtggaccgcgtgttctacaagaatatgaaagaagcttatcattcagtcaaaaaagacgttctccaaggaagaaggtgttactacttggttcgtcctggggcatttcctgtagattttttttaaaaaagaaaaaaacctagacagggtcgtggcttggtagcgacagcaatctcaacgcggactgagattgttgtctgagatcaaacacattctgttttcttgactctgacgctattttgttcgacctggtcataggaacatttgtatgtacatcgggaccatcaacgcaagggaattggcaaagcacttttagagattggaatgcgcaaagcggatgaggaaggggtcgagtgttatctggaggcatctctcacggttcattcttgttttggcctcctctttcaacgacgacaacaacagatggaataattaaggctggcgttttctctttttggatcgtacaggggcaaccactatacgaacgtaatggatttgaaatcaaggagtgggtggagattaaggagggagatgactatgtgacaaggctgccagctatgatgcgcgctccgtccaaaatgtcttgagctagcgtagttaagagacaatgaacaatgactttccttatcgacatatctaaacattgaacagcactattgtccaaccaaacctccctatcgctcaagagtacttcgaatcagcaaggccaaagtagagaaattcgaaataaaattctttcaagtttctatggtcgttagaaaagttcctttggaagacctctctgacaagcttctaagcaatacccaactcgtaccgtttccagcccaacaccgttcgacctgtccatctccatcgaacttccacttcgcttcctgaccctctttcaaattggactgatcgtcttttatgctctggtcgcttttaatgctctggtcgtaactaaaaccgctggatgatgcaggccacacaagtattggcgtaggccggtcttcggtgtgcccatcacctagattgccgtgctcgttccagccccaaccccatatctcggcccgtccggtttgggaagatctatgtaaactgagaagatgggctgaaccggcatacaaagactccacaggtggactcgatggcgggaagacaatgatagtagacatctcactcgctggccctaattgtccgtttcgagattgaccccatccatgaatctcggaacaaggacgcgcttcgatagattccgaggtgataggagaaggacgatcaacaaggatgaagatagcggaccatgtggattgaacttgcttgacacggcctagcatcgagatgctgggaggtggttgaagggtcggccctccctgaaacacaagctctgaacgatcggaagcagtgagatagattgtatgactcataccggaagatacagcttggatttcaagttgagtaggcagacagagaggcgttggatgatcgacggtgttggacaggaggttgtctgatgacaaggctgatttcactcgatgtcgtcctttagatatcttggaagagggagtgacaggagcattggctggacgggagattggtcctagttggccctgtcgagcgcctccccatccaagaactctttgtgttcgcattccggaccgtcggtcgacgaggacaagaacgacacttcgtgggctcgaagaaatcatttggatgtcttcgtccggaaaaatgtgccacgcatgactcccacatgcagaggaatctgttccgttgcccaacacggaaacatcattggagcccatcgctaggagaagtgctcgaggtgctgaattaggggctgatactgaagaacaagagagaacagtaaacgcgatgaatgttgtattgaatgatgaggcgatcaaggtgggtttgtatcgacctaggtcaaccgaagcgtccgaacaactgtaggtaggaagattgagcttccgaaacccctggcttgggatcaatgtaggcacagggagaccaagttggccttggtctgaactgccagttccccaaacttcattagtcagttgaccagttgcatctcggatagacagaagcgcaacagtatgattggctccgagggctaagtctagaacatgctctgtgcctcgtggtgggaacacagacagtaaagaagaggcatcgtgacaagctcgaaaaacatgagtatcatgaggaaacgagtggcctagctgaccgccggcgttagaccctgtggatatcaaagtgagcaccctaaaagatgttagtaagataagattaaagaaaggcaaaaaaataaagtcagctgaataaaagaagaaacacttcatgatgggttcatgatgggttcacatttgatttcttacatgaagtgtatgagctgaaaaaaaaattaagcgctggataaaggacgaccgttgaaggatagctgagaaaagatcaagatggagatggttgatctgaggaaggaaaagagcgataatcaatcggcatcagacctcaacattgactcgatagatatttcggtgagtctcaaaacggttagcgtacccagccataagcggggttgaatggcaacgaaagccgaaacgatgatatcacagatgatatgagaaggtgaatctcacagaatatgataggatgaggctgctagaaaagaaattaaagcagctcttttctcaatcattaggattttggtggcttttgactacaaaagtagaataattcttgaattaaaagtcgacgagggcatcttctgattttctctcttttttcctttctgtctttatcgctcgctcactgctttctttcaaccacactacaagctcacgtacacattatacttcgttagcacagatggctgaatctatcttgcaaaagtctaaagacaacgtcatcaaagctctctctcaggctaccgagtcactcggagtcggaaccagtcagtccagtctttcctatctctctttttggtccctctctccacgagcgggatatcacagaataggcaagaaaaagaaacttcatcactgaaattctttcgactacttttcgaaccctttctcgtttgttcaactagctgtctatgtagatgaaaccttggatgcctcgtccctttcaacgaccccaacaggaaccaaagaggctccttatcctagctcggtcgccgccttcctcgctcacggtctcgaggcctcgatcatcgtcaagaaggccaagcttccctccgcgcccgccgatgagcctgctccggactacgagcccattaccggatctggattgaagaaagccaagaagttgtatgagcaggagaagaagaagttggagaaggctgaggctgggaaagagaaggcggccaaggaggcagctgaaaataggttgagagaggaaaagaagcgagaggaggccaagtccatcgtcttgaaggaggatgagtcgttggaaaaagctatcagggtgagttttctttacgtttgcttcactccttatcgttgtcctaagcaagacgagatctagatctctcgagtataaaaaagatgtcgactattgtaagggaaaatatcgtatctgatttttttccccttttgaatggtgtagagcaaggttttttctttgactgagaagcgagacaagcgcgtccgagttttcggatgggttcatcgattgcgacagcagaaggacctcaccttcatcacccttcgagacgggtctggtctccttcaatgtgtcctctctggagatcttgtcagtcagcttccattttttatgattggggatatggccactaatgagtttatgcgcattctcgcgatcaatttagtgcaaaaccctagatgccttggatctcaacttggaggcttctgtcgagattgtgggtaccgtcagactcgttccagagggagctcatgctcccggtggtcatgagctcatcgccgactggtggcgggttatcggagctgctcctggtggagaggaggccttctccaacaagattaccgccgtacgttatcctctccttatccattttctgtcggtacatcttcatccgccgatatagaactcaaagaccttatgttatacaaaccttcaggacgcgtctcctgatgtgattgctgatcaacgacatctcgctctccgaggagaaactgcatcatccgtgctcaaagttcgagcatccgtcctttcttcgttccgaaaggccttcgaatccaaggatatcctcgaggtcaccccaccatgcatggtgcaaacttctgtcgagggtggttcatcgcttttcgtgatcgattactacggtaccgaggcttacctcactcagtctagccagctctatcttgagacctgcttgccatcgctcggtgatgtttattgtattcaggagtccttccgagctgaaaacaggtcagttctccctcactagcgattggcatcaaatgcaagtgattactgagttgttctggtcgttgaattcctcaagtcatacacgacggcatctttccgagtacacccatttggaggctgagcttgctttcatcacttttgatgatttgatggatcatatcgaggatatggttagtcttttctctctacagaatagttttctttcttcgcacaaggctcattctaacgacttcaaaactttctttattataccgatggcaatgtttgcagatttgcaaggtcatcgaccaggttcttgccgatccgatcacatctcagttaattcagactctcaacccatccttcaaggcacctcagcgacctttcacccgactcgactaccgacaggccatcgcttacctacaggagaacgagattttgtgcgaggatgaggagacccatgagatgcgacctcaccgaattggagatgatatcgccgaggccgccgagcgaaagatgaccgatcagatgggtgtcccggtgttcttgaccaggttcccgaaggagattaaagcattctacatgaagctctgccctggagatgaagcctacaccgaaagttgcgacttgctgatgcccggtgtcggggagattgttggtgagttggctgagacgcactttcctattgctacagttgaaagattcctgttgggactgagctatgatttcacttaccgtccgaaacacatcaggtggttccatgcgtatcaccgagatcgctgagcttctagctggctacaagcgagagggtattgatccttctccttactactggtaagctctctctacattctaaggagaaacagtctgagatagattgaaaatcttacggtgtctacatttgacctcttccaggttcactgatcagcgaaagtacggaacttgcgagcacggaggatatggattgggagttgagcgattcctagcctggatgaccggccgatggaccgtcaggtctgttatgtttcttctctgttgcctttattttcgtctgactgatagtcttgctttgtgtgaatgccggatacatctagggagtgctcgctttatgctcgataccctggtcgatgcaagccttagataaagagtttgataagaaaattcctggagcttccgagtttatctttccatttttccttgtctgatttctgggtaatccttcttgttcttattggagatgagtggatacatggggtttccttttcaatggttcgaggatcaagcaacgatgatgacaagagatgagtggaaaggagcaaagaactccaaacgaaaaagaaaaaatgctttacaaatcaactgtttcataaatcgaactcatcatcactctcgactgtggcctttctggagcctcctttaggcaccctcttggtgccagtcccgatacctcctccgtttctgatttttgatgaagctgcacgactcgagccaaacccttcatcttcgtcttcttcgtcctcgtcttcgtccgacctggcgcttgaccgaggcgggtttgatgagttggcttcggaagggatgtgagtggagagaatgccgtgcatcgaaattaacaggttctgaatatctgtcggataaagtatgagaaagaaatgagaagagaatgatggatgagatacaagagcgagtcggtaacttctttgagtaagaagatacaaaacggaacaacgaacctcgttcattgcctttccccaaaatgccctctcctcccacaatctgccctgtaacctctccttttcgatagacaatcaacgtcggaagaagtctatcaggatagttctcgatacacttgtttccgattatcgagataaattttgtccgagggtatctaggagcgagattttgtaggactttggagagtctctcgcacacaggctcgctatttgtacatcgtgggccgtcacgccgttttgagaaagtcagaaatcataccaccaggtgatgcaaacagagggaagaaacggaatagagctttggacagaaaactaaaaggaaggagccgtgcacgtacccgtccttgtaaagcaagcataccactcccgttcctacgccttttccttctccctcgtcgtcctcgtcgtcaccaaattcttcatcgaccttgcttccttcggtgacctctttgctccagctctcgcgaccgattggataaaccctaccgtaccgagcctttttctcctccttgcgcatctccccaagtcgtttccggcggtaggattcgaacagtcgttcttcgtccgaatccggtgtctcctcggccatcgtctgcaacgttgcgggatttgcgagcgagagcgttgtgtgaagaagttcggcatctgtcggcatgaactccgagggcgacctttgaaaagagaggcagggagacagaggaccaagaggaaaggagatcaagaaacgtgtatacagtttgagaagcagatcaattttctagttgacatggagaattctattcaaggaagaagagtgcacacttacggaggatcgggagcaggaccatcgatgataccctgtgcgatcaaagcatctcgactaagaggggtatgggacatcaacaaaaaacggcgatagaggagcagattacgagtgagcttctgaagcggctaacataaacccagaataaagaaaacaacatctcaatagacctacaattcggagtcttcgttgagattgaccatctttgtttgctggttgctgtttgtatgttacttatctgctggaacgctggacgagctgatgttgaagaggtcacaggctgcgagtcccgtgatcgggctgtgcgtcttcgaggtaacactctgtctacacccatcctctaaatctagattcactcgtttgatactcgagtggatcatcgtcttgagatcagacatcatgtaaggggagaccattgaagcgcaagagatactgctctgttttctaaacagatcaatcgaaactaagcacgaagaggcagatgaacaaggacactgccgggtcttaaatcgtaaccaggtggtttatcgaatttgaactttctactaatctccacatttcttcccttcaaacttatcctttagcttctacagcttctgtgtcttctttctttcttctcatctttccactaccgatctacttgttcattcacgctcgtgtataaccggcactcggaccgacaatgcagtatttactctccagatctttcaggccatcggtgccgctgtctggccgaacgttccattctacgccgaccgtgctcagagctcggtacattcccaataacaaccagaccactcgaacgaccgcttcggctcgtagacaatacattgccaagatgcgtcgatcggatcaagatggaaacctctacccaggctcgaatcttcaagagaaaccttctcgcttcctcaatgcgggtcctcaaacttggcctccgccaaaatcgtattcatccaaccgtgcccggacgaccgctcccctcgctctgaaaggcgtccattcaaccagggacgtttcttctgcagatgatctttctcgcctcacctctgcgccgtccgcccgtaaacatcaacctggaaagtgggaacgtactctgtttgacgaaaagtctggtatggctgtcaagcctgggcagccgtatgcccagagcctacaagacaacggtttcaagaagaagaggaactttcaggggggtaagtctggaggtgcacccccctggatgaaggaccggacgatcgagggtggcccaaagtccagacgaacagtggacgatcgggagaccagagcaaaccggactagagtgtttgataaagatctcgaacagggtgcatacgacagtccgaagacactgtctcagtatctggtctctcctgagaacacgatcacggccgaagaagctgtcaacaaggttgccatggcaccggggtcaattggaaaaaatacggtggtgtggaattccttattaacacttatgttcaagcgcagggtggcttggcccagagtaaaccaaatatactcgatggtcagtagatgtatacgaaaatccgcgttgtctctttaccttttcttaatacctaaaaccatcttccagaatgactaaaacgtacactgttctaaaacagatgctcgccaagggagttcaaccgtcagatcgaacgtacacaattctcctctcaaacctgcccgaagcgccgaatcagtctacgctggtactccgggccgcgaacgatattcatcaatcatttatcacggcgagcacaaaagaccctgatggtttccctccctcgcctgctccgacgaatgcgcttctcaagttctacagatcttccaagcgatttgatctgatgcagcttacattcgaccgaatgccacatagggggccagcttcacccaatgctattacttgggtcataatgttttcctctctgtcatttcagcccgcaaagattgaactcgctcgagggctatggtgtatgctagtcagccgggtgattgaacctgcgcagactcgggctcgggtcgaggctgaagggacgtttgatgcggaggagaataccgggcgagggactgaactgaacgcgaccggtatggatgctaagctacttgctaccatttgtcaggtattcaccgaaagcaagagcgatccggatattcgacttgcgtatgctatctatcgtgcatactctcatttcccggggacgctctcagaattggatgatgggcttgcgcctccatcagagattccagtacctatgcttcattcacctagagaccgagtccctctgtcggagagcacattagaagctggtttcaacctgctttcaaagctcggcaaacccaagatgatcctcgatgcgtacctcaagctatctcgaacagagtcaatcaagtccagaacgatgttgaatgcgacacatcttcactatgcccttcaagcagccggtcaggttgactcgatagataagctgtgggactctgtaaaggcccaccgaggatggctgccaagtgtgatccctacaatattgacgtgggtgcactggatggaggcatgcgcggctaagaagttctttgatggcgcagctcgaggcctcaaagagatgacgggtttgaggatcgatttagatacccccatgtccgttcttgaatccacaaagtcgttcgcagctttgtcggtgattgatccgtcagtgggaaagaagccattcggagaccaggcaaattccaggttgttgaatgctttcctgagcactgctttagacgttcatgccgataaggacttgcctatggaagagagagaggatactctccgacgggcgcttcggatgacattatcccttcaccaagtgacatcgttggaagtcgtcgattttactccaacccctctcgagaccaagacgccttcattctcgcactccgactttctgaataaaggcctagtcgacgggacctctcttacgatcaaggcgaaggagacggccaaaagccgaatgaggctgtcgaaggcaaacgcagcacaaataactttccatcaacagtttctcgcccgactcatggttgcgcttgatcagggtctctcatccgactgggcatctcagcgagaaagagaggattatggttggatgaagaaacaggttgaggctcgatggcgatcgcagccagtgttggtcttagggatacctattcaaaaaggacagatacttccgaccagcctgcctaagggattgggagacgacgaagggaacctaacgaaggatgaatcgaatggcgtggaaggagcggaaggagtggaaggaatagaaaaggtgttgacggaggtatcagatttggaagaccactccgttgactctgatagggtcaacaatcaagcgctgtaaaggcaaaagattgatcgatcagattaaaatagtagttatctggccggatcaaggagacatcaagaactgtccagtgcagttgtatcataaataagatgaataataagaaattagtacgacacgttgtaaggcaaagaacagcaaacagaaatatctgatgctgaaattcctggccatatcgtcgagactttctagattcgaattcgattacatcgagataaaatgagatctgagaccgtttctgcgggcctctgtaaggaatactctgatatcggaatggttcccgctatttctgaacgtttgatccattggatggacatgctgtgtacgatgatcattcttctattcataatacttgatgagcacatccactcactcccattacaaatttttacagaaattacggttttagttcagcccttttcataatttgactaaacaccggcagagcggcggaacatataagacaattcatccaaaccatcaaacttttgggtaatcttccctcttctctttcaccctcctaccctggatacaaaacatctgtgcttcttagatatgtccgttgccccaccagaattggcgatcccagaggcgactggtcatgctcaacctggtagctcgtggaagaaagtccccttcttccgaagtgttcagtttgcggtaagttgaacttgacttagctcttcatccattgtggttctttctcttgactttctccctggccaatactgataatcgactagaacggattggtgtctatccgtttatcaggtcctcatcgcaggtctcgtcactttttccgcaccaggaatgtttgatgcgttcgtcatcgattccgtcaactgcactttgctatttcaaatataggcagctaattgaatattgacaatttcattaattttctactacagcatgggaaatgtacgccgctatgacaattctcgttacccacaatccttgaagacgacatggatagtaaacttacttatttgtgttttgtgcggttcatcctttcaatcagcttggagcaggtggagcggctgaaccctacgctgttaatgccgccaatgcactcgtctacggactcatggttatcttctgtatcactgctggaggcttgatcaacgtcattggtctcaaggtgagtcagattgtcttttcttattcagccctaccgccggcatttactgatgggaagtcatcatgcactcttcattagtgggcgctcgtcctgggaaccgtcggatatcctttgtattcggctgggctctacaccaactcgtactcgtccaacacctggttcttgctctttggaagcgctttctgtggaatttctgttcgttctcagttttgtcttctcatatccccatccttcgcgctcaattcgtctctcttcgtcctaccgcacatccataggccggtttcttctgggcagcggaagccacagtgtatatcggttatcctgagcctggagagaagggtagataccttgctcagtgggcattctggaaaaacttggcccccgcgattggtggagccgtcaaccttggcgtaaacgtatccacaaaccagacaggcgcaatcagtcggcccacgtacatcgtgttcattgtcattatgtgcctcggatttccaatttccagtatgttctctcctttcatgctctacgccagactccccacgcgtgccgtattcacatctgaactgaaccaaacgctcgaatgttatagtgttcctgccttcaccgcaacgtgtgatgcgcaaggatggcactaacgttcccagtcttgccggcaagggtgtcgttcacgagatctgggccgttctccggttgctcaaagaaaagaagattctcttcctcctcccagccttcatttcttcctacttttacctagcctatcagagcaactaccttggacttcacttcacggttcgaacgagagcgctttcctcactagtcgctccattcgctggaatcatatcgtcgtatgcgatgggatacttcctcgatcagcgacagattcctgtcaggaccagaggagctattgtgctcggcattttgttcgtgatggagatgggtgtctggatttgggctacagtgatgcagcacgaatttgataccaaaaatatgaccatcgactggtgcgttcttgttcatattacaattggatcaattttttcaaaaaagaaa

SEQ ID NO: 2987 - DNA, 12685 bp, Xanthophyllomyces dendrorhous
ctatcttactagcgagtccctgtctatcaatttacgacgataacatcaggtcaagcaaagatttcggtagggcttggactcttgttttcttctggaccttcatcggacaagctcttcagaattatgtttgtctcgcctctattcgtcttcctttacctttgtcgcgctcagcccgcttgaacaccttgttcacctcatttaccttaattcaactctctttcactagctctactgggtcatttctcactttgccaccgacatcaatgctctgtcccgttacgccggtctcttccgttccatggaggctcttggtcaaacgattggatgggcaatcgcctcgaatgcaagcatcagtccttacgccttgatcggtctcaactttggaggactgttcgtggctttcatctcagcgacaccaatcgtgttgagtctggtagagtccgatatcgattctgcgggcgcgtttggagtggattctcgtggcaaggtcgatggcgacggcgaagcatcggtcgatcctgccatcgcccgagcttaaaaaattgaaaactgtctgttgtagatacatcttataaattcatagaaagatgaggatcagattcattctagtcatcaagtctcgcttctgctctttctgcgatcactattcctatcaaccgaaaagattttcttcccgtctgctcctttagatacgttaggctcaaggcttagacatgtagtttagattttttctgtaatatataaacaattaatataacccttatttggttttgatcattcaaatgcccaacctgcatgcacatatattgctgacgatttcatgtgatgatatggagtcgtcgggccatctacctaggcgtccgtgggtgtctcgccaacctttttccgtggtaagacgatatggtctactagaccaaatgctttggcctcttcgggtgtcaagaatgtatctcgctcgagcgctttttctatcatccgtttggtattcacacaaaacagattcaggcaaattcatcatcaagaggaatgaacaagaatggaccaagacgaaccaaatcgtttcaagacttcggcttcggattcaccctcgagtgtacagtgctgtcgatatatttgtgtaagtcttgagcgcgttttaagaatctctctggcgcggatggctagatctgaagcttggccttgtgcccccccggatggttcttacaaacgacagacgatagtaacaaagtcaacaagatctgtaatacttgactgatgacgggacaggagatcacgaacgatgaatcatcactcttgcatggggaaggatgtatcgatggccctttgcacctatcggcaggattttaataaatcaaatccaagattaattcaatcgaaaacactgtggatggagaagatgaagagcgagaagaagcacctcctgctagtaacaaggaacccatagaagccgcttggcccgtacaaaagcagtgcacgtccggggagatatgctgttgcaaaagacatagcatatagagttactcaatgtgaatctctcatcggagggatacatgatcagaacgaaggcgggaacagcccagaagattgcgttacctgcatctatatggttgaagaaactggcagttctcaataacagtgccttcaagactgcatcaacgaaagcaacgagttggacgaacggtgtcatatatagccaaacctgaggagaccaccccccctggactggagatatacatccgaataggtgctaccggatcgactgcttcaagatacaaaagcgaagcaacgatgatggtagacatagcgtcatggacctataaatcaaatatacgattgatagatatattccatcttgattcaggttcaatgtctactcccaagagccggatggaatgatgggaaacgacgtacaggcccaacagagattactcgttctttcagcaggcgagagtaaatatcggtttggtagtttccgcctcctctcgtctgattacaatcgttttaattcaaaccatgggtaaaggaggagcgtgagttagggtaccatatatcggtcagcaaagtgtatacatacgtgatcttgaacataaggtacatgggcgtaaccccttttagacatagcgataggcgaaacatttgaggttgatcggatatatcgccccgtcggtaatgatgttgacattgttattgaagaatatggagcaggatcatggcgtagattagtgttggaaagaagtaaacttcttctcgaaggcgatcgagaagggaaagcccaggtagaacatgttgctctacggagtgtgttggaagaagacatggggtttgatgggagatcacttggatcgcaactcgtcatacatcaacatcagtgggcgtcgaatttattcattacttcgtgttacactcagggctcgcgtggtatgaaacacaaatgacaaaggtcattgaaacatccatttatgaggttaacaagacacataaaaagagggtagagagaaatcaatggagctgggaaagtaaacactgttgaagaaagaggataaaagaatgaattatgaaatgcccctagttcgaaagaaagttgcgaaaatcagaatgaaagggtaagttgtatacaggaagagatgatgtcgtcgtcgtaatcattagggaacaaaagggaaggttgtctacacggttatgaactagaggaaagtagacagaggatgtcgcttttgtagaaaggagcagcatcgtctaaccagcagcttgcatcgcgaaccttcgaatatgagggatattgaggtaacctaaagagcaatcaaaaaatgttgctgccagtcagcatccagcatacccttgtaaatcattctaaagattgaatgaaggaacttactgggtacgaaagtttccagatactcgatgtctctcggcgcaggtaattcatacgggcctgcttcttcagtctcagaaggaaggagcaagtgatcacttcgatcgttcgcagagattcgggaagcgacggctcgaagaatctcagagggtattggtgtctaatatcaatgatgtaagatgagattcaatcacagatgaacggcatgcatactccgcaacaacaggcgcttgagttgcagacgatgatgaaagatgagaaaaacttacttcatagtcggcaacatggtactgagtgatgagcttctgaatttgtgtaggcgtcagcatccagcacacatcactgaagaggaaagagtgaatgaaaccgaaacagtatcataggaatcagcatggtgtcacataaatcgcagggggtgatgcagaacgtactaaatgatgtcaatatctgcttgggtacccttcttgagttgaagaagtttggtagcttgcatgagatgctctaactgaagaacaccttcaggcatatcgtgggacttgcacctgacgtcacagaacaaaagtggatccagatattagcttgagttattctcagtatttggcgaatatatcaaacacaccattcttccagacgggtgatgttgtactgtatctgcatggctcgcttccatgagctgaagtttctcctcatcaacaaatcgttgaaagccgtgacaccaatcaatttaaggatctctgcaacaacctgttgagtaacggaatcctccatgtggtatcctttgagcgctttccagattttgttgaggatgttgagaatgtcgtccatgctgaaggcagggccagaacttccttggatcaaccggttgaataatcggccgccaccttcgttggtcatgaaaccggggagagattggctttcaatcaacgcgggaacaaccatctttgtcaacttcttctttgtctccgcaatccaggtgtgatagatgttgtactctagactgtctaagtcgtgtttaaccacttgaacaagtcgctcataatcctcccactcgaatggtcgtccaatcccatcgtcttggcctggtccaattccttggccgatatcgtgttctgccacgcaaacaaaggaaagtagttcatgaacgttcgacagccagaagattccaggaataatggcatcctcgttttggaaactctgttttggaaaaagggtcaagtagatatttaagcaatgacagttagttatgttcaatggttgtcgggttcaatgaagaaaagattgactacacaccatgacgtgctgttggatggtttgcatcacattagctaagaaacgctcactctctggaatcaaaccgaacttccacatctcgttcgtaaccaacccgatgagatgggccgggaagacaacttccttatgcgtcggaatgctctgcaatgtgggaaccggaatcttgagggccttgatgagcccagtaagcacatcttcgtctaggtgctctgcatcttccagcattcgcatgatttgttcattcggatcgtcatatccgattggcatgccactcgaatctttcagccaggacaccgcgtccggcgcgaaaacagcgacagaagcggatcggttttgagcattctgtgccttcctggcgtcgtacatgttttgatcgtcagggtctctagtacgaccagtatcaatggcgagcccagccgagtgtcttctgttgtgagacttagatgggcgctgctccatgggtgcgctgatgtcggtcggcccattctccaatgcacgaagcccgttcgaaagattgggtgatgtgggaggaggagcattccgactgaggacggcaagcgcgttagctcggttgagagattctcgtagaccagcaatctctgatcgaagacttccaagtgtggtggcatcgtctgctgctcgggcggtggcttgttccagaagagcttgtcgttcgtccaacagcttcgtctgagacacaatctgttctccaagagaggcaaccattgcctctcgctccttgatcgtcttaagggtttcgccaaggcgggcgtccgtcgagtcctttgctcgctgtagctcttcgaatcgagcctgggggacggtaggtttctgcagctcggtgtgcagctcggttgcgcgagctgaggcttcctcgtgcttccccgtccagactgcctgggcttcctccaagtctttgatctgagcctgcagttttttcttctctccctctcgcttttggagtgcctgtgtaagctcgaccactttgttctccaatttgtaagaaatctctttgaactttgtagccgatcgagcctcgactttgagcttctggagttctcggcgagccatgcgccttcggatacaagactgcaagtgaatgacgcttcgaatttcctgttcgtaacgtttgcggaggagtctagaaagcaatttgaatgaaaggattaaagtgagaaaatagtatcaaagagaaacgatttctcagaagcaagatagagaaacaagacatacaatcctttgcaaagacgctgaagatttgtggccgagagttgtaggcgctgttccttgtacgcccggcgagactgaaaaccccgcacaactaaagcaagaaagaattaattgaccaatagacgctcgtgcacgcggagatgaagagtgatacgatgagcttaggtgtcagatacataccactctggattttgacagccgcggctttcgattgtctatactgttgtctttgcaagaaccctctaccgactctctggatcttcacagctgcagtctctctcctcaaggtttccacctgtttcctggcctggacacctcgccaccaggcctgaattctcaccgtggacgtcttcagggccttgtatcgattagccgccactcgacgacgaagattcttttgaacaagcgtgaccagcgcattgagtcgctctgcccggagagcttcgaggtaggcaagcatgcctgctcggaagaagattttggtaagaccgacttggtacttgtcttcctccttaatggtatcatcaagaatgagtgagcacacatctttgagctccttctgccagtgctctgagcgaatgagcatatagtacctatttataatggagggaaagaatgtacttcggcagttaacaacgtgacaactttcgacaccagactatacaaaattgaaacctacctctccgcaaaatcatcaaacgcccatcgactagggtatcctgcacaactaattcggatcgtctccaatacaccacacgccctcaattggcctaaaacttgagttgcgtcccactcccaggctgccttcttttcgtttggcttgatgcaccggatgtagtgcacgtttgtcttgctaattgtatccatcaacgagattaacgatcccttgaagattgagccgagcgttggttttcgtccgcctggcttcttcgacaccgttagggcggtctgaggggcagccatagatgcaagcgcaggcgatcgacctgccgaatgcgaggaggataagatcgatgaccgcttattgattgccgaaggtatctcaggagcaacaggagcggcggcgacagctgaagccgacgttggtgggttcagaaccgcgtctaaggcttccttgaggaacgtgtttgttgtgttctgaagaagtgccagatgttcatccggcacagtatccctgttcttctcgatgaatccctcagcctcatattcaacatcgacagcgtaatgtgcgacggtgaaggagcttccgccaaatcgaggttttttgaagatcttcttgttgtccggcacatcgagttgtttgtaaagtttctgaacaaatgaggcgtccgcgccagatggtagtcgagactcttcatctaacagggaaagaattccgagcttgccctcgataacatcgatacaaggctggttgtcggagaagtcgataaatgtccagttgatcttctctcgaacgtattcttcttgctctagcttgaacacgtgagcgttgaactggatgaagataggtaaacgaagtgaagaaagggatcaattggaggtcaaagccactcaatcgaatgagacaataacagactaacctgttgttgaactgcacaagttaaagctcaaacaagtgaagtcatgatctgttctatattcacaagatgaagcagatcaaacagactcacgcttctcattagcataattgatgaagaactgttcaagcgagtttttcttgaagtgttcaaagccgtctgataaatataccaaaaagagattcacatcagttcaggctcatccctgtctcctacactaccctggaaaatcagtctcgatgtgagaaactgacatatatctaatactccgatgaacttctcggccaccagggccgccgtacctccctctcccatcaggctctcgttgaccaccgcgacgagatattcccagatgcaagcatacacaaacttggcaaccgaatccctgacaacagttgcacctggtccggagagtgagctaacaatcttttcactccgggtaaccaattgctttttgaccgtccactttctaaattcgtccttgggcacaccgagtaatgtcgtggcaaacgcgagtgaggtatcgtcgtctgaaatcatcgcatccgttcgagattgagtaatctgaatgtttcccaaatggagtagtgcagcgaggagtcggaagatctgccattgtttctcgacagagacaccgacggtagagagtgctttctgagtaattccaaactctacagcgtcgtccactccaggaatcactgcagatttagatccgccttgggagagatagttaaacttatgtgggtctatatcaagcccaagatctttgcgctctttagcgggcgcacccgcacaaagctggtaaaagatgtggtaatttcgctcagattcaggttggtatacaattcgagatctctcaagtaggtaggttcggatccgagctcccacgatttcctgatctttgtcaaacaagatctaagatgcaaacaggttcaaattcaaatcaggccgtatgtcacgtgatagtttgatagatacagaagagaatggtttacgaacttccatgtattttccgaatctcgaactgttgtcatttctggtggttttggcatttccaaaagcctccatgattgggttcgtcgcaagcatttgtctctcaacctcggacatgccagcatcctcggcactgggacttgagttagtcgtagccttctgcctctgtcgacgaaccggccgtgttggatcgtctactgaagcaaagtatcgaagaatatacttggcggatacggttttacctgctccactgtttgttgatgtattactcagatcatcagaattggtttttggtttgccagtgacacgttctcgaagcaaccggataagtaacaagagaggacagacctttctccgctgacaacgatggtctggtcggccgtacctccaacttctccaccagcagtctgccctcgtctcatgcaatctaacgcctcttcagctatggcaaacctgaagtatggcaaccgagcaacgatacaaacattgagtcaaccgaactacatatgttttttttactgcaaagacctaggcacgaacagatgtggttccagctctccttttcgtcgtccggagtagctttgaatcatgtcctgtccatctaatgagtttcaaattcaagtaagagtatgctcagtatacaaataatctttacaatcaattactagctttgggatgaaaacagagtaaaaaagaacgaacagatttgaagtggatagaagggattgatggcaatcagaacaattctatggttcactcgaatagaaacaatatcaggtctggtacacttgatcctcgaaatcacaaacgctatctgaaagacctacccagagtaagtatatggtaggtgtaagtggtatctagtcgagatcgcgtgtaacactaagtcgaacaaatgagggtagacaccagatcagctcggatctacactatgattcttgcttggctgcccaaagagcaatctggtcggaggccaggaaaacgattctcaccagatggctcgttcagattgctcaagtttgccagatcctcttgattttctaataacggtgggtttctcaatggcggcagaccctcgcttgacaggagggaggcttctgaacttgcgttcaccgttgattcctatgataattcgtgaagttagacgtagacaagatttttcgtcagtttgtaagtcctccgttcgatcagcccataagcgcagaaggcgcataaatgcgtgcatgcccgcatgtcccgagcgaatgaatcaacgagacagtgtcgaattgcgtaccttgcctttctcatcaacgaagctgagaacgatctggccggcctcattagtttctttactagtgacctgtccagaaatccagcctagctccttgtcagggaacctgaggagtcaagcacgaacagagacgggacccgaaaaggttgggggacaagtaaatgtttaatattgagcagcgcaaagactaggtcgtttgacggtcgtggccacgatcaagagctacttgacaacagaacgaaggccaaatcacgcaccatactttggttcctttcgtgtacgacatgagctttgaagttcgaaaggaggacgaagggttgttcggctaaaagtgccctgatggacagaggtaagatggagagagaaaggatgaggtgatgtgaatgagaggagagtgaggagatcgccaggatcggggtcggagagacagagaaagacaaagagagaaagaaagaaggagaaactagtctcaggtaagttcctgaagaactaagagagtgtttgtctgtctgtctgtctgtctttcagacgatggttggggaagaaggaaagagaggaagaaagaggttgatcaggatggcaaacaaggagacaaacagccaaacagcctcgaccttatataaataagggtaatagattgatagctgaaaacacgtcttatatatgagataacacgtaacaacctggtgtaaccgcgtaattcgatcatggactgtcttcttcttttaccgtctgacgattcttccgtgaccctccaacatccattgtatttcgagagcagccaactttgtgagtggtctctctctttcgatgtttctatacgccgattgcccagtttgagaggcgatccagctatcaatgcttgacaaacagatctgggccatcagacatactactcttttgctgagccgaggcttaaagaacaaagggcggctctggtgatgatgagatttccatcttggatcaagttccgcttccttgacaaaaaatccttctcattcatcccttcttgacctcactccctacatcgatctttgtgcactcgtttcatagcagaaatctctatctcttctttgctctattgtctttttccgcacacatacatgttgaccgttccatcccctttgtttttcgtcttctcccctttctttgcctttccttaccccacttaccgcttatccagatatcaatcatcataagtacaatgtccgccaagaccaagaccgagggagagtccaagaagatcactctcgagaccgccgacaaggaagagttcctcgttgacaaagaggtcgccgagcgatcgatcatgttgaagaacatgcttgaaggttcggccatcttctctgctctttgaattttgttcctcgccatcttgcatcttcttttttttttaatgaagagccggaaactttgaacgtaatatgcttatccttggactttactaattacagatgtgggagaatctgatatggccattcctctgccaaatgtcaccgccaatgtgcttaagaaggtacgttatctttccacctttgcttcgtatatcttgaaagcatgtacccatatcagcctttggttccacatcaaatgaatttgcctcttcataggtcctcgagtactgcgagcatcaccgaaatgaccctcttcctactgccacggatgagaatactgacgagaacagaaggcgagtagccgacattcaagactgggatgcaaagtttatctctgtaagtccatcacatcaattctttaagctcgatctttcggatcatcatctgcccgcccagcccgcctccattttcatcatcatcatttttaaaaagcggagcaaagaggaaaactgacttgttgctatgtgtacgttcttttcgttgctcaggttgaccaggaaatgttgttcgagatcatcttggctgctaactaccttgacatcaaaccccttttgttagtcggatcgcatttttctgtctaccaattcttggtcaggagctaatagtgttgtatgcctcgatattctcgccatcgttttgttttcaatcgcctgtagggatgtcggatgcaagactgtggccaacatgatcaagggaaagacacccgatgaggtacggccgtttcctttgcatgatgtgccttcaatcttcagcagccccgcagaatatgttcttatcctcttcgttgtccaaacgaaaaaaaaaaattataacagatccgaaagttattcaacatccagaacgactttactcccgaggaggaggagcaaattaaacgagagaatgagtgggccgaggaccggtagtcgtttggactttctctatgatacctctccttcttttgcactgccttctttccctcatgtgtcccattccgctcgtctactcccttccttcgttatctctgattgtacaatttgaccacttcttacaacctacttctgctacatggtgcgttgcctttctctctctcttcagccactttcaactggccggccacatgagaccatgcgaactaatcagttggtcttgatctcctttcggcgtcatagacgttctgcattcccctcctttccttctctttgtttcgtctcattttcgttgtctaaaccccggtcctttgtttttaactctttccgatcaaaaggtctgtttttctccgtatgtcgctgttgagtagggcaaaattgaaaagttttcgaagagaggagattaggaagagaaatatgtttatgaggagaagtttggaatagaaagccattctctaaaatgcactctgcggcaagaatatgatcaatttgcttcacgtgcgaagatggtgatttggatttgagctccgttggtctcgtccataatcacactgatttaacgatcatctggctcatcagattgaagtgcacccagcatcaagtcaggctctgcaggacgggaaaacaaatggttttgatatattgattcattagcaagtagaaaaatccatccctcttcagatcgaaatcggagccggagccttgacatcctccttgtcctccgtcaccggggtagttgccgactgtttcctgacaaactctcctttcccttccggtccgtcgacccactggaaaacagaatcttccctttcctgttctttcacaccccagaaaactcgttcccttcctcgcttgatttcgtctctgggcaaactctcatcccttcgaagagtgattccgatgtatcgtcggtagttcttcggtcgattcgtatccatgatcggcacggaagatcggggcggccgacggttggcgatgtttggcgaaacttggacattctgcttcttgtaaggaagtgagtagaacttgaggtagccgggcgagagagcaaacaacgtatggtctctacccattccgacctgaaatgtttgcgtgagaaccggaagagagtcagcagaggagaaaacatgtttccgaatatatatata

SEQ ID NO: 2988 - DNA, 2919 bp, Xanthophyllomyces dendrorhous
acaaaagcggcataaaagcagagaaggagaaaggatatcgagcgagaaaacgtacgtgttgaccaggatggaatttagttcctcgttgacgaatgatgatatctcccggctgaacgagctcatctgaagtgtgcccagaccaaagccggatggaaatcaacacgaggaacgaacaaaaccataaatagtcgtcaggagatatggatcttcaaagtttcagatatatgcagaagaagcaggcagacaagaaaaagattgaacgagaacgtacttccgaactttttgacacctagacgttttccaatggatcctcgattattcttggtagatcctccacccttcttagtggcctgccaaagaggagacgtcgaaaaggatcgtaacgatgagttgaactgattgagtggcctaagaagagccgagggagatgcgaaaagagagaacatggtatggtccagaggtgatggatgttcagaaccggataatgaccgtgggtgataaaggcacaagacttttttccttatggactacgaaagaaggtggacgggtagggttatgaaagtatagaaaagtataatggttttttctattcgcttcattacactcatttcataatagatatcacacagcctccatctaattatcgctcccttttctttttcatcatccgcattccagatccacactccacgttccacacaatccacacacacacacacacacacacacacatatactcacatatactcacacatttacctctcattcacttgctactcactcaaagctcgcattcacatggcccccaagggctcgggctcctcgcttcccgctccacttcttcatacttctctggcagcaacaatattcgcatgtgttacttcattttggagtatctatctccatctcaagggatataggcgacctggtcttcaaaggttcgtctaattgtctctagcacggtcatcaaccttcttccgtttgttcttgcaatctttcaataaccgttgttcttctaaatattggtccgatcatttgctgccactcttgcatatgtctatctagactagtcgtccgtatcatgttgatgtgcgtgctcggctgcctatgacgtcgcgtttatcaggataaggggctcacccgcaatcttttcgtcctcgcttttcttccacaaacacttcaggatccccatctatgcaattgcttctctggtatcacttcattcggtcgaggcagctttttggattgatgcagtccgagatctctatgaggtacgcgtcatcggccttgctcctggacagatagaaacgttttctaacaccttttcacaaaatttcctcgcttctgatcttgtccctgttggcctgatgacgctttgatctaaccaggcttttgttatatatactttcttgtgcgcgagcgacaaatctcatgttcatcttgtcgacgtgctcacttgtcttgtgaatggtgtttctctccttccttcagctccttactggtgacctaccttggtggagagcgctcgcttctgatcctcgtccacggccggccgtcaacacctcatccgtggcctgtaggaatgttctatcatgagatggacctctcagatccatataccttcctgggtctcaagcgaggaattcttcgtaagtttcctgttctcaagtcttgaccgtcgacatttcggtcggcgccgcagctctggatttgtctttccgcacgaatctgactgagacgatgttcatctctttgatccgaactagaatacgtttacgtgaaaccattgttggcattggtcacaatggtactcaagtacacggaaaactattcggatggtcaactcgggttcaacacgggatatacatatgtttcgattgtatacaatctaagtatctgtctgtctctctagtaagtctgtttcttgatgaaaatgagcgatttagtcagatgcgtattgcttacggctgttgtcgaatgttgtagctgcttagcaatgttctgggtatctattcatcatgagtgagtaaggtcttgattgtatacgtgtaaacgctagctaacaaggcttgatgtgaacagtgttcaaccctttcggcctactcccaaattcctttgtgtcaaagggattctatttttctcgttctggcaaggtatcggagtctctatcctcgtcgcttcgggcgcaatccaacatcttggcccatacacagatcatgaggtacctttctcgacaactgtcttcttctgcatccacgatgagacttcatactgatccatgttttcggtcaaatcatcaaagcatatgtctcttgcgcttggagacgtgttgatctgcctggaaatgccaatcttcgcaatcgcacacacctatgcattttgccggctgagcgactatggtcagtatcatcttgtctcttcttactctttgatttcccatatatcctcttgaaggtggcgttgccttcttcgtttttctcactttgtctacgattcaaatttacccaaccagttgatccgtccctgcattatgttgctcgattgccgttcatcctcgccttgagagatagtgtaggagttttggacctcgtttcagacttcagagcaacttggggtggcaaaggaatgacatatcgatcatttgagcctgttgagggtggattacacaccctcggcagagctagagagaggcgaatcagagctggtttaagatatcaaggtggagggaaaagtggtcagttcgttttcccctctctctttcgctaccgaagtagctgctgatgagctgctttatgacgatatatctagggaaaaaatactggctacctgttcctaaagaagaaggtatactaggtttctctcaaccaaattatggtgctttaggcacgacctcacctacagggcatcactctcacggca

SEQ ID NO: 2989 - DNA, 7296 bp, Xanthophyllomyces dendrorhous
tcactctcacggcattccgaccaagggagtatacaacaaggcgactggtcatggcccccattctttaggctttcggtcacctcctcatcctcccgcctcatcttctactcagggagattactttgctcgaagtcgacaagatggttccgcttcacacggaagacattccccgatagaggatgactctgacgatgactctgtagtctcactttcgttttcctccatcgcatcctcgccttcgggaactccttctgaaggaatccaaggtcagcgtcaacgtcaaggatcagaggaggagtcgcaagaggcgctctatgcggaggcaagaggttacctccatggcgactggagttatcgtgtgatcgatgtgagtaaagaggatgctagaagacggatgagggaagaagaagataatgtcctggccggatttggtaggcggggagaaggaagaagacaaggggaacgatggggtcgaggtttaaccaggggtgtcaatgacaaggacaaaaacaaatcatcagaaagaaaaatctatggcgcttttggtggcggtgatgagagactaggtgcgtgccatgtgatgctttcttttcatccccttttttgttccgaatgctgaggttgacttttgacgcccgtatcgcttcgcatatgatggccctcacgtttgtttccatcagcgacagacatctatgccccgcttcctccgtctaggtctccgtccgatctgccaatgacctcatctgctgctcctatccgacacggtcaaagtggtcctcaagcttctcactcaacggaaacaagcgagtctccaccatccccgacgtttctcccagaggaccatcccgtacggattctttggactaagcagaagggtaaagctaaggaagttgcatcccatttattggaggctgcccatcagatcgtaccagcaacggaactcgagttcacccctgcggttgaacggactgaaccatcctggttgaaacttcccataggtggcggtggcggaggctcgcgctctgcatcaccaaccaacgagaaaccattaccgagcgacgctattgatcttgtagttgaggccgaggtagattcgtcagaagaagaaagttggaacaaggagcggaagagggaggcgaaggagtcgcttagacaggctgggtgggttgatagggagagagaacagggtaagatcgtcatggagagcgaacaaagtgatggtagagtagaggccgagtacgtttacctcttttctatcttttgtcgtctttaatcaaatatatatcatctgctactgtaaatctgaccgagttatgcacctgtatttggaaacccaccagaacgacaacggagccaccgcttcttcatatatcccctccgacgtcaccaccaatgtttggcggtgacgcaccgatcaatcatgacatctccccttcaaatctcctccctcatcaaacctcacccactcgaaaatcattccgatcaggtaactcggacgctggatctccatggacagacgagcgaggttcggaaaacggctcgggccatgttaggcagggcacagatgatgagcggaacccatgggcttagccagtagcatgtgtacatatgtgtatggccttgtaggaatataaacggattatcagtcattccttgtgttggcgatatactttttacttgattcgcgcatatcatcattttagcatgcgtcttgttcgatatctctgtcctctatactctttctctcttctttctgcttcttgcattcagctggtagtcataggcgtgggtgatgtgcatcggatgaagattacgtaattcatatataccttaggtatcttttcttttcgaaggctgcaatgaaaaaagagagaacggttttttttacttctccttcactcgaaaacctcgttcttcactctcttcaccttacttacttctcacttgtctataatcatcatggatcaggccaaacttgctcgacttcaggctgctgtcaagatcggttcgttcttcattctccttattatatctttactagaattcagacaaaaattagaggaaagcggatcgtaattgcaggagagcgttcggggtgattgatagcttggttcaagaaggtgatggtatttatatcagtagtcatcccaagaagattcaagatgaagctcttgacgtttgtatcctagtgctttgaaaaatagagagcataagatcaggataaatgaaggcgaatgtgcatcagatcgcatcataaacttcatccccatcactccgaccatcttcctgttctatggccttctctgcctcatcaccaaaccccatcgttgttccaatcaagaattgaaggagattattcatgctctgttcactaatcagtgtctctttcattctaatatccatttatccttctgtgaatcaatttgctttctgctgggctgcgcctgtcatttccggtacgctttaataggaggaaagggtacgccccgacgaaaggttatcaagaagtctgcttcttcttcccaggccgatgatgtcaagctccacaacgctttgaagaagcttcaggttgccaccatcggacccgttgatgaggtgagtttcgcttctatgcatttagtcaaccggttaggttatatcgacaagctagagactcacctgttcttttcgtctataatgcgatgcaggtcaacatgttccagggtgaggttttagacctaacgttttgaaagtagaatacagatcaagttgcttaatgatttgttccgggtttatgatctccttgtttcttacagaggacggaaaggtccttcacttccagactcctcagggtgcgtttgctattttttttcttctttttcttcttttttcttcaacgaacaccgtttgttctcgattgtttcgtatgctgattctagctctgaatatcacactctactatcgatagttcacgctgctcttccttccaacaccaccgtcgtgtacggtgtgggtaagcccaaggagatcactgagcttctccccaacattctttcccagctcggacctgagagcttgcgaaagttggccgacagctatcagcagatcatggagcagaggaagcagatggagggggctgatggttcgtcccttgtattctcatcacccacattggaagaagcaagaagtaaagagaaagagagaagctaaacagtccgacgtgtttaactatagccgagaaggccgaggatgagggtgtcccctcccaggtcgagtctttcgaggttgaggacgaggctaacaagctcgacgagcttagtacgttctatccttttccatatatccctttttaatcttctcagactttgatctgagcggtggtagggcaaactttggataaacaagctgattttattcgacctgaaaccaattttcacccaaatctttcgatagactaagcgccaacttctcacagattcctctgcttgtctaacatggagaggagatcttgataaattggaaattgatgcttaaaaaaaagggaaaagaacaatgaagtcgaacgaagttggcgaaaagaagtgaaaatctggacgagtgtacctagtgcaaaaagcatggtgagagttgcctcaaccgacggtggttgatatatggcccttttggacttgggtgccctcagaccacgaaccaccacatctccataagtcatggggttggtatgtgccagcctcaacctcagtggctagcgtagcagcagcggtgtcagataccagcattcttgctccttcgttctcctcctggtgaaggtcaaggtgcagcatgttgcgtgacgcgttcacatctctgttccaccaagtctgaaagcaagcatagagcgcagagaataaagagaaaacaatgagttcttgacactatcctaagacacacattacacatccaacagacatccaacacaggtgacttactcgacagatgcttcgacactccttgatcgcccacgctttgttccttccagagaactcgccatggcacttggagcacaccctcgacgtccgatactcccggactttgtggacctgaagcgacggaaaggccttcagcttggcatacagcatctgacaggaccaggagtatgcccacgagaagtcgacgagaaggcgccgtcgccgaaggccaggaaggtgcgtggacgtcctactgacaagggagatgccagccttggtccggaagtacaggcgcattatcgacgacagatctgggataggagctccatctgtgcacagtgccaatacgtgcaaattcatcaatccggatgcgtcgaatgttatctttcctagccgagcaactgcagactcgatcgggttggcaaatgttcgacggggtgtatggagccgaaaatgatcttaaccatttgtgacaccaaagggtgaagatccgcgctgactcgtcggaccctctgatgtcacggacggtaaagatcggtttcagctcatactcaccgttaatcctttgtcggcccaatcgagtctacagttgcgcagctgagaacatattgactgaggcctgagccgtcctcttacgcttcatatcgaacacaagaggagcggcattcctcaaggcaactgataagtgttctcatatgaaggggtgttctgatatggaagagcgctcaaatcatctcgagttcgttgtgtctcataagctgttgggattgatgtctgcttctttgcatgaaatcccctttgatcggttcggctggccgtcggtcatggtgaacgacctggtaaaggctttaccgtccacagacaaagacatgaattacagaggtatagcatgacagagaaatataaagacaaaaatacagacaaagaccaagacgaagaaacaaagagacaaagagacaaagagacaaagacaaagagacagagaatatatgcttgatcgagccaagtgtagctaatctcagcggtattcacccagacatccggtgtcagttatacaacatgaatttcagtgtagccgggtcgaccaacgctcttgcgatcgttctcaatctctaatgtatataggcttagctcgacgcacacttgaacacttggtttgatagattttgttctttctgagtcgaattcgctagctcgaatataccgagtgttgtagattaagataaaccagacattcatagaagaaagaaggcatagccgacactatagatcagaatctaaatcttccgaagtaagaccagatataagaaggattcaacggagacaaacgtcggtcaagtctcctgccgagcctcactcaaaaattccccaactttttcctccttctccgacggattctctgcagcgcgctgcaagaatccgtcaagttcttcttcttcttgtttgaacgcagtagcagggttcgtcggtaaggtgtcccggttcgaagaccggatcggtcgagcggcttggaagagagcaatttcattagagagcagagaagccaggtccgcctggagagcagatagtgcttctgggatcgtgagtgatcttaatgcacatgcgtggcgagaaagttcaaaccataaaatgtaagcaaatgtttttctgttctttcaggcgagaggatgccacgcatatagagagggcatgaaacgaacgactggagatgaacgtagagcctatatgaagcgaatgtgaagatcaaagacgacatcaccaggcccgtcaaggtcatcataaataaaattgtcggaacgaaaaaaagagctgggtggcgcaaggtacaatatcatgatggaccagtcatcagatcaggtttagtttctcaaaacatcctcgaagtattttcctgtcaaagagggaagagacttacatcctacgaaaatcgaacccagcacgactgaagagacgatcatcatcgatcctacaatcactgtcatcgctatggttgccacgaatgatctatacatcgacacagggagaggatgtacaagaaatcaaatcagatcaaattggtagttcttcatcattgtgatcatcggctttgtcgacgatgaacttgaggaacgaaacacgaaggacttattggacacacttacaagaaagtgattatcgggacaaaagacaaaatgaggaacaatacgagcgccgtctgcattcaccaaccgatccatcgaaattgatgagccaaagaagagaagacgtcccttctatcagctcggacctgatgcaggaacaaatgtactcagaaaaggcaaaggaacgaacggccgagacagggtaagtctttccaaatccaactcctctctccttagtaggtacccaaatgcttctttctgctctgtaatattaaagcaatccagaaaagaacaaggacgaaaagaggaacgtggagtggtcagattgacgttaagttagatagggcgaaccatgatcactgactggtgggcttttgactgggcgatcttgatagaggacccaattctttcttgaatgatggacggaatggatgtcattgtttttggcttctgattccttccctacttctgtctctctcgggatgatgcgagaaagagaaaggattgaagaagacaacaaagtcaagatcgagaaggacacgagcacagacaaaacgcacctgcttacgtcaccatgcacatcgaacatttcgaggcgacatttaaaacaaaaatcatggtgagagtgacctcaaccgacggtggttgatatatggcccttttggacttgggtgccctcagaccacgaaccaccacatctccataagtcatggggttggtatgtgccagcctcaacctcagtggctatcgcactagcggcagctatgtcagataccagcactactgatgagtgttgtgatatgggaaattgctctcatcaccccaacttctttgggttttctcagctgctgatgttaattgctccttctttgcaggaacctggtttggtcggttcgatttgctgtcggtcattgcggataaactaaagaaggactcgaatgacggctctgttgttcatagacagaggcgcgaacagacaaagaaatcattagacaaacatgtacatcctttcacgaccatggttacatagtcagccttcatcaggcatgcccaaaatccggctggagctcgatcttatttttgtcccagcctgccatcccatgcttaccaagcccaagccagaagcgatctcctctgctcacccctctgaggacaccattgatttccgccttcttatcagcctttcctcgggcttccagagcgggatcccaccagccgaacgtcgatcggaacataacataggacaggac

SEQ ID NO: 2990 - DNA, 18895 bp, Xanthophyllomyces dendrorhous
aaagagcgcgtcaggtcagattctatttctagtcccctttcttctttttaattttcttctatttttattttcatttggcaagggtgaccaaatgaacagaacgaaatcgccacaaacctctggctggtagaaatcagtctgagacgaaatataatataatttggaagtctctgatgtgattccttgctctagtgtaagacgaacgactaggctgtgaaggggtctctctgttgagcaaatatattcctacgaatgcaggagctgatcgacaaaaggaaacggtcttcacctggctggcgcgggcttccagggaaacacaaacacatggaatacttgagtgagttcgacataggctgtgcccgacggtttgtcccacactaaggggcaatgagtctatggtcagtcgctgttgtgagaagtcatggctaaattgaagagtaaacaacggagagacacaaaccgacattcccgacatcggccttgatgaacggactgaggattcgataccagccgtaaactccgattatcaaatccctcgagttgtgcccactcttgacccggcaaagcggatgattaaacgacgcgtcgggcgtaaagactgaccggatggaattctgttgacgcgtaggggaggatgaatgggtgagcgcatggatgagatccggcaaatcttcggcagggtctgagacggtgacggcgaaggacgaagaacggtgggaaagagagaaaatcaaccgggcaacgggttccgaagatgagacagagatggttcattagttccgagagcacacctcaactcatacttgaatttctcaccttgcattagataatgtggatgatctacaaggcaggagaaaaatattagagaaggactgaaagatctgagaatagaaaacaactggattgctggaggcgaatgattgaatggtcggatgagagaaaggggcaggtgagaatgtggatgacgtcggaggagtccgacagcagttacaataatggactagtctgttttatttcttttgtctacctcatcgtcgcttccctgttcagctcgttgtctcttttcttcgttctttctgtttactaacccacttgacgttgttctcttgattcattatgtatttgtttcaggcagcttaatgacaaagatataaaactaacattactgatttcctgccaagaagactaaagaagtgaaatctgtaactcataatctaccccttctttcttaccatcgtccctttcatcatattattgctcgtcgtcagttggacgagcaacctttcttcggatcaacaagtctcatcaagtctcgggaatgatcaggctgagatcgaaccttgcccgtttcggttctcgttttccttcttcctaggtcctcgtttgatcgtataaaggacagagttgatgggatgcgttcggtttctttttacctttttcttcatcaaacctcctccgctttttcgctttttcgcttgttctcgtgcttctcatcgtgcctttcgctctccttctcgcgctttgctttctcttttgaccactctctcacagaattcatccgaccacactccttaagaagacactctttgctctcgttcattacaaactctttttctgaaccttcaccatcaccttcatcttcgtcatgctttcattgacttcaacatttatcaacctgacgctcgtcctgtcggctatcacgcccgctttggccacttggaataacaatggaaattggggtacatactatggcggcggtatctgcggagaaggtttttggaacgatgcttccttcaagtgagtttagttgctgtaacatatacatgatcaagccggctagcttcttattttggcgtttatctgtctcttgcgccctgttctctactctacagacgctgcacgccatatactccgccttctggtcagaactgtggcgataacaattggtgtgagttcatcattttattcctctacctcttccaaggactagcttgactcattatatctcatcacattcaactgaatagggtggggaggtggagagtaagcataatccatcctctgagcaagcattcttgatcctgatcaatctcttgttcatgtttgactcttgctttcattgactaccagcgcctgtggaagtaaaaacagatgtgtccccataaccgttccttcttctgtcgcacctccgcctgacagaaggaatcatctttgcccgtacgtatttctctttattactccgtctcatacgcttcaggatgctcaccagttctgcattcatgtttgacctgcttagtttcggatggacctggcgatcatggaatggcatcaaagtgttggttttttaaatttaatttaatcaaactatcgatctcagttctatcggtacagacacttatgtagactcaaacacctcatatcagctgctctcctcggtctcctgataccccgtcttgcggcggaaaaccaacttgtgctgatacccactcatggcatcgggaaacatcctgctgtgtccccaagacgagtcgatgggcccgggctttctctccagtaagtgttgaatgtcatttagctttgtctgatgggtctgtaaactaaagactctgacatacctattcctgcttctatgatgcccaaagactgctgccggtgaaaagaatgatgaactttgccctagtatgtctttgtgtctcgtatacgattgataagcaccgcattgatagatattgacaacgaactgcattttcttcacctactttagaccacctgacttcgtgccccatcgctggagcgtctaaagacgcatacgaatgcctcgacattcaggccgagtgagttttgtccttcgcatgctatagtcatcactatttgctcatcttcttgattgcttacgtctttcttctcgcctagacttgagtcatgtggaggttgcgtgtccatgggacaaggacaggatgtatgtattttattgattcattctagatgccgacagaattaacggctcaagtttgctggctacgcttccaatctcactagtgcacgaccgctattccccacgccaaatcagtcggatgcgaacaaggaaaatgcaaaggtaagtccagattaggagaagtcaataaagaaagaaatacgacatccgtcttcgtttgtttacttgagtttaatcggttattgcagtctactcatgcctgagcgggttctccttgtccaatggagagtgtgtctaaacatatctgtcagctgttggccgctattccctcttccctttccctttcccaatctccgattgctcgcttcgctccttaaatatacctgtttatggttgacactgaactgttgatatccatatacccttccttctttggacactagctgtttattgctttcatctctgttttttttacttaattctctgctttttgcttcgctatccgtatcttgtttcgcacattaccgcgctctccttttgtgatttatactgctttgacttttgatatatcattgtcctgctttgttctatcatatgcttccgcttatggacctgtgatctatttcgcccaaatcttctctatgtcacttagatatagctcataaccccgctcgattctatgcacgttctttttcagtgacatctctcttgatttcttggtttcttaaagacaaggctcattcctttggatcaatctgtgtaggatcgaattcgtcttgctacaaaaaagaaacaacagtttgttgcttacataattacagccagtgcgctatctcaaaacacgcaccacgcttaccagaatcacttacactcaccacaccacaactcactctatcttgaccctatgtcttcatccatctacgcttccgctccgttgaaagcatcaaaacgaaaccgagtgctgaacccggcagcaaacggcccttctggctcgagtcctcattcgggtggacctgccggccaatccagctcaccccatcatcaccaccagggtcgagcggacctgacggaggatcaacgacaagaaatcaaagaggctttcgacctgtttgatactgacaaggatggagcggtggactatcatgaattaaaagtggctatgcgcgccttgggatttgatttcaagaaagcggaggttctgagaatcttgcaggaggctgatagggctggagagggtatcatgcgatttgacgcgttcgagaagacaagtacgcgtttcctttcttctcgtttgggtttcgttcattcttctgttgtccggatgagcttctgagaggatggttagacgagaaaacatgagaggttgatgttatccaatggtaaaatcgagttcatccggctaacattttcctttctgcttttctctcttcagtgacggcacttctgctggccagagatccaaaggaagagattcatagagcattcaaattattcgatgacgacaacacaggcaagatttcgattcgaaacttgcgtcgggtggcaaaggagctaggcgaaggattagatgaggacgagttgtacgttcttctgttcttgttcttgttcttgtttttgccctttgttgtttctcgttcgtctttctgttccgcgcagaaaggatccatggatcaatctgacaagatgtttcgtgatcttggggtttccaacagacaagctatgatcgaagaatttgatttggaccaggacggagagatctcgttgcaagagtttatggccatcatgatggacgaggattaaatgaagattgatttgacctaatgtatctcatagtatacacctttcctatctttttgtgttatcatcagccatcatcgttccatacggtatagacatttcaccttccgatcaaacctctgaactataagaacgcttgatcgagtcggttggcagatacatgggttttgaatgatgtttatgttgcggatgatgagcagaacgaggtaaagaagaagagcagaaaataagaaacaaatctaaacaacaatcataatagtcaacttctttttcccccctagagttgatctgtcccatacgaccgtcatcccagcatactttgcaatcgattctcctctcctttcttctatcaacatcttgcctgttggtcttctcttctctgtcccgaatgccattagatcaggcctcccagcaggtcgtttcagcccttcaggctctccagtcgtcgactgatcgacaaagtcaacttcaggctaatgactggctcacctcatttcagcattccgtacgtctccttttcgctcgctccttcttttctggacaagccttgcctacatcttttctgccaactgtttcttctttcttcatctcaacctgacgtcttggcatttgttgtctgttggatatcattcctttgtcgatccttcaacggcccacgcctttgaggaccttgcagaaagatgcctggcaagtctgccacacgttgctcttctcggacgaagcgggtctagatgtcaagatgtttgccggtcagactttccgagcaaaggtaaagttgtttcagatcaatgtatattctatccagctagcctctaatgtgtcatattcggttctcgtgtttttttcttcttctttctctatcctttcctcttctttgaacttcatctctaggtcatctatgacatttccgaacttgatccgtcgtccactgctggccttcgaacttctcttctcaccgcgcttcgaacattctccgtcccgggatcccgtccggtgctcgtacaagtctgcttagctcttgcagatctggcagtacagatgatggagtgggagaatgttgtcagtggattgatcggagagctagggaaggacgttcagatggtgcccgccttattggagtttttgagagtcctcccagaggaggccggaaacccaaagatctcgataactgtcagtgtatcttcttcttttgcgcgtgagatatgaaccatcatgtggggtttgagctcagtatgggtgttttgtatttctgaaacgatgcatcgtatataatagagtgaggaaatgagtcagcgatgctcttatatactgagttcgagctcgcaagagactttacagctgctttccatgtacatcgaagcaccaggtgagtcacattctctgttatatatctctatgaccttcatttcgttcggatctctcaagttgtctcgttttgattttctttcactaggtgtggatgctaagactcagagcgcggtctttgaggtcctccgaagttggctagtagctggagagctcatggcttccgacatcactcagacccctctgttctctttcgcgtttcaagcgctcaactcgcccgccttgttcgatactgcggtcgaagttctagttgacttgatccacgaaacacaggaaatcgacgacaacttcacatccatccaacaaattgttcctcaggttatttctctcctcccacgattagacgagccatcgactcaggaagatccagaggtcatgcgcggtttctgtcgaatctttgtcgaagcgggagagacttatcgacctttgatcttgcaacatccagagaccttctttcctcttgttcgtgcaatcgcgacatgcgccgcctcgtcagaactagaaatcgtcaagatcacgttcaacttttggtacagactgtcccaatccttaggcaagcgtctatcggacgagttttctagaccgttcctcgagatctacagcggcctggtcgaggtcatcatcaaccaccttcacttcccacttgatccagacgagatgaacgctcaagaaagagacgaattccgttcgttcagacacactatgggagataccttgaaagactgttgccacgtccttggttctacggcttgtctcaaaagaagttgcgagatgattcaggctggattggaagcggcggccgcgaacccgtcatcttctaatacgacatggcaggcgatcgaagctccgttgttctcgctcagatcaatgggtgcagaggtggacccaacggacaacgaggccgtgccagttattatgggactgttgccttctctcccgaaccatccgaaagtcagatatgcggccatcttggtcatcggaaggtataccgagtggatcgactgccacccagaacatttgccgttcatgttgcagtacgtgagctctgggtttgaagatgcagataaagaggttgcagctgctgcagctcagtcgatgcgatacatgtgcaaggattgtaaacaggtcagtttgaacattcttcgttttataatttcttgtggtacagatctatctgatccgagtcttccctctgttgtatgatctgttgttcgatggttccatctctcgaaacagcacctcatcccatttttgcctcagcttcattccttcctcacaaccgtcggcccttcattgtctcaggaggacgtgattcaagtaactgaggccgttgccttcgtgctatctgagatgccagtggaagattcagcgaccgctttgggaactttcactatgcctctaatccaacagattcacgacgtcactcagagatcatctgtaggcaaagatgatctctacgccttggctggtgagttttctctctttccttctctgtagaagcgttcttaacgatgttgatctgctttttgcttgtggtatacagtgctcttggaacagctcgaaacgttcttgatggtccttcgtacatatggttcttcgctacctgctagttgtcattcgaccccagccgaagtctgggctatcctcgacgccttgctagtccggtttggatcggaattaatcgtgtctgaacgagtctgcgcgctacttcgtaggggaatcacctttttcggtcccgcagctcgagatatcgtaccggctatgctgaaccgaatgtctagttctttcgaatcaagtctcagaccaggttatctctggatcacgagcaagttgggaagcgcgttcatcttggaacctgggggaggtgtagatgaagaaatcgctgctgggttcatcgctgcttgggagaaggagacggaggtactggtgagatatttggagcagagtgtggtaacggagattcctgatggtaggcttcaacgattatctctttcttgttgttgatattgagctctcgttattgatgcccgagtgtcttgccttcctttcaaaaagtcatggacgacttcgtccatctcttactagaaatctcacctgccgtctcttcccagatctttacctctcgaatgttccccccgtcgttccatctcgcacttcaggcactcaccctacctgctcctcagatccttcactccactctcgagtactttgaggcccttctctcccatccagccattcaacctttgtcctcaagcacctctgcatctggccaatcgactccaacaggaacattcgacccatctaacccatcagctgcctcccaggccctctcttccaccttggctgatcaaggcccccgacttttagatgtcactcttaacggtcttgtcaccggttttccggaagatgcagtccacctgattgttgctgcgcttagagtcatggctgggttgttcccagaaaaacttattgagtgtctaccggctgttgttgagagattaccggcttccggtgtgccgtctgctgagaagcagacctttttgacaaagattggatcgtaagtctttctccactcgctttcgtcatttttctccgctttgttccacatcaatcttatatacgtgctaacttatgccttgtgctttgtctttccgtcatatcagtgctttatccactccaaatcctgatctggtgaaaccagccgtgctcggtttataccgtgcatctagacgaagtcgagaacgcctacgttcccacggtcgaatttctggagatcaagatgctgcttaggacgaagaagaaacgctgtttttacttcctggcttttcctttgttctctagatggattaatcagataatataacatcttctcttaaaatatcgaaaataaatttcttctgcttaagctcaagcttccggctcaacgcgttcggtttgatggttcacatgataagttgtacaggtccaaattgacatcgcgtcctaagaaagaagaataagacgaaaaaatctgatgcatatttcatacgagtgtatcaactacaagaagcccttcaagacctagatcttattcagtcctcctcttcgtcactctcgacgatcctgatctttcttatcaatcttcttcccacgggcttctccctcttctcgtcttcactatccttctcgtcctcttcatcttcttcctcattctcagcatttttgtcgtcttgctccaaactcgactcctttgcatcctcttcctcttcctcctcacttgaggctgtccgtcttgaccttgtccgctcagatactcggcctcgcctcttgctcccttttttggaatgggatcgatgtatcttctccgcctcttcttcctcttcttcctcctcttcttcttcctcttcttcgtcgtcctcttccctatccgaatcggagtcttcttcagaatcttcatccgcttcagaatcaatatacggacccgatcttgctcgtctgtcgtccaagctcagatcttcttcctcttcaccttcgtcatcatcaccatcaagagatgaatcttcactgtcgtcgcttaacggtcgctcttcgtcttcgtctttgtctcggtcgtcagaggcagtatcgtcgccgagggtttgcagagctcgatctcttcgatcgatagaccggttgatgtttcgagtgagtcgttccttgtgccaccacctggcttgtttaggatgtctggtcgatatgtgacaggagaaagtttagcttgaaaacgaagaagaacgaaaacaggggtgagaggactgactcgcgcaaacattgtcgaatgaacctcgagccatccacgtcatcttcctcgaggtcgatatctcgaatcctaaatcgaatttcatgaggttccccaggacgtcgactatctgtcacaagagcagagatatacttcccgtcgatcgtcaaggagaatctctggagcatcatgattggagatgaaaagaagggagatgagattatttagagaaaaaacagggaaccgcaggctataggactaacttctatcatcgatgaggtagctcctagatctttcaactttcgatccacttctgcctcgtgtcgatcctgattcatgcagaaccccatcaaagtatgttaaacatcttccgcgctcgtgtgtctcgaaacaagacagaagaatgaacgatcaacacataccaggccgccctccccagcttcttcatcaaactcctcttcgtccccgctctcggtctcgtacgcatccaaatctgtgccatcctcttcatctccatcatcattgtcatctgcgtcatcgccttcgagtctatctcggcgagatcgtcttcgtcgaccatcagcttgaacctcgggtaagtcaagggaatccatagatccaacagagtctccgtcaacgcttctatcggaagatcggtctgcttctggattgaggtattgtctagcacagtttgtctgtataataggttcaagtgttattctatcaatgtcactttttttttggttttgtattagactgtgaaaggatgaacgagagaaaaggaagggggggagataaacgaacgcaaacaccatcaaggacttcactcgcacaacctttacatctccagcatccatccgatgaatcccaaatcggtagtccccacccttcgcctgccaatgcaccttcgaataacgcgccccacccgcctactccatctgtatctaattctgatgcctttgctaagcttgcgctcgtaacagcggatgtggttgatggacccagtgtctcgtctggcccgataagaacgggtgctagaatcgggatcagatgctggaggaggtagatgggagtaggtggagcggtgacgcgcgttcgacattgagggcaagacaggattttgggaggtggttgatcgaaaggaaggtttgtcgattggggcggtggagaggtaggcgcaggagtaaggaaccatgctcgaaggctaaaacaggagatgcgaaggagaagaaatcagaatggcaaggacaaaataacggtaggagtacgaaagggatgatagaccattggaaacaggctgcatgaccgcaaggtgaaatcctgtaagaaagcaattcagaaggacaaggactttcaattacattattatgaaaccatataatctagaaccaaaagagactcttacaaatatggtcggtccatcaagttcaagcaaatcccacaggtgaaagcctgtttgatagtattcattgtctccttatgagcggtaatctcctgttaatgtatagtaagaatgatagaaataagcaaaaccactcgttgatatgaaatcctatacaaggatgcgtcttagactcgaaataaggattttcgatgagaacagggtcgagaacatacttgatctttactcttgagatctttctccagatttaccacattcttcattatctctgcctcccttcgctgctgattttctgcagccttcattctcgccgctctctctctcaattcggagcgaatatccagtccggaactctgttttggctgatctatggaaggcaaggcagaagtggtcgaatttgagagatcggcaggtggcggaagtgacgaaggagcagaaggtacagcaggttggggagtaggctgagttgggaccgattcctcctttttaagctcttgggtctcaaccgcttctctctttttctcctcagtctgtttctgcaacgcccggcgcagggcttttcgttgttttttagtgagattggaagaactagcctgatcggttgctgatgtactcgcttgggtatgatctggagctgctgaagagaccgtggaggctggttgaacactcttttggtctgtatcttcttctggatcgtatcagatcaacaaggtcaatcttaagatggttctatgcgattctacagagatcagattcggacgaacttggaattgctttgagaccatcggttgcttcttgaactgtttccgaggccagtgatgttgacgcattcagatctttcgctagttttctcttcttcttcttgtgttttttgggtttcggctcatgcttcgactcgtcgtggttctctggttgattgtccagatagtatgcaggaagcagaaaacaggcggtcagattgatggttgaatagttaactggcaagccatgggacgtacccttttgtatcatcttttcgctatctttagtcgttcctttgctgccggagtcttttccttcgccgaggagagattgcaaccctgatcccttgtcttcatcattgtcggtgtcatcttcatcattactctcctccgagctggattcttctaaacgagctctttttggcgcgactcctcccgctccacctccgctgcctcctgttctgctaaagagcggtttgataggctggacctgagtgacggctacagcccgacctgttgacagtaacgaccttggtgtagagctagaggctgcggtaacagtggcagagacgggtgaagaggatgccgatgcttggcgggcattgaaggcaagaggccgtctgcgttgtgactgggcagaagaagatgatgacggacaagatgctgtagtgggaatacccacaggaacgggaatatggtctgacatgaggtatcaagtcaagctagggccaacgataaatgtcaaggtctgtggcagcagatgtagttggctaacagaatggattcgatcagaagaacctggctctgaccactataaagctctttctcttgatctcttgccggatccccctctctcttcgatcttttatctgtgcgctctgtactgtatcatacccgtcctcgctcctttccctgccatcttttctcaactatcttgtcctcgtctcgatcagctaacgacatatggatccatcttctgggcctcctctcgaaggattgagcagaaaatcttatgagctaatgacgcgtctctggtgacgcgacgcgacgcgacggggcacgtgccgtaagattaagctcgtatcacgtgactcaattctgtaaccaaccctgttcttcatctttccatctttctttgtgtgctctgttctccgttctcaccctcgttcttcaccttcttctctcacaactcattctctcatcatggacaaggcaaagatcgctcgacttcaggcagccgtcaagattggtgcgttggtctcgttgatttctgtgtttttccttttcttttctttcagtcatgagctctcttgttgggagaatgagtgcaatctctctttaacccttgtggaaactgctcggctgacttcctgctcacgtcaactgtataccccaactcttcaggcggaaagggagctcctaagcgaaaggtcatcaagacctcttctgcctcttctcactctaacgatgtcaagcttcacgccgcgttgaagaagctcaatgtcgctcctatcccaactgtcgaagaggtatgctccttttgctcgtctcaaaaaggcttctgtctgcgccttcgtctgagtcgtcctcagagacggtaaactctgttgcctctcgggatgatagatgcggatgttctcgtgagaacatatactaactctaggtcgattcaacaggtcaacatgttccaagaggacggacaggttctccacttttctgctccccagggtacgccctcatattttcctcttgagctttctttgtatgatatctgcttgtcctttctttttgctcatacggctgacccatcttgttggttgtctcttgttactgtagttcatgccgctttggggtccaatgttaccgccatctacggtggacagcccaaggttaaggatcttgctgagcttgttcccggaattctcagccagctcggccccgaatcggttagctcttgatttccctcttctttatatctttcatctcctcgttcgtttggctagctctttggttgagccttttttttcttcttccttttgtttggtacaacagcttgcctcgctgaggaagcttgctgaggcttaccagcagatggagtctcagcagcaggctaccggttcgtttccgtttctcacttgacacccgaagtggataggatttgtgtgttgaaacatgacgtcttttctctatctgaatgttttccaggcgctggaaaggctcctgagggagatgatgaggatgatgttcctgtgagttctatgcgtctgctttctcttcttttgatcgtcttcatctgaggaatttactgacttttctttttggttcttcatgaataataggagttggtcgataactttgacgaggctggagagaaggaggaaggaagcaagctcgatgagcttagtacgtccctcttgatccttttcgtcctatatgtttttttttcctccttgagtgatgttcaccttaccgagatagtgaaacgatcgataatctaacccttttggaaaaaaattctctcttcccccactgcctttgaatccgtcagactaaacgttttatgggatccgatccatcctgctatcgctaaaactgcaacatgagactcctcatttccgactatagtgtgatcaatcatatgacccctctaatccccaagccaaaactcggaccgaatcgttcttcctcttctccttcctctcctttttttcttgtttgttgatgctacccctttcgttctgtctttatgccgtttgtctcgtgttggttgacatgagatggacccttgacatttcttcttcttcttcctttttttttcttcttttttccttgctttcattggcctagccatgtcgtcttcgttccctttccttcctctcgttctcttgtttcgcgttcgtgtgcgatgaatcttggaatatggaacatattttgagaaaaagaaaaagaaagagaaagagaaaaagaacccctcctctccccctcccaactcgagtgtcgatcgcaaagcaagcgagaaagatcattcgggcgccgacacaagatagcaagcaggcaagcaagaaagagaagagaagagagaaaagaaaagaaaagaaaagaaacgcctcccgaggtccgagtcgggcggtttttttcttctcctcgggacgtgagcaaaaaagagagagggggggaggttgaacacatgagattccggataacgggcgatctgtgtcgagcctggtctggagcctgatcttgtatcctgcgtccggtgtgcgcgtttgacaccgtcccgtccgtttgtccgtttctctctgtctggtttgttggttctctggtctcttttgcctcgtcccttgtcgcttgactcttcttgactgaatccatttatagaagagagatataaaagatagcaggcctgacgttaaagggagaaaaagaaggaaaggaagggaaaacaactataaccaaagagcaacggaacaaggaaacagaaagatgaatctttggagagggacgtcaggagaaaagatgagaacggagattgaaagaagagagggaaaaaaaagaaaagaaaaaaaaggagatcaagcggaaaataggaaacatcatacaaaatggaaggccgagacaaggagaggacgaaaagagcagaatgatgcaaactaagcaaagagaaatccgaagagaaggaacgaaagaggtttggaggtaaaagtgagagagtattatggaagactatatatgtaagaaggaagaatgatgcaagcgttgcaaaggatggtatgaatcagacgtgcgaatgaagagagacagaacgagaggagaacgataatgggtggtgagaataaagggacgagagatgaacgtatcaatttttggtatgcaaacgccctgaagaacatccaaccccggatcggggtagattctctctgtctggatgaggacagtgtaagtccaagaaaggcactgaaagagaaaaggctgacagacgggcggtctagtctgaatgagatctatgaggtaaggcgagacgaggtgtggaaagaaaagtgcaaagacagaggaagaaaagaacaagcaacgagcaagaaagatgatccgctcttcttttttttttttagaacatccatccccaaatcttctggatgatcgacgtcggttctgggtgcttctcttgttcgaccctgtccatttcgtcgagttctcttcggccggtctcaaagtccatctccctgagaagagtgagaaggaaatgagaaagaagtcagtgctattcgtttcggctttgttttgtctcgctcattcgcgccaaattggaaattagaagaaactcactccaacgagaccatctttgtcatcctgagccagcggaagcttcccgtggtcctctcgccaccccaaagcttccaggggccgtagaagagtacgtatacaaggatacagacgtaggctgcaaagaactttgaggcggtaaagttgttaccgacaaagataccaaagccgttgaagatgatgacgagggacaggaagatggtaccgatccaactggcgtacggctggaacggagccttgtatggcaagtcgtccctgttgagtccctgtttcttcatgccgtagtagaacctgaggtaggtgatgaacaacgtccaccagacgagcaacccactcatcgaggacaggttgaatagccagtcgaacgctttagccgctccgccagagccgacgccgaggaaggcgaggaaaccaaatagacctgtgaccaacacagaccaatagggcattccatcctttgtgcactttctgaagaacctcggggccttgccctccaaggcgagcgcgtagagggttctgctggaagcgtagatatcagagttaccggccgaccaggctgcgatgaggagcacggcgttgatgacggagggaagacctttgatcccggcgttcaagatggcgataacgaagggcgaagcggagacgtcgtcggagccgttgagcaaccgggagtcggtgtacgggacgaggagaccgatgataaggatggcaaggacgtaaaagatgaggagtcgccagaagacccgcttgattgcctttggtacgttcttcctcgggttctccgtctcacccacggcgaccacgacgatctctgagccgaggaaagaaaacgcggcctgaacaaagacgttccagaatgcgaggaatcgaccccaggagccaccgacgacggtgtcgcccgaggtgtactggttgaacggtcctgggtttttccagtatcggaagccaatgtacccatcgctttcgggtccggctccacagttgatgcaaattcccaggatactggtgagcgtgaagaaggggtcggaaggaaaagaagagaagagacagatcaatccaggtggccagggatacacgcgcgcatactggccgcacggataccggcgaaaagagaagaagagaaagctggacactcacatcaaaccgacgacggcgatgattttcatggccgaaaagatgaactccatctcaccatacgctcggacgcccaacaagttgacgaccatcatggcgacgaacaggggagcgatccaagcagagacgttgatggttgcgttccagtactgaatgatgatactggccgcgacgagttctgtgggaagggtgataccgtacgagaaccaatagttccatccgagggtgaaacccatggcgggatcgaggaatcggctgtagaacgggcagaagatgggacgtgtaagacggggtgtgaaatggaaatgaagacagagagagagaggaaacttgcgttgcatagtgggtcaatcctccagagtcggggaacaaggtggccatttcacctagagcgatcatgagggtgtcttttttttaaagagggggagagagatggtcatatgatatgacgagtcagcaaggcaatgtccatggatgagaagagggaggcggaaaggcttacagatgacggctcccatctgagaggaaaggcgaggggaaagggataggatacatctggcgttagtctattggatttgtggatgcgatggaggtgggcgtgggtgggtgggtagtgtgacgggatgactcactgtgatgtaggcgagtaaacatccgacctgtttcagggggagagatagaagtacagaagcagagacaacgaaaggtaaacatcaagagacgatcaggtgagatgatgagaaaaggaaatcaaacgaaaaggaaagatgtttcccgactgaccggaccaccagactggagggctgaaccggctccgacgaagagaccggttcctatcgaaccaccgagcgcaatcatcgctctgttggcccgaggagagaaaagatgggaggagacagacggcagtgagtcacaagatggaacgggccggagaggaggaggagaagagacagagagacagagagaggagagagaacacaagacgtacagatgcctggctttcaactttcgttggacggttagctcaccggtgaccgagtgggacccgcctgaaggagaagaaagaagggatgagaatgagaacgagacaaacgtttacggatcagcctaatccgaggtggagccaaaaggaaaaaaaaaaaacaggcagagagacaggaggacagagcgaacgagggaaaggccaacgacagaggcaagaacaagataagaagcatggacagcactcaccattatcgacgtcgacgaccgtgtctgtataggccggtaaaccatccgagcctttcttctcgatatctgtttcttccattgagaggtgatccttcttgacctcgacctgtctgattcgctcgtcggctgcttctgtcgaccaagacgccatgatgctggcttgaactaccagggattatggatgggtgggtggatgggagggaaaagattgagag

SEQ ID NO: 2991 - DNA, 1090 bp, Xanthophyllomyces dendrorhous
ctgtgtgtgtgtgtgtgtgtgtgtgtgtgtgtgtctatctgtctgttctgaatggatggacgtgcgaacgaacgagcgagcgagagaacaaaaagtgcaaagaccaaagattcgtccggcgaaaaagatgagagacggattcagggcggaatgcaaatcgaaatggaaatgaaaaaaaattaaacaaatcaacatttcgtttccctcgcccccggagtcagcctagcggtcgatcaggcaccagcgcagacagacaggtgccctgaaccgtcagtgaatcgcccagccgccctgtggcgccgtgggacccgggagcgccggcgaccgtatgagcgcaggccgggagtgactcgtttgaattcaccggctcatcgtccctgcgccactcattcagggccacggccaccgacaccgacaccacacatcgttcaaacactgatttgtatacgccaatctatagctctgcttgagacccactttttcccgggagagggagggagaagagagaaagggagcaagcgcgcaggacgccagtaggccagaaagccagaaagccaggatacagactctcgatcagtaccaaaaaagaaagaaaaaagcatccttgatttcacacgatttcgattgatttgatcaattgatttccgtttccttctcttttgctaatccatttttcagcgtttttccaatacacagctcacaatgacctcactctgccaccccgtgtgtccccggccgaggttggagctagcttgggaaactacatctgatttgccaatttgtaaataaaatagaattcaaccagctagacgagggaaaggaaggaaacgatttggaatagattgagaatagaattcttcaacatcggttatctgtttgaaacccttccgtccatttatccattcatccgtccatccacccgcccatccgtcccatctttcgcctcccttcggtcgagtcccagccagccgaggaggcgtaaggccgggctggtcagctgccagagtttattcgtaggttctaaatgtctcgcagatctgtgcgtggacttatcgcacgtacaatctatccatacacacacacacacaca

SEQ ID NO: 2992 - DNA, 3644 bp, Xanthophyllomyces dendrorhous
acacacacacacacacacatctacctacaggatcacgtgtcggttgatggaccggtccttttctcgcatggaaagaggaaacgttggacgtcgatcgcccatcgcgcatcgcttccgtccatcttgtcctcccttgtcttccttcgcagtcctctctgtggtcctttttccatggtgatcccttcctcttggttcactttaaggtctatccttttcttttgtcctcgttctctttttctctttgtttttctttttcttctccctctatcttcttggagaaaaacaaggaaacgtgaaaaacatcggcgtgagcatagaacagacgggagtacagcttccagtgctcccaataaacaagaacgacattcagcaaagggaaactatctcaaaggaataaggagaccgacagagcaacagaaaaggtggaagaaaagaggagagcaaagttttcaggctgtgtgatagtgtatgcgtgcaacgatggatttgaacatgaacattggtagaatttaaataaacaaaaggggaaaagagaaagaaaaaagaacgtttgatctgctacatctcatctcatctcgtctcgtctcaatcctattcccccttcctctgctaatctcgagacaccggtctaaagggggaaaaaatgtgtgtttgggtatcatcaccatctccttctgcttcctcttctctttgtctttccttttttttcccctctctccctcactcctcatcctatctccttcgtgtccctcgcttaggcaagaccggcctgcttcatagccttgagcatgagctctccaatcttggcaggcgaggcagcgacgatggcaccggctctctcaagagcctcaaccttgtcgctagcggctccctttccaccagagatgatcgcacctggatccaaggaaagaaagaaagaaagaaggtaatacagagaaaagtgtagaccagatcagcatcaagggtatctcaacaaacgaagcaaccctgtccaagcactcaccggcgtgacccattcgtcgaccggggggagcggttcgaccggcgatgaaaccgacgaccggcttagggtgagccctggtcttgttgtacttctccaaaaactcggccgcatcctcctccatcgaacctccgatctcaccgatgatcacaataccctccgttcgggggtcgtccaacaagatcctcaacgcatccacgtgggtcgttcccgggaaaggatctcctccgattccgatcaccaacgactgaccaagaccgacggccgtggtctgatgaacagcctcgtagttgagcgttccagatcgagacacaattccgatctttccaggggtgtggatgtgtccaggcatgatacccatcttgcatcctcggggatcgatgataccagggcagttcggtccgaccattcgggacttgctctggctcttcaaagcctccatcactcggatctcgtccaactgggggattccctcggtgatcgcaacgatcaaaccgacctcggcctcgatggcctcgatgatggcatcagcagccgagggaggaggcacgtagatcacagtagcatcaggcttcgagtcggatacagcctgtccaagtcccgataacccatttgaatggcaagcaaggaaaaatatgagtgagacgaaaagaaagaagtaagaacactacactcaattcaacacacgcccaagccaacaaggtagtaatagacgaacctccttgacagtaccgtacacgggcaaacccagatgggtcgttccagccttcttggggttcactccaccgaccatcttggttccgtacttgatggcctgatcggcgtggaaagtaccctgtttgtttgttcgttcgttttcgtggtcgtacatatgtgcgttgaagaaaaggcaaaaacaaagaagacgaagaagaaggaagaaaaaaaaaagaccccaagagaagccaataagaaaccgaggccgttcagatcagtatttggaaagatctctctctcactccaacaaggagggaaaattcggttacgaacggtctttccagtgaaaccctgaacgagaactttggtatcagcgttgatgagaaggtttttcaacgtgtcctcgtaggccagagtaggcttcgaggtagagaaagcccttcggacagcggctgccaaaagaaagagagaaccaaaaaggaacgtgcaggtcaaacgtcagtcagatgtgaaacatcagggcacaaaccatcacctaaggaaggaccggccgataaagagcttggcacgagcgacaatcaaaccaaagatacatacgctgtcgagcaaggatcttgaaggactgcatagccaaagatgaaaaggggaacgacgagagatttgggatggaggattgggtgtgagagagaggatgagaagaggaaatgaaaggaaaaaaaaaagaaaaaaaaaaaggcttaggcaagaaaaaatgggcgaacgcggcagtggaagagacgcacagtgggggagaaggaggggagaggttgacccgtaagaatgcataagccgagtgacgccgagaaagtccgatgacctatagatgattgtctatctgatataacccgcaccttaatgcagcaaagctacctaaggctacctctgttagggttatacctatagatctctgtccgaacaggcttcaagaaaaagtctcaacatacacgctcagagagaacacacagggaacgacaccatccgtctgtcgtttagttctcctttgaggattggaggatcgttctgttcgcttagccgacggctgtatacaccctgtttgtttgtcggtaagtgttgctctctttgattgaccaccacagcagaagcccgaacgaaatagcctgacttccggccaatctgtgttctacttctttctagagaataaaagatctagtaccttcacataaacccttcgaggatcggcacactttcgtttcatacccaatccgattcccttgtcgaccgttgtaggaccaacagagacttcctcgcccgtaaatatcacatcaggtcggtccatcgttcataccttcactctatctttctttcccttctcttcatcgatggcgtgtgtcatccatgagggtgaatgatgttcttggtttcctcgtctctttcggtaaaacacagtgtgtatccatgaaatgctgattcagacttctgtttcccttctcttctctcttcttcctctttctcctcttctttctgttctcgcactctagctgttgaccaagcgcatatacccttcacttgaccaacccatccccgttcgctttagacccagctatgtgagtccatccattcggcatcgtcattatcaccaccatccattgtcttttctcaattgtaggttggagaccaaactaggtcctgacatcaaatgtgatattctcttgtcgacctctttctatcagttgttccatcatctccatctgcaacgagttgaactaggattcccacattcgtgctttctcatctcaacttgaaagttgtcgacaagtaagtctgagctttttttcttttcttcttcatcgtcccccgccgcaccttcctccttcctccttcctcctttctcctttcctcttcttgtcaagcatccaagtcggattgaatccgactgcatcgcgcaagg

SEQ ID NO: 2993 - DNA, 2422 bp, Xanthophyllomyces dendrorhous
cctacaacctgatcttttccgtgcagaacaggacagaacccaggaagagcgcatacagtccaccggttaacatctgtcttttctctgcttggacccacatctttagctcaacctcgtgttttccctcaggaggaagaccagaatagatccaaaagctaacgagaaagcaagaaaaggaaggaaagaaaaaaaggccatgagttgggaacgttcctcctcccgatatccgtcccagacgtccctcccccttccttcggtttcctcaaagtcatctaccgccaccgcctcgtcctcgatgaacaacaattctcaatccgccttctatccaacctcgtcctcctgggaaagctctaaacgtcgaccatcctcacctccacacaactcctctgccgcaacatcgtcaggtagatctgcgatgggagtcgcatccatagggaaggaagaccccggatgggatgctttcagacggtcatcttctcggtctacatcctctagctccaccgctctgcctcctcttaggtcacacgcaagagactccctttcatctacacactcgtcatcaaccacgacagcagattcttcctacagaaactctacggtcgatagatggaaccttcctacagggagcacatatgcctctctgccacctccgacgtccgcgtcttcatcctcatctgctgctcctgcttcctccagaagttatggcggcggatggggtggcgcaggaacgaacacggcagtgggatccctccctcgatccggatcagacaggacgagcagtactagccgaaagtgggagtcagggtccaaatctcaattgcttccctctaggtcttcaggttcaacagcttcgatcccggcttcgacaaccgacgatgctctagggtctggttcaacgtcctcctgggagagaagacgagatcgactgggagaccagatgaccggaggacaggctccttatgggtcaaacacacattccagtaagagtcgagtaggagcaaactggggatgggatgacaggtaactcatttatatacacgcagcctactcgttccatctgtttggcagtttgacagacagtcgtgctgatgtttggcgtcctctttccttcttcctttcacacagaaactattcatcagaccatacctctgcagtggctccccctcctactgtttcatctcgagcaagatcccggtctccttccagatcgccacctccgccacaccatactcagttcaacagccgacatccctcttcctccaccgcatcgtatcagcctgcttcacgtcgggctgcctatccggccgtctcgtcatcgtcgtcgtccactcatgcccaccatcccccgtctcaccagcgatactcccccggaagaaaacaacatgctccatccagaaggtcgccatctcctgaatacaacacatactatgaccgacgaagagggagggaaccccgagcggaacctagaggaaagaaggagaagaagttctacccgagccacgagccagagaggaagatagacagatcgagaacaaagtcggcttcgaggtctagatcgagctcaaggtcatctatacattcttcaagatcaagatcgaggtcgaggtcggcgtctaggatgacgaagcaaaagccttcaaacagaggagccgacgacggagtcggagccaagacttcacagaggagatggtctgtcttttctgacaacaagtccgggatgtcctcccctcggggccgttcagaatctccgcctatgtctctagaaatggagcgtgcctgggctgccaaggacagagaacgacagcgaagagagcaggatccagaccgatcgtttgggaaacgagaccgatcggcctcgccgtctcttactgcaagccaagcgatcatcggttcggaagttcctcctggtccgggagagagaactcatgggtgggcggcctccgggtttggaggcgtcaactcgattccttcggcaccagccaacaaaaaaggcaagtgggaccgtggttcgcccgcgccaggtcctccgtcgggtcctcgatcaagagcgggaaaccagaccgggtcgtcaagcggattctttcctcctagtggacccgctgcgtctcgaacctccaactctgcttcgtctcctgctcctgctccccatactaccacccatgtttttggaccaccacccaaagtacctctctccgctgcggagaaacgggcacaattctcgaccggacctggttctttgttgtcttccagtcctgggaccgctttcaaagatccttatcaacggacgtacgagccttctccccttcaggctcatctactctcgagcgcaaacgagaaggacgctgtaccagcaggaccgaaggtccaccgaccgatctatccgcctgctccatctagattgagaccgagatcacctgaagag

SEQ ID NO: 2994 - DNA, 17615 bp, Xanthophyllomyces dendrorhous
accgccgatagaggtgttgcttctgatcttgaccgtcatacggtcggaacaggggttgtgcagcccattcggtttggactgtccgctcagctggcgacgccaggcgagaaactgggaggaccaacagcgagggtcagcaagtttttctcgttggacgacgacaccgagaaggacatggtcaatcaagccggcgaacggaacaaagatagcaggaacggaagtaagccgaagggtagcgagagggatctggagaacgaaagagagatcgaaagagagaagagagaggagaagaggaagaaagacgcaatggagagggaggtcgatcgattcagcgagagtctggccgatcgagactcgaggctaccaagagagcgcgaacgagagggagaccggaaccgggaccgagatcacaaccgacctcgtgaggactacagagatcgagaaagggagttcagacgggaagggttccattccggtcgaccccatcgctctcaacgcaagtacgatgatcgaacagaacctggtctgatcccagcccgatatcgggaaccggagcaagagaaatctggtcgaccaaagaaacgagaacctagcgcagatccatttggaagggctcctagagcgtacaggtctcctagtccggatatggagcaaatatggaggaggaagaagccagaatcgacagttccagagagcgagatttcgagccacggtgaacgagacaagatggaagtggaccagccggccgagacggacgatcgacgagatccttctaccgccgctgcctcggaggtaccgtcggtcgtgtctactcggtcgacgtcacctgtcggatcttaccctgcctatccttcggcccagacccagcctgcttcagtctctgagccaagccatgtatcatcttcttcgctgactggtaaaccaagtcacgatgatcactcagctccagcccctgccgctcctgccaccccctttgtgaacggatctcagattccccctacgaccgaaacataccaaaagattgctcaagtcggagagggtacgtacggtaaggtgtacaaagctcgaaacaacgagacaggtttatatgtcgctctcaagcgaatccgaatggagggtgaaaaagagggcttcccggtcactgcgatgagagagatcaagttactgcaaagtttgaatcatccgaacgtcgttcggttgtttgagatgatggtctctcaaggtgtgtttctgccttttcttttgtgtatgtgcgtacgtttgctcacccaatctgtttatccatttgtttgtttgcggcacatgcagggtcttgtcatatggtgttcgagtatatggaccacgacctgactggtgtcctttctcagtcccaatacgtattttctccggccaacttgaaatcactctgccatcagatgatctctggtctctcccaccttcactttaaaggtgttctccaccgggacatgaagggctcaaacatcttaatcaacagcttgggcgaactcaagttggctgactttggactggcgaggttctatcataagcgtcgaaggagcgattataccaacagagtcatcacactttggtacagaccgatcgaactgttattgggagcgacagagtacggggctgaggtggacatgtggagtgcagggtaagtctcgaactgagtttggcgacaagatcgtgctctctcctctctgatttcatcgattgttttctcgataagagtgactgatccaatcttttaaatcatctcttcgcctctttaggtgcatcatgctagagatctttactcgtaaaactacgtttcccggtaagtcttttcctcctcctttctttctttcttcttctttgtgtacatatgaacctcatttcttattgatccgggaatgtccatcatccatcatccgctctcttgtttttaggtgccgatgagatcagccaactggaaaagatttattctctctgtggaactcctaacgaggaagaatggccagggctgacggacctgccatggtacgagttactaaataaggatgtcccacctgtcaggtcgaggttgagagagatctttgagccgctcttgtcaccgggagcgatgcggttagcagaaggcctactggaatatgaccctgttaagcggacgacagcagccgaggctctccagatggactacttcacaaccgaggagcctccgatgcagatgcctttccagtacgttgcctgcctcttacgatcgttaacgactgttatctaaatctccatacttgtgtgcgttgcgtggtgtatctgactctgtctgactctgtgattcatccgatcttttccttgtaaaaacaaaacagtctggcagaagtaggtggcgagttccatgagctcgaggcgaagcgagaccgaggtaatattcccctcttcaatcaaactgaacaaaaaaagagaaagagaaaagcgccgatgactgacggaagtggttgcgttttgtctacgctcttcgataactttagccaagaaacgagcgaaaggtcgagctgagggggatcatcgatctggtacttgaaggatcgaacaagaaaagacttatctatcaatcgtaattaatgatgtgtgtgtgtatatgtatttatatgaaaggataagaacagaaaagaactttttcttcgtagcttttcttctcagaaccatcatctctttacaaggcagaagatcttttctctatctctatatatatacacacatacgcagagggaagagccaagatcaaacgggggggagagtgatagaaagatagatcgaccatgtgtctctccattttctcgcgcgccaacaaatcgggattctgaaggaaacttcaagctcatgtctatccaggacccgttcgctcgacgagttagatgtacatatgactagccgcgccttccgctttcttccctccgccagccttccaaccggccgaccgccttccgctcgctttcccgagaccggacccgtcccagccgagccggtcgccaaacagctggtccagcaggctggctaggtcacccaggagccgtaacgttggtctgggagccggtaggatgaacagatgcgtcggaggactcgacagagggatgagcgagaggaagggagccgagggggagaggatatggttaggtggggagaatgggacgatcgatttctggtgaatttgttttgttcggaaggtaagagagaaagttgaagagagtttcgtcagtcgttatgatcatcattcgtgaatgagcaataacagtgcaagacacttaaagaagaaataaagacccacaggaagagaaggagtcgggctggtcgacagatatctgataggatgatcgtcagtgttcgattcggtcggatctgatgaagcccagatcggtgtggtatagctcgatgccaaatattggtctataacgataactctgaatgaagggttcgcaagacgagatgagggtgagatttgtgtgagaaacttcagagatgaaccgcgcaagaagaagaaggagaagaaggcaacgagaagactaactgtgaaggagaaagcgtctgtagaacggccagtgtcaacggcgtaggaacagatagaggaaggctggactcgatgaacagtacaaccaagtccggtgagagctgataaagtggtgcgatctagatcgttggaaagcacaagacggaccgaccacctcgcatggggttgagtatcgactcaagagcgagagcgagagagcgaaagaaaggcagatagaagactaacggcttcgtctcctcttttgacgattccatcgggtttccttccaggtttgatgtacccatcaccgaacaccccggcttcgttgcccaccaagaccaacagaccggctcccccttcacctgaccagtcaacgttgatctcaacagatctggccgagaacgaggccgaagctcgatgggattgatatgcgcttgcaggtggaaggtcttcgtcctctgattcatgaaagcccggttttaaatcagtgtttcaaaagaaagaaaaagaagtagaaagtgaaaagagacagagatcataggaaagccacgagtcaagtcggtcagattaacgaaaagaagccgaggactgatgacgtgaaacctgatgatctcttaccggaatccgactcgagggcgtaccgtgggggtgcgtggttgagcgagttggggtctgtgaatgggtccatgggtgcaagttgtgtatgtgagagtgcagtgggctatatgtaggatggatacaagatggtgatcttagagatcgcctttctttgtctcgctggaggtgttttgttctttcctggtcggcacagcctgaccgaccagcgaccatcaagctgaatggtcgatccaactcctaacgctatccgttcagcgttcgtttcattcaaatgtagctttcgatatgtcttattgtttcagcctggagggctctctttttccgtgttgtgtatagcgactttacagtcttgctttcgccctgcatttgctgtattcaacccggcatcatccattgtcaattgcagagcgtggagtgtggcgtgaggagtgtaggctttgtggtcttcctaactccctgtctccttctctttctatccttctatttctgtctgggagtgaatgaacatgcatggagagcaccggaacgggtaacaaagaaacggcaaaaaaccacgttgatcgagggctttaaccggactttccggcgggctgctcgttcctacaagagacaaaaatcgagttttgggacaagtcagcagggtttcaaacgagggcagaagtctaccagcaaagaaaaaaagaataggaaaagagacccacatctttcgctttcctccgggggcgagggtgacgttgacgaatctgtttggagaaaagaaggtcgaaccgaaaggtagatggcgaaggatgagaaacaggcgagcagagaagaaaaatcgggtgggtgaatgggacaaaaaggatgccgagcgaggatgatacagatcgaggtcagctcgagtccagacttgacgttcctatctccagtacagatcgaacgactggacggtacgtcacagactctcaacatggccagagatagcacaaagaacagagaataaagaaggacgaaccgtcggttgtaaagaagtctcttcttggcccgacccttgggggtcttgggcttctcctgcttctcaacctgtcagaaattttcccgatccccacacaatcacattcacgcattccatcaatgttccaaccgattcacacccgtttgtcacacagtcaacgtccaccgtttcaacccaggatcgaaccaaatcgtttaaattccaattcgagattacaaataaaagaaaagaaaaggcatcagaaacctgtggcaaaacgaagggcctgatccggccgtttctttttcctgattccaaccagacgacgacgacaaccacagagaaggaaaaattcgctggaggacataccttggggcactgagacttgaccttaccggctcgggcgagagatccgtgaactgatgagtttagaagagaagaaaaaaaagatagaacaatccgtcagcatgtttgtcccaatgtttgtcctatggtttttcaagttttccttctctctctctctttgtctttcatgtaccatcaaacggttggtctacagagcgacgaacgagaacgttacgaaccttttcccattcttgatgatgctggttgactacaaggtggtactagttaactacagagagtagaaaggggaaaaagaagctctttcttgctacactaacagggtggggggaaaaaatgaagctcgcacgggcctcgaacttacccttgtgaaagggactcacgaggcccgtgcggccggtcggtgcgcttcggcagtatttgaaaagcagtagatatcttatgtagttgtcttaggtaagcaaggcacgcgactttccatacagaacctcaatatttcatcgctttggctgctggagagcaatctcggtcgatggtggtcgatacgtagcctttgtgaggttgagtgtctttcaaccataggcaaccaggtccatggaccatggacttagtttgtgttaggcgcgtgagctgtacaggtgattgggtagctatagggtgtgcaacagatgcagggaagagcgcagagtcagaagttcagggtttttcagataggatcgtcgagaacagaagcgcaagggaacagaagtgatagatcacaatgaatgaggacaagaataataaaactgttaacaaaggatccaggttcacgagactatgccatggatgagaaaggatgcccatgttgtgtatgactctcaaactacagaggtactgagcaaaggcagtatgcccacgatacaacccacaccgaacagccacaaggaagaagagatcactggatgtgttaggagcgcatgcgctgtgtgactatgagttgtggcagaggatctgtgagtccctggttacagacgtgtaacgccatagttacatccaaatacctataagaagtcgccctgcctccgacagggaaaccctttttttcttcaactgttcagcaacacgtaataaccctgctcgccggcttccctttcaacgggggagaactcaatggtggcgtcgggtcgctagtggatgcgagaaggagaccaacgttcatcatcaccaaatcgacgactttcttcttgaagaacgaacgccgaggcggtaaagaatgttgggatatctcttgaattatccaagtttgtttcgagtgtgggacatatgatgtgcacttatagatgagatgaaaaagataggaaagaagagagaacatggcatcaaggacaacctcatatgggagagctctcgagggcacagatgagtcagaaacagaagatgagcatcgacaggaacgagcgttgacaggaaaggaacaggaacagcggtcgacagtggagagttgacgatgttcggcttcctgatttcagcatgttctctctgcctcacgaacagcgctggttctctctctgtccatcgcatcttgggttgtcgcattctctgtcccttcgtctgtctgttgctttgtctgatgatctccttgactactcatgactgtctctatgtcacgctactcgtttgcctctttggtgcttactttcagacttggtggaacagagatgtgaacgcgtcacgcaacatgctgcaccttgaccttcaccaggaggagaacgaaggagcaagaatgctggtatctgacaccgctgctgctacgctagccactgaggttgaggctggcacataccaaccccatgacttatggagatgtggtggttcgtggtctgagggcacccaagtccaaaagggccatatatcaaccactattggttgaggtcactctcaccatgcgttttgcagactgaccctagggaacagacgcgtcccgtataaaacccaatttttttcttctcccccgtccggtatcccttcaacacacatcgatcgtcattgtgagtatttcgagtcgcccaagctcatctcatctcatctctatccagtccctaccccctcttaaaatgatgatcaactttagatgacgagtcggaatgaaaaaccctggccggacgactcccactatggccgccaaaccgctctctttccgttttggccggagagcaccttggtggtcgggaggaacatggccggaggcaaggagacgacaacatactatgcttttggctaagcgattcctgaatctaccccccttcgatcaatatcttcaacttcactatctgctcctgtatactcttactgacccttatcgtttgtcttctcttctatcgatcccaaaagtgaaagaccatggcagaccacgatgatgattcttggtcggattcttctgtctcatcgacagagtcccgtttggctacgacaaacaccatgctcggtttcccagatgggccaatcgacactgaagctgaccttgacgatccgcagacttctcatattggcgggcagccttcctttctgtcttcactcaccacattcccttctacccacacttctctctgtctgacgtgtgaacgaccgatggaactcctcgttcaggtctatgctcccctggagcatagtctggacgaccgaatcgtctatgtctttggctgctcccgtagtggttgccagggaccggacgggaaggggaggttcgtccctttccttcgtaggtcgttctcttttcttgactttcgcctcacgggctcacctgtacaatacatacatgtcttgcatcaactatcatatgtcatttcccctcaaaccgttcgcccgtatgaatacaccgaaaacaaaatgaagcgtgcggtcgtacacatctcggaagcgcaatgagaaatacgccagcgctcaagaaagacgagctgccaaaaaggcggccgcaaaaacgactgcgacagctgcccctcctgtagccaataccaaggcatccaatcctttcgccgtgagtgttccccaagccatgggaagaacgtactaatgcgctgtgttcttgtactaattaatccctcctgtaacggacaaagaacgctggtctgggagttggctcagccacctctgccttcaatccattcaacccgttcagcgtgacgccctcgactgtgacaccagcctctccctttgggaatccgttcgctagttctcctaccgcaccaaatccgttcgcacctacgtctgcgcctgtttcgaccgagactcctccgttgcttccgcaagcaacctcggcgtcacatgagaccgtcttgacggatggagttcaccggctggatatcaagcctgatgagacatccgagaccggaaagacagagttagacctaggtttgtcttcatctttcttgtttgtttgtttgcttgttcgtttctattcgtgctaaggttgttgaagcaaagaaaaaaaactgataactaattatatttatccctgtgtgtatatgtatgtgcagcttggaaaaaaaccccgttctatccggcacagtatttagcgacccaacccgaacgactgtcgaaacccaagatctcggccgctcaaaaagctagtgagcgtgctcgtgccgaagcagccgccgctgccgccgctgctgtcaccaccacaacagccgaagataccggtctggaaacccctagaggaaaaggcaaagggaaaggaaaagaaccgaccgacgagagagacggatggggggagggaacagatgtcaacggattggatgatgtgttagataggtttctgaacagattgagtatcgagcctgagcaggtcattcggtacgacttgcatgcccatccacttttctactcttccctctcccctttctacacccttctccatcctccctcctccaccaccgcatctgttccggccaactcatccggagtacctcctactcctgcatttcccaaacgaacaggaaggacatacgatccttcaaacgtcccccgttgcaagacgtgcaagaaatcaaggtcgttcgaacttcaactcgttcccggtttgttgaacaccctaaaaccagaatctattttcgatcctctctctagtcctagccctacccaatccaacgacccatccctagatgcgcccgtacccacaacgacgacgacaacgacaactcgggacacccagacggagaagattcgacaagatctcctccagaccgttctctcaaaaactgaatccaccaagtcgctcaagacggggatggagtggggctcggtctgcgtgtttagctgtacgaccgacggatgtggtggagactgggccgaggagtgggtcggtgtcgaatgggaggagtaagagtctcctcttcccttccctcctctccctctcatggagggttgattcctatgttttcttcttcaaccatgctcttcttcttttccctcttgtttctttgctgctctctttctctctccttcatgtatcgtgggtttgatctttcgactcggcgcagagggagagcgcggcaaggctaggtcggagtaagtgatagttatataacaccgttattcatattagaaataaaacgaaaaacaacgacaccaccacctcctccaccattctcgctcattcgctcaggccactgaaacgggtgaatgattctttataaacaagtgaacagaggatatggtgttcatacgcgtacacatatagtccaagacagtcgggtttgagagaaacaacaaagaaatgacagagagagagagaggaagaagaagaagaagaagttaggcttcctaaagtaactctgtatatagtatatagtatatagtacctacagtataacatagagaccaaagcacgaacgatcaaacgaataaagaaacagacgacgcgcaagcaagtagacaaagggaaaaagtttcgcacaaataaacatacagtctatcaattaacaagaggggtagcaaggagaagaaaaaaaagcgggccagacttgggtttctgttaagcacagtattgttgtagtttatacaaagcacagttcagaagaaaagattttgaaaagaaaaaaagaaaaagcagaagtagtacaagagccaaaccaagcccacctctctggccatgggaaaccaagaaaaagacaatctcagaacctattgttccctgtcggcaaagacaccatcattgtcaatctctttctcggctttccctccccagagacattcaacccagactttctgtcggcctccttcttcgattcccacgcggcgttcatatgagtcggacagaaccgtttgtgagcaatctcgtaatgttcttgcatcgacgccatacaaggtgggccgtccgggtctgcgttcaaacaaggcaagtcgacaagagaaaaaacaaagagaaccgatgcaacgggataaggaaacgtaagaagataatcttaaaaaggaacaaggagcaaagaacaaaacaaaacgcacggtcacaccgaagacaagatggatgcaacttcacttggcttgttgatgatccttctttcacctcaacgaccgcacaatccccctcgataggtttcccacagctggccagtgcgcacaacgacccgctgttggatacatcacccgagagagagaagaattgaccgagtcaagtacagacgtttaagcaaagatgacatgtcatgaaagacggaggaggtagagacttacttctctcgatggtaacaccattcgcaaaatggccgagcatcaaacacccagaatgtctgtccgtcgaacggccggtcgcatccatagcacgtgaagcatgcccgatggtatttgccctaagacgacacacagccatggttaatttcagaaaacgctgacttgatgagacacatgctagagcagcgcgagaaactacgtactttgagttgaccatcagcagaggagatcgcctggctctcgataggaagggcacatcgtcggcacttcaatgtcacacaataacccatcataagctttccaaccttttgtgttgaattctactctcaaagtgccagaaaatcaaaacataaccaaccttgggcaagtacatcatcttccaatccctctcacacaataccccgccttcttctttcatcctgacaaacttgacgtctccacctacggcacatccacaattcttgcacgcctttctcttcgtctgcgcgttctttcctttgggcagatccggtcgactgagtcgatgttgcttccctccgtctgctgtcggagtcggatgtaagggggaggattctgtcgatgcaggtgtaaaagtgatggaaagtcgaagaggagtggacagatcagtctgaacatggaggggagagatcgaactggaggattggtccgacggtgatattgacgatgacgatggcttttgtcgagagagacccgagtttcctccgtcaaacgcaatagcactttctttgtcttcgtcgtcgtcttcctcgtaaagctcctcggctccttcctcatatgtcccagctgagtcatacccacccaaactactttcctcatcgttctcactctcgcgcccgtgaccgctctcgctatcgacttcacttgatagccccgatacaccgaggacctcaggtcctctgagtttatgagagcccttgacctggccagagcctgttttcgaagcagcattgacgtctttctgaatagcatcgagtaaaccagatcggaaagatgcggagcttgatgagcgagacattcgagcccagggtaagatagaaccagagtcttcgtccgagccgtattcatcctcgtcccgttcgtcgatatcgtcgtcatcgtcgtcatcgtcgtctctcccgtagaaaggtacatcggcttcgatgcgcggtagtgagaatgagggcttggaggatgccgaagaagcagaagcagaagaaaacgaagcagaatggtccggtctgtgtgctttgtcttgaaaagggaggtgtgtatgattagatttcgatggaacatgttggtgggaagatggcaccaccggatgacgatccgagtctgatcgaaccgacgaagatgatgtcgaacagagcgaggtccatggagaagaggcagaggatgatgctgacgagagggaagagacggaaggcgaagaactggccaggtgctgctcaggatgatggtgaggagagggcgatgtctgaggctgaggaactggataggtcggagatggtggttgacctagtttgtacgacccaatcgagttaatatggagaaaggagaaagcgaataaaaggaaagagcgcatcagaaacaagaacgaacctgctgctcgtcgccttgcttcctcagccgcttgatgttgtgcgacaacgaatgttcttcttcccacacctgcgcgcccggctcctcctccaacttcggtagtccttaaacctaaccgcctcatcacctcatcggctgattcccctccccctgagggagagggcaacgaaggtcggcattgccaggaactattagtgggcgagggaagcgaagaaggatttgagataggggaatcagattgattgggagtgaaagagagaggcggaggagcaggcgaacgtatcgatcgttgttgctgttgctgctgttgttgatgttgttgctgaggttgccgctgctgcagttgctgttgttgattttgacgctgatttggatgctgaggttgaggtggccgataaggagattgtctcgatggagattcagcggctacgagctcgctcttcaccggactggttgaataggatgcagcaagcaaaggtctctgtatcggtacgtttgttctaggcaggcttgactctgcctttgacgctggctgtcgtctcgtcgtgtttggtacagtcgggttcttgatacctgaaggagaggcaagggcgagggaacatacatgatctcctagttcatggaacggtacgggtgtctgacagttggagcactacagatgaaaccagaatcaaatacaagaaaaaattggatcagtttctacgggtctcttcgtgtacatatgttttgaaaaaagggcggtacgttgacgctgggaaggacctgggacgctcgctctcctcccggatggcccgagcggggaataaccaacggcattcggaccgggcgtgtaattaaatcttaaatggaagaggtagatgtaagaaggaaaacgtccttgctaaagagagtgggtgctcaaatgtctgttggaaagaaaaaaagagaagaaacaaagagagtgattgaataaaggtgtggcctgatggacgagaaggtgaacgaccggagggagaggtcgcagaatgaagcgtgcaggtatattccattcatttcgtcatctctcaggggctcaaacatccagagtcttgagcagccagcatgtttcatcatctaaagatcaaggcttcttgtacgttcatgtgcgcttgtgtcaagagaggtttggtgtagttggttctagttcaaagaagaggaaagcgtacggaaacagtggcttcgtcgcgtgcttccaataaacaacagttctctcgtgtgtagaggaggaaagggaaagctattcatttacataagggaacccagaatactcttcttcggttttcccacttttcgtccacttgccatcctcgccttgaccgcttgcttgactgccttggactgccctcgttttccgccttcttcctcactcgaactgctgtcctcatcttcctcgtcgtcgtcatcgtcatcgctcgattcgctctctgggtctagcgctacgccactctgtttaccgatgggcgtgctccttgcgctacctgagatccaacctccaattcgccccaacacacccgactctcttcccgctgctttcgcccgggcggtttctgaaccagccactgcgaattcagccttggaccgctgggacaggtccgacaatcctggagctcttcgttgggatgaactcggaagagcgactggctgagaaggcggagggagaggaatcgaagggtacagagaaggagtggccgaggtggtcgctgagatgctaggtcgaggctgagaggcacggttgcgtgaataaggaagcgaagtctgtggactatttgacggagtcggctaccatgtcggatgtcacatattaacgttagtcgtccttctgccagctgccaaaacagtcaaagacccgaaaggaaaaaaactaaccttggagacagaggcagacttatcctcggtgggtctggccgacttggcaggcgtctcttgtaccttgagggtctcatccactgtgtcttggacctttccgtcgacaacggtgaccggttcttcttccgcttgttttaagtccgagttacctaaactctcccttcctaccgaccgctggttctcaatctgcttagcacccgcccggagaatcgctaaatccgcatgagcttcctctttcgccctctcttcctcctcctttttcttcttcttctccagatagtttagcagcatctttgataacggctttcccttcttccgcgcgttctcgatcgcgatctcgtgctttgctgcaacttcttcggctttcaccctggcggctgctgctttctcagccaccaactcggctcgccggttcctgatctgctcagccttcgtaagcgtccgaggggtagcgctcggcgtgttgacagccgacgacgaaggaggaagggaaggagcgaatctggattgaatggacgaaggtggctcagattccggataatcgccttcgctgacttggttttcaacctcgacttcttctctcctggcgattagactggatgaagatgaggtctttcgagacacgtcgccaccaatcggacgaccccgagtcgatgcacgcaaaataggtggctctctgtcgacatcgtcgtcctcgtccttatcctcctcttccttctcctcctcctccttctctggctcttggttgcctgacccgattgcttgagagtcattactgttaccgtcgactctgtccaactcgcctgcttcgtccaatgctcggttgagcgtgctgaacgtcaacggcggttgggacgcgtcgagttcttccagatctcctaatgattttcgaggttttggtgtagtttcaacagccggagcgtcggtgacagtggaaacctgaacagggggttcctcccacgtaggttcaggagatgactcgttcgaccgtacagaaggagatgagattaaaacccgaggtgggtcgttcaccctcccgctgacgactagaaccgagccggattcactatcgagcccttggtcggaccaactctcgatcgtctcactttgaacacgtttttgagctccattttgtagatcagccggttcttccacaataggatccgcctcctcttcctcctcttctccttctccattaccctgcctctcttcggtttcagcatcaggatctttgacaccagggggcaagataccttcatcatcctcgctttctgagaacgctccgctctttcttcctcgaccctggctcaacattgacgctcgtttctttttcggaggactatctgtagcatccgagtagtggaccacatcatcatcatcatcctcgctatcatcatcctcctcgtcatcatcgctatcgatggcggggcggaggggagcaccagagaaccgaggaggaggaagggcgtgcttgagtccatttggaagactagagcttggtgccaacacgttcttctcttgctcttccttcttcccactcttctctttctccttttcctcactctcctcttcgtcatcggaagaatcatcggaagaggactcggaagtggatccttctccatcatcctcgatgtaaacatccgaatgaggttgtttctcgggagacgagggagctacaggtccagctggtgacgagagaggggtcatagatcgggcttttaggggagtccgttgttgattaggagtaggagggttgataggagacacggggacgggagccggtagattggaaggttgtttaggtgtgggaggctaatcatgggtgcaacataacgacagagttagccaaaaagcgcatggattgtactcgtgattacgaacgatcaagaacttgcaagtttcccttttgtgttgtgagcaggcgtcaaagtagcaggagcctcgttttcacttgactgtttacatttcggcaccccacgtttcagagtgggagagcgagagagaagtaattagatccagaaccagaacgagaacaactattgataagcgtcggaactgtgtcccatttttgggtaagaagatactacatgggttaagctaagtgacgaacctcatcaacttccttctccttcccaaactcataactagaaggcaatcccaattctaccgagtttgcagcaggcgagagtgcattctgagactgtgttgatgcttgtttctttggagacgaaatcggttttccaaccgtactcttcctcttctccttcttctctttttcaggctctttttccttctcctgatctttctcagaagttgtaacagcgtcgcttgtcacagaagccagagaagaagacgggaagtccaactccaaagccagaggagtggctcccatcgactttctcctagcaacagctgctgccaacgtaggaggcagccatttctcagcttcccaagacttgtcattttcaccctccgtcactttctccttatctgagatagagataggctgagtggaaggtgcaggaagagattttcgagacttgggaaggtaaatagggggtgcaagggaaggaagttgaggagctttctgcgcaggtgtaggcgtaggcatgtgctttgatacagaagccgaggatggagcaggggctgaggccggagttgatgaagggggtgcaggagcgatgatggctgaagtagcagaagcgacaggagagacagcaggaacaggagtagaaacaggagggacggtcgaagtctttcgtcgtttcgccggtttctcagatgtcgtagctgccttactgggagtcttagatcctacttctttccctgtgcccttctgagaggcagcaggggtaggagtttttgtagtggtaggagcctcggcgggagtatgtgtcttagcagtgtccacagcggccggagcaggggtgggggtcagagtagggg

SEQ ID NO: 2995 - DNA, 9101 bp, Xanthophyllomyces dendrorhous
ggtcagagtaggggccggggcagaggcagacacagacggtgtgggttcaggctcaaactcgagcataggacctttggctgccgattgagaagatgtgttccgctttctcgaagtttttagaacaggcggggcactcgctggagctgccaaaccaggaccggcgctgttactagagagaacggacgtagacggggcaaccggcgttcgaggagctggggtcggagcaaactgtgttttcttcttagcggatggttgcttaggcgaggccacctctgttgttccagaggcattagtgttattggacgaagaggacagattgaggacaggttttgggagagcggaaagcaaggtagtcgactgggaagctggtcgaatagttttgttggcagacgacgaagtaggagggggaggaagcgcgcgaggagtgagcgtctgaaaggaaccagcgagtgttgatacagacgcgggcgcattgcccggttggaaggaaatggtaataggagcatggggatcggacgcccggtatctgaatacatcaaaatcctcctctgtgagttagaacaagcagatgagagtcagccgaaagtagacgcgtacacctgagaagaaaagttttccaagcgctccatgccggatcattcatgtactctctatgagaacaagagcaaggagacaaagaaagattgataggaacagagggaaaaaaagacacgaaccgtcgtccaggtcgatagtcttgactccgtccctgccacccctacccggctcatatctcaactgagcgagctcgatgtccaaaccctccgggtacttcatctttttcctgacgattgtcttcatttgttccagcgtgaggctctctatgaatatccgaatgcggttataacggaggattatacgagagaaagacataagaaaatagaaagaggatgagcgagatattcatcccgacgcgtgtccttatcgcattcgaacaaatcatgaggtgagtgcaacgacgggaacgagcgcaccttggaatattctctcgaatatctttccttcaggtccaacatatgtgatgatcgatggatctctcatcttcttagcacgcttggcgggtggaggagcattgagatcggtggccgtagcggcggcaacgacggcagcgttgggattggcagtggtgacattaggaggagcacttgaaggaggagcggtatgaacggaaagctcgtcctggttagcttgcgccttacgcttccgggatcctccaccggcagccttacgggaggacattctggagagagaaaaggtgtagagacgtgaaaggatgagtgaaccaggtgagggatggatagaagaggaaaagaagaaaaaaaagaagaaaaaagaggcgggtagaacaaaataacgataaaaataatgaggccaagcgcagtctcgtccgattacgaaatctttggacagtttgtagtgtcctattagacctgttttgtagtctagaactcaatgcttccacctcggcttgaagcaaccttactccttgcaacatactatacccaatgcgatagccgaaggaggaaagtcatgaatatgtgcacacagccatgtcaaaagatggatatagtggaggaatcgatcttttcgatctaacaaatttccatttcgccatgatagtccatcaggccttgtatatgtatattcagaatcgcctgttatgtgtagctatcgataaaggaattgttgtcggtttgggtgattagagaaaagtcgaaatatgatctgttggctgcaactgtatcacatatgttcgtgatagatcagtagatccaacaaattctagatatgacatttcactgagtcgtctgagcccactgactgactgtataaaggtcaccaagaacacaaatataagtttgggcaacgtttcagacacagctgttcatctaatcttcttcaacaggtaagacgatagcagctcatatcctgaaaactcctcctcatcttttgattgttccgcataccatatccactagaaggcactggcgctgagcaagacatacaaatcggcgcgaagagctggtaagcttggtcgatggtggccaaagacagataggcaccgaggaacatgtgtacagctcattacggaccgtggtaacataggatttcatgtccttatagactacggacaatcaggcgtcgagtattactagatgtatggctaagatatgagatgcataacaccaataaatgaaaggcagatggaagccgattgactcgcaaacagtctgggcagcatctatcgacagtacacctgccatcctgcgcttactttccatcagaagatatagccgaggtatttccccagcctatctgccccatatttaatcttcttacacccagatctctgttagtaaacgaataaccagaagctactggtgtagactagaatgatggcttattgagtgatctgaattaaaagaactaggaagcttgcttcaacccttagcaagcaaggagaagtatatatgagtattatgtgagtattatgtgagtatcatgtgagtattatgtgagtattatcgaatgtttatcgcaatgaagatctgatctggctcgcaggtttgttagagaagatgaacccgtctcgttgccgtagcaggtcaatcagatgtattagatagtttgagaagatacatgttagtcaaggcaagattaatgaaagcgttcagtctatcactctcttcctcttagacttctcctctttttctttctcttctaagtctacttccttttctccgtttctctgcctctccttttcttctcctctcttactctctctctctctcttttctgtatgaatgaaagactgtaagatgcgcgcgctgtctctgatctcaaaatgtgggtctaaggatcacgatcgttacagtgtaaccagcccggccctagtcttcagccaattttggttacaccgtcaaattggcctggaactcttgggaaaaaacttcacaggcagaagatacattcaaacacatacacacacacgcttcatctcggtaaggaaacaccctctatagagtagaagatcgtgagcatagacaatggagatgagaagcatcaaggtgtcccaatgatgaccatcagcactgggcactgaagtcatctgatagataaagctcaacccgtcttagcaggacgagggcggacgtagaaaccccgtgactgagggacaccttccgctgtagacctcttcttcgtctttgcttgctctttgtgctagttgatgttgatccttgcaagtacttggaggctgacgattgattcttttcgtgttttcttagatcttggagaattttcactagagttgttttcacgtctcgcagaattttaatttctcccaacggattgtatgtgcatatacttccctcagatttcagagacaacatttgaggccatcatcacaggacgtcaacaggaagagatgagaagggtttccaatgatgaccatcagcactgggcactgaagtcatctgatagataaagctcaacccgtcttagcaggacgagggcggacgtagaaaacccgtgactgaggaacccttctcatctccgtactgctactctgatgatggcagtcttgaggattcatcgtgaatcatgtttaacggatcaaccaactgacaatatagttctgttacttcagataaacaaaatgtccggtagtatacacgccgaggcatcgacctcaacactgccttcaacgctcaacacgatcaagacgtccttaacacaagtgaacgctgctctctcgcctattcttaaatcgtcagtttctttctttcctttcctcacttgcgatcgacccttctgacctcaactttggaccgcgtatctagccttcgctctgatccgtcctcgttcaatctctcaaacggactttctctgttatcgcttcgaccgaatcttctcctttcatacatccacctctacactctcctcctcggctcttctctttcaccttctactgctccgttaccgtcatcatcatcgacaccatcgtctacttcatccgtcctcgactcgttcaacgcaccgagaagccggacgggccagccgagcgagcgagacctgattgagcaactggtgctaatccgggaagtcatggagcgagtcagaggaatggagggtaaagtcggaaaacaagtcgatcgtctcgtcaagggcgcagaggagaaggaggtcgatctagcaaacggtacgcttttgatctcgatcttctcttaacttttcatcaatacctataactaaaccagtgcttctcttctttttctttctctctcccctctgatgcagaccctatgtcattccgacctaacccatcggccttggtgaaaccgaatcagtcatcgacgactgaatcggcttcatccccatccggcgaaaccaacggaacctccacttcgggcgtttatcgaccgcctcgacttgctgccgtgccataccttcctcctacctcaaaatcttccaaaacgaaccgagccgaatctgggtctgccggcaagacgtcaagcctgttgaccgactatgcgttgtcgaccgtgtcccatctacctcatcaagaaactgtctccggtctaccctcactttcttcgtctgctcgagctagtcgtgcgaaccgatcgctcgctcaagaacagaccgagtttgaggaaggtgccttcactaggttgacgttgaagaaatcagaactgaagagaagagaaagagaggaaagagacgatgcgcttggacttggtggaggtagaaacggagggaccggttgggaggacgtattgggtggtctcggtggtgggagatatgattccggaggggatagagaaaagggaggggcctgggagaggagaaagagaggaccggatgaaggggagagcagagccgggccggcaaagaacaagaagggtagattcgagactagggtcggaagtaagaagggaaagaattgatcctcctctctggtgtcttctttccttctcgatatccctatcatagtctttgagaacacgactacaatcatgaatatatatgtgcataaaattatttgaaagcctttccctctttcctaaaaaatgaaatgaaataacgaaaaggcttcaaccaactctgacactcctcctgaaccacctccgtcggcgaaacgacccaggttcgaaatctctctctacaaccatggtctctccgtgcatcgcgtgtggtgcgagcgggatttggttaggtgagatatattgccatccatctttcataacatatgaatttacgtatgtgtttttgaagagactttgtgtcagcgtgtactacttgtgatttagagataaaggaaatcagcaaggtagagaggtagaaaagggacgaaccggaatcaacctcgccgtctgcccagatacctaccctgtcaatgaaccaggtttcaccagggatccatatccagcctgatccttgtttgatgctcagtgacgtcaaattcaagtgtctatttgatattcggtgttcagtaattgaggtagaagaggagaaagcaagaggaatactcagagcagaagaggatagtcaagatgagaaatggaacagacaactcactcgcctgatccaacttgaccacctatagatctactcccttccttctcggaccaaccatcttccgtccactctctcccttcccctcctgctccaccgcttgctccaggcgtttcgtcagtcccagctgtaccaccacccgagacatgagaagtagactcttttccgcttggtcgaatccatcgttggttttcccacacgctaagctcgcatactggtttgtcgcgaagtgagagtgggatcttgtcgttcagaagactcagatggagagcatggagttgagaggctaagataggtgggatgggaagcggtagaaccgataactccccaggagatctagggtgaggaaaatcaagcgcaagaagaaaaatccgtcagaagaccaataccggtagcggagactaaaaagaaaggccttacatcaaaccaaagagcaatgggccccaacctaagggcaacagaatcgcccaggccggtacaaatttccctccgaacgcaactccaacgagagcaaggacgttgaaggcgatcagagtatagtgtaatgggtgtattggtgaaaagacctgttgagccacattaatggcaaaatcgtacatatcggaactgccagcggaagatagacgagaggtataagtaatcggtaacgtggacgatagaaactaacaaaaaagaggaacgggaagaacggacaaggagcccatgagattctgaattccttggagattttggtaataggtcgtagtgagaccagtctcgattggcgctttcctcgcctgaggaatctcgtgtgaaaactggagaagagtggtaatcatcgaaggaaacgaaaggaaacaactggtcagcagctcgtttgtatgatgacaacgccggaaatgtcaacagcgacctacgtctgaaaagtcgccagatagccgagatcctgcttttgaatcccgactgaggccaaccgagctagcttgtattgatccgcttcttccgtgtaacatttggaaggagttccttcgagccgatggggacgaagtggtcctggtggaggtttcaatctctgtagatccagagcgggagggagaggactgtaactctgggtttaaagattggtcatcgatatgaggggcaaggagaaacgagattgtgcccagtagaggtagcatcagaatcagatgagggtgaaaggcttcacaagaattccagtagagcaggatcagtaagagatttatgcgcttgcaacaggacggcgatcatgattgacgtacagatcaacccccagccgatcatccaacctacactccattcttttcgtctccagaagacaacttcctctacaaaatcctgggtgtcaaaaagccatcccactttaaggacaaactttcgaaagttgccggttgtactcgttagattgagatcctcgcgtttgctgctagggccgggccagatgttcgggtctgagtgatggtgatgatgatcagttttcttcttatttgactttgggatcccaggtacaactgcggatagcagtaaatcactgatctgagtagtgtatgactgaggaagggaggatccagcaggtcgagcggcggcagcaggaaacgatgattccggtaacacagtcaacgtaggttctattgtagtcgctgtatgaaaccgatcagaaggatgagccgtctgtttcaaggaggatacaaagaactggacatctactggcttggctgcaagcggtatcgggtgggatggatgtagagccatcggactcatctgtagagtacgatatgagatgtatgtgtatatgtgtatatgtgtgtgtatgtcgtctgctcagaactcataaggttactgaaggtgattgaaataaccggttgacgtattctgagtcacgtgattttcacgtgactcgaggcggtgcattttacctggccgccagcgatcatcttgctatcatcatcatcatcatcacctatataccttcgacttggttgatctcccactagtcggcccagacatgcttccacaccctctttctcctcttacagtccttcttttatcaaccgctctcacatctcgcctggcctcaggatctctaacaccgattgacccgttcgctcatccgaaatatgcgattcagttcttgaacgatctgccattggaaaaacaggtggcagagagctggattgagagaggaagagctcctggtggttggagagggtttttgaacgagaatgatcctgttggaagagattcgaccgtgccagctttgattcaggacaagaagcaagaagatgagggaggagaactagaaatacgtcgttcgaaccaagagggtggcaccaaggatgaagagaagatcatggaggatgaggatgggagtcatacacttcagtcagttatgctttggccgggtccaagatcatacgtctgcttgatacctcctccttcaccggaacctaaagaaagagaaaagccgttagtgacgcctggaatgaatccagagttacctgctcagcttttaagtcatttagaaggaacttgcctctatgtacgctttgtttcaactctttctaactttcctaaagctctatctgtgtgacaagaatgcttgtgtcgaattgctttctcaccttttggcttatctgatgggattaatttggtatgatagcaccgacaaggctggttcacttattcttactgtcacggttctgaagttcgtcagtttagggaggccgctcgggcgtggcctccgctttctgaaggatgggtacctaaggaagatcctcaggtatgttgacagagatatgaaaactgttcggattccgatactaatttaaacttcattcgactgcactcgtgcgatactagtatgatgcctacgttcttggtgtatgtctctcgtgtcattttgcatctcttctctaatttgccgtatcattctaaaaacccttgactcttctctcgcttcactttaatcctacacttgtttcgtccaatctgaacctgggtacaacagacagctaaacatgacctgcaaatagagagcaacaaccctggattttcactcggtatgggcgttggcgctcgatacctgaccgctcgatggggtggcgggacagtatgtgaccgaaccaaggtcgatagagagatcgagatccaggtaaaatcatatttccctcaagtttccaagattttctgtcgtgaatcttatctataggcgaaatcattgatcagaaaagctcggttgaccaaatatagtttcactgctcgatgactggtactgatggaatttcactgatcaaggaagtctcgacgtgagtacaagaagcacgggctttctctccatgccgtgtcaggcgcacgagttcacttactctctgttcatccacttttcaacaaacaaaacttcagttgctcttatattctggtgattgatacgcccagactatgtaacgtcccgggtttctcgtcggcacatttatcagaacccccgacaa

SEQ ID NO: 2996 - DNA, 8724 bp, Xanthophyllomyces dendrorhous
gacaaacatcacgtgtagagagattgtgccggatggatctatcccaaacgcagagattgagggaatgactgtaagacctttccctggttctctagttctcagttttcttagttattcaattcctaaatatcctgtgggaccctatgtatttgctcgatagaaaccgtcgtcggacaagacaccgttaccttcatgggcgatgatcgggccaccacctgttccgaaagggaatagaccacccaccggacagcaaaagaccagagactcttcccaacctcagcttcggcccaaagcgcgttcaaaatcaacatcgccaccaaaatcaaaaccggaatcgaaaccgaacccggtgtcaggcgcaggagctatgaaacccgacccggaagctaaccaagacaccccgccttattctagcgcggaaaccaactctgaggagggtccggaatcggaaaccaaatctcctccacaggtatacatacttatggaagcggaagtagcggatggtgaagagaatggcggagcagatgacgagaacgggcatggaggcgagattgctcggttgttgaaggctctcaagaatggacaagcggacggccggtacgtcggtctgttgtccgaccctgtgcgcactgacggtgatagcgttagcgaagaagaacagcaagaaggagaaggagaagtaaatcaggaagaagaagaggaagtatggcagattgtagtactgaaagacgaaaatggggatgatctgatattggaggtacctgtcgaaggaaacgatgatgacagcagcggttgggcgagagacgagttatagatctccttctggagagcggtagttgttcgagacatattgggatatagtgttttcctcattgatgttctctgatatatgtcgctcaaaaacgaaccaggctgatagtttgggaaaaaagaaacaagaaatgacattcattgatagcctgcgtcacccaaaagaactctactagtacatctctcaactccttagcccccgaacacctatcgagcctgattcatccaccaaacttcatcatcattgtcgttcctagagcgtataggacttcgttgctaggcaacaagccatggttgtccctagcgaacgcaatactcaggtcttcccaagatcttgggttttcagggttaaatgtcgaccacgataatgaagccaacgcgcttggttggttcctaacattgggcgtcatggtcgggttaaaagaggtcaaagggtatattggtgtttgtatcgaggctggagttggagtggggactgatgttgaggtcggtaccggggcagccggggcaggatggctcggaggttgatcgaatcgtgacttgcgttttttcgaagccggaggcactgtcgacggatcgtccgaaggaggaggtttagttgaattggaagttgagtcaccgacggactgagaatttaggtttaaattagatggtagtgaagaaaccgtaggcacgactggtccgttcgatatgggataaacattggccgatggtggtggtggtggcggtggtagttgggatgaaacgttcgagttactcggaatcgggccggaaggatacatgttcggacgatatccaaaacctcctcttccaccttgcatacctcccctacttccctcgttgtatccaggaccattcattcctcctctccctctatatcctcctctcccaccaccactaccaccccgtccacgtgaattcccacccgagcctccaggacgccatctgttctcgtttatgccattgttgacagtagaaccgatataactttgatgatcactcggtccttgatccgcttcaaactgagggccgttgaatgtgttatcgaattgactattttgaactggaaacatctgattttgcacttgattatagttgtaattatagttggcttgatgtagcatagggttaattgggcccggaacaggtggagcgtaagtcggaaacgagttcgatgagtgaattgggacgttcaaatctgggttgaaggttgggtaaactgaagatgacatggtcggtgggaaaggaggcatagtaggaggacctgataggacactcgaagttggatccgccgacgcgttgtgttgtatctgagtcgagactgagttttgaatctcatgagaagggataacggttgctgaggattcgattcgcacgacaggagaaggatttgaaggggtttcaagtgttgcggaaaccagcgcatctgatgaaggtgcagaagcgctacccaagagtatttccaaatgaatggatgacaatgagtcagcccgaaaacatgttctctaggtataaacgatttcatctttgcaagatcctgagaaaactcacggggaaggactagaactcgtgaatttttgaaggagcgtcaacaaagatgccggcacgccaactggaggaggtgtcggcgccgatgttgatattgctgctatatcggagggtggttcgataaccccaccagaagaacgaataggcaaagggatggttgacgtttttaagggtgttgatgttggtaagaagtacccttgtgaaggaagagtcagagaaggtggagaagatgtaggagttgtagtcgatcttgaaacatctttcctgcctatgattcacacgcagcagccaagcaacaagaagacgagatggaaactcgaagggcatcagtgatctaaatcgacccgaaatattatgctgacaatgagcattagggttcctcacttgtactaggagtagaactccttgaaaccttcaagggatcctccgaactattctgtctaacgacctcttcgacgatcaccgtcggagccggggtggcagcttcgaccaggacttgtaatcgatggatgacctcctttgaaaatgttgatcctttttgccagatatcgagaattttttttgttttttcctacagagaacgagttgtcgtttgtccaacggaagcgacagatgtatttcatgcgcatacatatgattcgtgtgcgtgtgtgtatgtgtgtgtgtgtgtgtgtgtggatatggtgaaacacgatggacagaggaacagaaagacagaaaaaaacaaagggatgaaaatggaagagaaagaaaatccatgagtataatgtactttcccttcgaccgacaatcacgatccaaatcgaacggcgcttcatctctcgttctaatctgcctagatgagtacaagtatatgcaccacttatcgctctcctcttaagatgagtacaaattgagggatcaaaagccagcgaaggaagacattgtgaacctccaccaatccttcgttctttttcttctctctctcctttaccttttcctcttgctctcctcacgcaagtgaacaccattgaacagagatatcacgcgcgctctttccggtaacaaaacctcacgggacgaacaaaagacggatgaagggaaataaacgacttaccctgccatctggccaatccttcccacccgtatccaacatatctctcaccaacccatccaacacaccctccgccttcaataagaacccagcacaagtacctctctctccatcaatattcgcactgatctttttgtttacttttgacctgcatgctcgagcgatagagtcgaaacagtacaagctatgaatcttggaggctgatcttggttggagtgaacggtgttggttgtatagattggtgattatctgagaatcgtactggaataaagtttttccacaagagaacaacttgtcagctctcccttgcctatagattgtcaagcaagttcttcgaatacacagattggagataaacctacctggatgtcttttatagccatggcagtcaatctttcgatcttaccgccggataactttcgagcttcgacggcctctttgaggaggtcattaaacggctgatcgaaagaagattcagttcgtttgatgtgttcacaggggtagagtgaacggtaagggcatatcaaccaaacggtcggaacgcaggtttttccatacacatcgtgagagaggagcaaaaccactactcgtcagtcaggatcaccaaacaaatcaaccaagatgggagaagaagagaaaaggcacgacagcagatttcaaagtaggaaggagaaagctctagaacaaacctttaaagcttcaatcgataagtcatcctgcatgactctccaattctaacaaatctgacggctgtccgtttgattcagagcctggatgtgcgtattctggtcactgtggacttgtgaggagaggtgagtaaagaggaaagagagagagagaggtgtagtcagaacaagtgatttctcagaacgatggtgtaaagcaattttggggttccataaagaccccatgtttgcccatatggttccccatcttgattgaagtgcccggctgttgtaatcgtgcccattaggccaatttctctctttcgctacaaaacacaggcgttgaatatataatacgtggtcctaaacaaacgaatgattgtcaaaactggactgaacaggacggaaagagcaaagaggatagcaaagtgtaatgtaaaaagaacaaaaaatgacaaaagggaggaatcgataggtggtagtacatattagaagagtctttcttgagacaagtgaaggagaaagaagacacagacatgcctatcagcgacttgagatggcagaagcaaaggaagaaaaggacgaaggagtgtataggggatgatagagaacacaaagaaattgtccctttagatgagatgtagcgcattgcccgtgaatgatataaagaaaggaagaggaaggactattcgaaaagaaagatgaatgaaaagaaaagggtaggccagcatcagagtagattttttaaaaccagttcgataataacgatctcttagtggctgaagccgcagcggtagaagttgtagtggtaacctatatcgacaagaacggaggaagggtaagcgggaaactaaggcaggagaatttgtggaaggggcaagaagagcgaaggacagcggaaggagaaggaggaaacaagacaaggagacatacagcttggtcagagagttgaatagtgggcagcatgtttggcggtcgagcttggaggtagagactagtaaaatgaagtgtttgcggatcgggtttgttagttgttgtcgtcgtcgtcgtcgtcgtcgtcatcatcaatgtacaaacgatatgatagtggtatcatagacgcacccaggcatggcggaaccatcgaatttggccagctcgagcatatagttgttgggcacggtatcaacgatgatatcccaatgcgagtagtaggtctgtagacatcgttcggtcccaatatcagcctattgatcatggcctgtataagattgaacgagtcgagagactcgagaacaaaccttttgctcatacacggtgatgacattcgtcacagccgcacatggatcttggacttgaatcctaccgtctccggcgaacggagttaacgtgagcgatccgttggtgttcaacgtgtacgttccatgttgccaaatgacgaccgtctggatgcaattcggtagcgatgctgaaagccacccgacgagaaatcaagagagcataagcaaaagaagcgtcaacaagggatagaatagtgcagatataaatgtaccgttggagttaaaccggtactgggcttcctcgaaatgtccttcgttatcactggtccattcccaacgaaaacaaagcccaacgatcagcctggaagcataaaaagaaggagagaaagcctcaatcgggtcaatgcacatacaaggagtatgcgattcctgatgtcgcaggatagttgaacgaataagctagagggtttgcgaatccctaaaacgacgagagagaagacaagagagaagaaaaaacaaccctatctcagtattccaaacagacggatgacggccaaggatctgggtttgagaccgagagaactgaagagagaaatgaatcactaacagaaccagtagtgactcctcctgagccggaactccatgtgccgtaaagagcggtcacgttattgcttgctctgaaagagggagaatcgccaaacatcgaccgcacgcgtacagaacaaggatatatatatccaccaggttgttcaaaatccaattgcaacaatcagtcaacagaaacctttccatgagcttctcagaaatatcttcctctttcatgttttccgtatacgtactccagattttgagcatgaacagaagatagagagaggaggaatgaaagcactgtgcctcctatagtgatgggtacactagcaagtctcactgtaaggtttgaacagaagcgaacagatacagactgtttcagtagctgattaagttgacaggaacctcaacaagatgaatgaacgcacttgatcaaacacgatgatggaaaagcagaggggcagagaaagagaataagggtagaggaagtgggatatggaggaagagagagtagagtatagtagaggatcaagaccgatgcaaagaccaatactcacggcattggctgtaaccaccgattatgtaatcataggctgtcaccactgacaactgatgccttgcggctataacgcttattaaaaaaactcatcaaatagtcatggatacagtatttaaggaaacgttggcatagagtagtgaatcgtgtgtacaagaaaaagagagagtaataaccgatcgatttagaagcagcaactaagaggtaatagtgagattgaacgagagagcaaagagttgttagcgattttgcgtgacgcctcgtacaacaaggaaaagttgaatagcacgaacgggatgatgcaaatgtctatcgggtgagtacatgaaatttcaaacgatcaatgctttgtctctcaggaatcctgtggatcgaaaaggaaacagaaagagggaaaaaagggatcaaaattgtagaaacttaccacagtggcaaggcaagattggcaggccacacagatgctattgatagaaaacccgttcagtaagtcatgttggtctcgtatatcttggtacatagaataataaagaaacagaaagaacaaaaacaaacgcacgccagggcaacctcctcggagtcgcatagccgctccgtcctgcttggacccctcttggacattgttcatggctatacacaagatattaggtgtgaacagccccacacagaagcatcagacaccgtcaaagagtggagaagagaaacatatggtaagaataaacggtcatctgtagtatttgagaggtaatggaaccacaagcgtacacatagtcgtctttccaggctgctgttgttgctgctgcacctgttgaaccacagggacgggagggtaagagatctctgcaggggaagaagacatggttgtatgagtgttgtaagtggtgaggaaggatgaggaaggagggggttataaaagagatatcgagcagcaagtattcgttcaagaagcaagctgtacgttgccgcagcgctcaattatggtgtacactgggtctatatctgtcggatagacaacgtcatcggcgcctccttcctaattagggttatttcgaaaacaaaggaggatattgtgtctaccagatgatgactcctgtgctcaaggttctgaccgctcacccttcagttataaattcattatgccaacagggaagcaaacaagtcatccgaaccagaccggttcatcgccggcgttccctaatcttgttgcttttgatctcgattatacacttgttcgtgtttgtctgctcctatgaaacacagagctagtcggagctgatgacaacttcaatgctcgattgggatgaatggataaatctttattctactttcttttaaagtgggagttagtaaatacctatattgatctttcagcgctggagcatactgacaggactggatctggttcgatctgtgtagtctttggatagacacccatgtaaccggaccgtttaaacgaacaggagaagaactcaacaaggtcatcccccggtatgtcttttggctttcttgaacgaatcgatcgacaatgtttttatgatctgaccgttcttgtacatgtgtgggccttgacttcggctaattcaaaggcgaggtgacccgatctcattctatcctgacgttccagagatcctccacaagatcagaaggaacgaggatagctatattgccgcttgctctcggacgtctgctcccgactagttgagtgaatcctgtttgtctgcacatatagagaaatcacgcctagccgatatggaactcaacatctatctctgttccctttctcggttctggtgtgcgacgtgattagcgcgcgagaggttttgggcttgttacttgtaccttccccgagatcgtcaccgaaggatgaacctaaacgggctatcgacttttttgacgggcaagtcgttttgtgttgtatatgagacagcttcttgtcttgactctctatatcttaccactactgtttgtcggccttggtgttgcttgtaggaaggagatttatcctgggtcaaaactgaaacatttcaagagattgcacgagaagaccggaatcccgtatgaagagatggtatgttctctcctcatcttttttgctttcggaatcttgctatattacgtactcacagacattctgctcccacctcttatccctgttattttttttatttttacaaagctcttctttgatgacgagagtcgaaacaagga

SEQ ID NO: 2997 - DNA, 10912 bp, Xanthophyllomyces dendrorhous
gtcctacacgatttacctcccaaaatcattcaggattactactgcgatctatccgacgttcaaaaacaactctacgacgacttttcccactccgctgccggtcagacggccggtgacgttgtcaagtccaacaccggtagagaatctggaaaacaaggtcaggcgcacgtattccagtcacttcagtaccttcggaaactttgcaatcacccgtgcttggtggcaaaagaatcggattatccgagtatctcagccaaggtgaccaaagcgggaggtacgcctggacccaactcgatccgagacttggcaaatgctcctaaactattggccctcaagtaagtccattctcttttagcatcagatatgtcagatcgacaagaaccacgactaatttatgtttcgttttgaacagacaaattcttcatgattgtggaatcggaacagccgaaccttctcctacggatgccgaagatctttcgctttcctccattcctcaacatcgggtcttgatattctgtcagctgaaattgatgttggacgtcatcgagactgatctcttccgaagacacatgccttcattgacgtacatgcggatggatggatcgacagatccttccaaacgacatggcgtcgttcagacgttcaactcagacccttctatcgacgttcttcttttaaccacccaggtcggtggtttgggtttaaacttgacgggagctgatacagtaatctttgtggaacatgactggaacccgatgaaggatcttcaggcgatggacagagcccatcgactgggtcagaaaaaggttgtgaacgtctatcggttgatcacgaagggcacgttggaagataagatcatggggttcgtaatactcttcaagatttcccttcttaattattcattatggctaacgattgaaccgtggcctctcatagtctccaacgattcaagctcaacatagccagctcagtggtgacccaacaaaactctggcttggaatcgatgaacactgaccaagtactcgatctcttcaagatctctaccggagaagaagatgctgcagatgctgcagcaaagaagaaggctcagcaggaacaatcaggtcctgtcagccaacaaaacttgttggaaggtttagaagatttacccgatgaggacgaatatcaaggcttgggaatggatacgttcctgggtagtctttgagcaatcgtgatcaagaattctggatgagccctctcttcttgacacctcaagtcaatatgaaagtctttctagatctttcctttccttttgagcttatctttttcctttcactatattcacgtcttcttcaatgttttgacgtcacgaacgagctaggttcgctctaaattattccatctttgcatgccaccaaagttctttctcttatcttctttacccatcgattcccagtttgtacttgtactagacatagcatgaatcctgtacgaacacaagaacagaggaagcctgctgtgaggtgacatctggatgataccgacaactcaaaactagaagccattgttcggaaataggatcacacctccacagcaacaagtttattaattctccgatcgttcatggtatacctcccgatttttgcgtggatgcatttattagggtatagacaatagagtattgtgagagaatgaaatgaaatattcctatatcaaagtagagcttgggaagaataatggggttcttttaattaaattaaaacagtagaaaaggcgaaagcggtggaagtagagcagcgcttattcttcgattgttgagtgtaatgaacatgggcaaattctatcaagcatccacacggtcagaccagcaattgctacatcaagaaggaaatcgattcgaaaccagagcacatggaacaaaggatagagcgagagaaagcgtagatatgagacattatggagagattaccgccgatggcctctcagtctgactaggttttttcagtccgtatttgaccacggtcatcctacgcggcaacaccgctgtgctcttctcgcagatcttggccaaggtcatatctctttgaaatcggcaggccagctcgttctgataaggcggttcaacaggatgccgatagttcaacgagaatttggcatccaacccatgggtcgggtgatagatgacttctttcagtccctcgtagtaagatttggcctaaaaccatccacaaattcgattgatacggacatatcaatgagtattacataccttttccatatgaaagagttagcagcattgtgtgcttactgcttgaatttgtgctattcttagaatatcgaccgaggcaatatcgagcttctgcttttcaatatgttgacagacctccgtcctcaaagagactagggacccaagatcgccaaggatggaccacaacctataatggaacttggggatgatctcggaatctccacccttcttgtcttcgagttgtgagtaagcctgctgaagtctttgtaggaagatggatagctatatgaaggacatcaagagtagaaggcatacgagaagaggtcaagttttgtgaacctcgttgagttcattcaatgaaccataacttacctcgcttctctttctataagattcaaagatatcgaaaaagaacggcgaaaatgctcgcatccgtcctcgaaggagcattcgttcagtattcgacaacggatcggaggttcttactctgtgcacgtcatgcggcgcctaaggcataggtattgtggaaaggatcgtatcaaggagatgttagaaaacaagaacagaaacgtaagagacctgacaaaactgtttgtttgcacctgttgtaattcagatttttgatcaacctggctgagtgctgaataacctcatgacggacgcaaaattaacctatgagagttagatacaatatctacattgacgaagcgatgctcgtacaaaagaaaatacaaaaacgcttacgatttggagtaaggtcattcatggagaccaagacagatggatcctgcaatactatgcgctggaacattttagacaaagggaatcgatatggtggctgaggaagacttttgaagtcgaatggacggagcgcgtgtatgccatgggtgggatggtacatgatttcccgaagcccttgctcgattttttgtcgctacagttcaccataaatgtcatcaaagatcgggtggcaaatgcaaggaaaagaagccagaaagacgagaaagaaccgagagacgaagagtgagcaccggaatttggtatatcgcacttttcaaggttttaaaataaaaataaaaatagaagctatcgcttacaacctcgttttcggcaatttgttgagatctcagttgttgttggtggttcatcttttgagccgtaaatacttcgtatcttagagaccgccagggttccaaattcgtaggcgatgcacaaattcgtttgagaaagtttgggacaatctcaggatttggtccttcttgcaagccttcctctcgctttgcacgaacgaacgcgaattgaagacctttcaattcttgacccagctgataatatgtgtttgacaaacacattgaaaagatgaagaggcgacaattaagtcagtttgaagatagacacttgacagggatatgaaagcttacacgtataatctccatagcatttctcaatattatgtagcagctcagcgagaaaactctcatctgttgagttccaatgacacaaacgaattgttattgagcgagaaagtagcatcaaaatgtatctagttcagtgatcatcaaagtacaggtatgtgtaggttccggtttcctacattctgatacttgagaaagacaaagaggatgtccatgataacatctcaaagtggaaaacatttactcaccgtcctgatcaactcatcgttacccattacaggtgcggcatccttataattgttcttccggaaacgttgcagcaacctgggtccagcatcgggcccatccgtgcgtttggaagatctagaaatctgtgaaccggctatactgttcgtataatgctttggtttctctaagtcttgaggcgttacctaaattccaaatagtaagtcataaaataagttaagataaacagatgcgtaaggacaagttggtaagagaagaatcaaacgaactatttcgagttgtaaagctctctacacgagtatgagaagtgggagcatcagttatggtttgctcaaaaagactctgaaagcgtctgattccaataaatcactgaccccgtgtatgactgacatctgcatggacatcaaatctcttcttgcttcaacggacggattcaagagcttgaacgtagctgctcgaggattgattcggccgataaattcgacagctggactcttttccccgccggaaaacaaatttcgaacttgatcatctgtcaggttaaaagggaagttgtgtatctaatcaaacgaaagtaaaccatatagagcacggctcgcggcagataaatcagttgattgtatcataagaaagtaaagagggtcaacaaggaaaagcaacatactcggaatatgtcccacgccgatttagtcgggcctttgatcgatcccttcgtttcaataggcatagcccgaacgtccactggaacctatgaaaccccgatgcagatgtgaagtcaggaaagataggagagtggaggatgatcaacatcttagcacacagtcatcaagaagaaagcaaatcaaaaaaacgtactcctccgataggttgctgatgcacgttcaacactgactcaaacgcctgctgacctgatacagtgacaatagcccaagtctcacgcactcgcttttcgatccatcttatggagcttagtttcaattgaggggcgagttccagaaggtatctgaggacaagcttgccagatgtcgtgggcgagagggaggtgatctacttgaaacagtataacattgagtcacagacacatacacacacattatgtatggtcgcacgcaccaggagactggttcttgagttgacctcatatagggcagattctgaaaagaagctcgatctccatgagaaagcaacgacttccaacacattctgttttgggtgttgaaatacaccacatattggtcagactagtgaattataaaaccgcatactcgtatgtacgtcaagggcgcagacgaaccgctttgatagtgggatggcttttggccaagatctccctgaatccctcagctgaaaggtctccaacatcaaacagaatcctgttgtccttgatgtgataagcaggtaccttgtaccctctgctagtcagagcctctataacggctgtttcattcagcgttacttcggccttgggatctatgtcaatcttttacagatcaggattgtaaacaaaatcaaagaataagatattgagcatgcaggaaacaggaaaatggataacataaatagtagcatttacttggagcgttttcatgtttgggattcgctgtaagtacagttcttgcctcagctcatccgattgattgtctgaggatatctttactgaggcctctgatgctacatctgtcatgtcgtccagagattcagctttcgggttgctagtgacgttcttgtcaatagtatatgacgagtcaggattctgactggaagctttttgaaaagcgtgctcgtccgcttctgacagtttgatcattgtagatgcagtatcacctggtttggctatgagaagctatttaagcgagcaaggcgggacggcaaagtaggatagcatatgttagttagtcagtcttaagccaaagatcaagcatatcaggatggagaagacacttactccccaaggcgcctgtgttccatccattgtatcgcatactaagtcttggtccgatattgatgtctggatgattcctgatctcttccctgtggctttccaagcctcaactacatggactcctctagaccagaaaaaatctcggaacgtgattgaatcaagctcaagtggtagtcgatggatctgatggttgccaccagaaaattttaatcagtacagatgaaattggtattgatgtgtttcatgttaggcaggtaataatcactagagaagacagaaaaggaagtatacgaagatggagagagggaaacacatacgtatgtaatgacctggtcattgtactctatctcatcgtcttcctctgcttcgttttcccactctgaactaccttctccttccgctcgctgtgtacacaaatctttgtctttcgctttctgaaattcattcttgatggttttgcttcctgcggcctcctgtaatcctagctctgcttggcccgccatcacctgcggccgatcctgaccacctttcgtatctacgccttgtgtattatgatcttcatgcccagtggttgaaacggaaccagaagtttgttcaaaccgatgtattctccggatatatctggatgatcggatcgaatgtgggccagcggcattcaccaaggagaacggcgacttagcaggcaagattgaaggtgatcggatgcctggattaaatcgatacaagagatcaacgatagtctcatcagctacgctacaagaacaagcttggaagacgtataatattctcactcttcacagttctaaatatcatagacattttggatccgtcgatgtagcaagccaggaaggagaccgttgtctactgtctggtgttgatgcttgttctattgatgagcaaacaaaattgagatgacacgtgcactttgatttgattcatagtatccattaaagctaaccttgaaaaagaaaaacattacgatattcgtattgtagtgtctaagtaagattcaaccactgtctccttatttatacaccttaaagagcaatcatgtttcgttgaagagaaagtttccatcgcatcgcacgatatcacaaacttgatcctggatatcaatcctttgattctttcactccggtctttgacctcgccatctttttctcagcctccaatctttccaaaatcttttttttgagcacccctacatccggcttcttcctctccgtcccgctactttcggataatgaaactttcgtcggagcctcttgctccgacagactaggctggtttgatttatgaggagaagaagcaagcggtagaagagtggtgactgaagagacgttcagctcaaccaggccagtatctgcatcggcgggtactgaaggctgctgggccttcttcagttgagcttgtaaagcatcagccttagcctcttggagtctctgtaatagaacgttccttgacactgtcgacttcgagttagattttccttctctccgagattctttcgacgtcctctcagtgtccctatcagctgcgcctcccgcttcagtcgacagagtattgacgagagctgaagaccctcggatagcgagctgagccatcctgctaccgcccaagccagctttcccacgcgatgccgctccagtgatcctgagttcacctcctccttcgcctccagatggtcccctaggcgaaggcttgttgtttttagaagcggcagaggtattcatccgtgataacagtgatggatttaggtgggctcctgtcgaatcgtcagatatcgagatggatggcacgttctctgcctctgctgtccaggcacgcatcccccctctgcttgagtcgtcatcaattttcaagattgaactagacgaggccactaggtctgttcgatgaggtggtggacgataatgagaaggctgtctggtggctcgagtggagaacacagacccctggtctggtagggctgctcgtttcggtccatgctctgccacatctgatagtggaggtgatcgagatgctcgccgggctctcaaacgagcggtctctccgggagcaatccatgagtcgtattcattccatcttttggggattttcttcccttttctgtccggaggaccatatcgacccttcaaattcataaaaaagaaagacaaatggtagcgctttgtcagtgtgtgagtgcgacacatcagattagatcaagagaagatcatgatcttaccactacagagcctcgtgaacgtctttccaaacttggactcctttccctgtagcttcttaaacttgaattcgatcgatcagagaaggaagatgaacgcgaaaccgaccttcctcttctttgactcatctgaacgtcttccccctccccctcgtccagcgctctctccaacctcatcatttcatcttcatcagaatccacatccacccgtgttcctgatggtccgatagcctctccgagtccgccatcaacctccagtccagggattgtttgcttaactggcgacttcgatcgtcgacgtttaggggagggtgatcggtctcgatgatttgaacgaagggaacgtgagattgagcgagaggtgccatcgtcgttgtcgtcttgctcaaggcgtctacgggaaggtacaggatcatattgagctgctcgatcatatagatgcagttctcggaagggagatctgatgaatgaatacacctctgtgtattgaagccaatgaataagaccggagataatcgagttaagtatcgatggaaaatatatggcgaaataaaacaaggagggagataaagacagaccatgcgcgaaatgctccgcgtttctcctctgttcaccttccccgacatccaaaaactctgccaaaagccgaacagccgcgtcggatcgaaggtcaatcgatttcattaacgagatcgtatagctaacctatatcgattcaaacaaaagtgccgagcaattttaacaaatgtatgatcagattaggaagaagacatagactgacataccataaactcgacatccacgccagtccatactctaaattctcttcggaggaaaactgtcgcacggccgatcatgtccgtattgagcgcgaattgctgaggggtaggaattggcttgtaccgagtagtcacgttcgaaccaacatgcttcgtgtataggccccatcgatagatctctcttcttctctccactctgcgctcagtatcatctgcttcgttttctgggttgattgaagctcggtcgcgccgacgaggctgtcttctagttatcgaagctggaggaaggtatggattttggggatgaaccgaagaaggctttgaaacgagtggagaaagaaagaactggagatatttaaggaaagatgtagagacgtgattgtcagttgaccaaaagctttcagcttcgacagaggtacaagagaattgactgactcgaacataaggcggaggggtctccagatcgtgcagcaggtagtctcccatcggcttggagcatagaggacactgtatttaaagggttgatattagacgaagattgtttcatgcacggatagcatcaatcgaagatgtagctacttacttttctagactgctccgaccacgtacagatgcagccaaaacctgatgaagaacaagtttaacgtcagagagtgcgctcgatatgaaattcaatatacagagaccttacagaaagcatcatgtccacagtttacctagaagattggaaatcgaagaaagagtgaatacgatcgttagcacgtacgtttgaccattcgtcgacatcgatcaaatggaaacccataccaatacagtcctatcccgaacagtctgtaggcagatgatacaattctctccctctagttcctcgtcttcttctcgccaccttctccccgaatgtttttctccttccatgttggagtcggttggattggcgtcaggtacaggatcgggaatagtaggagccgacatcccggcctcaacttcgatttcgggttcaacctctatctcagtttcaccaggcgtatgataggattcatgatcggagggttcatctagagtgttctgagcggaagaaagagcaggaagtgggtgagatagagattgggaaccggacaaaatgtcagctcgccttggtttcaagatggattcggaggaaggattagtagtggcggtggtatccgcgatctggtccctgagtgacacaagatcaggtagaagatgttgatttcagcgcgtgatacacagaggggcatgtgggagatcactcacaatgtgtccatatggaaagatcagatcagatattgatgatgtacagatcaagtgtggtcagtttttgagttaatcgccgttaggaggatcaaaaacggaggcgtccgtttgggtggatttatcttttcttttcttcagcattaatcattgcacttacaaccatcttgatcttaccatggacgaggacgacgatcttagtgagccttttcacataagtttactactcgatttaacaggtattgtaatgttcctctagattagctgtctaatcatattgtttgtgtattaccttctttcttcatcaaatccggtccttgctagacgctatccgagctcgacgactagctcaactccaagctcaaggaggaggaggaggaggaggagggagaggaggaatgggaggccctccctctggtggagcacctggacaaggtgggaagcagctgtctcaggaggaacaggaagctcagagacgagctgaggaagaacagttgaggacgataatggctaccgtcttggagcctgcagccagagaacgatgttcgtctccttttccttcagtccaataattcctcttgcattcttgagcctaattcgaaggactctctctcctcttgcttctttgtttcttcttggggctgcggcgtgatcttgatcgataaaaagtatcgaggatcaacttgacccgacctcaactctcgaaacaagttcaaaacatcctcctcaggatggctcagggtggtcaacttcgaggaaaagtgagcgacgagcaattggtcgggcttctcgagcaggtcagcttccttc

SEQ ID NO: 2998 - DNA, 3065 bp, Xanthophyllomyces dendrorhous
aagatgacatcgatagcctcgagggttcgtccctgggtctcggggtagaagaagtagatgacaggaatgaacaatgcgttggcgcacgcgaagatgaggaaggttccccaaccgatggtggccgtcatagtaggagtgacctgaacaacaaggaagttgaagagccagttggacatggttgacacagcgttggccttggttcggattcgaagcgggttaagctcggccgggtacaaccagggaaggggaagccagcaggacccgaagaacacgatgtagaggaagagtccaaaggcggctcccttggctgcctgagctgttccaggaataaggcaagcgaatgtgataaccatcgcgaggcactgtccagcagatccagccaagaacatctttcttcgaccgactcgctcaaccaagaagaacgacgataaggcggccaaggcgtagacgacagagaggacacctccgagaacaagagcgagtcgggtctccaatccgatggagttctcgaacaagacggtagcatagtagatgacagcattgcaacctccgagctgctggaaaatctgcgacgaggcaccgacggccattcgtcggaagtgctgcttctttccaccgacgaaaagctcggagaaggaagctccagtctgagcgccagaagcggcgttgataccctcgacgataatggcaatctgtcgctgagtatcttcgtcctcaagctcgtgtccgttcaagtcggcaatgatctgacaagcggcatcgtagtgtccgtgaatgaagagccatcgaggagattcaggaaggacggcaactccggcggataggaagatggcaaagatgacctgcagagcaatagggagtcgccacgagacactgttgtcaatgtaggacaatccgaaatcgatccagtaggcgatcaaagtaccgacggcaaccatggaggcctctacacagatgaggaaacctcggttgtgcgacttcgaggtctcggccacccaggacggaatggtcgaggtgttggctccgtttccaagaccggtgacaattcgtccgatcatgaactgcaagaaacccttgtgaggcccaaaagcggtgacctgaatgattgttccgatgaccatgacgaaggatccaactagaggaagaaatgtaaaaccagaatcagccagcagaaccaggcgcaagatttaataagaaatgtctacccacgccacatcatgttccttcgaccgagagactctccaaagaagaaagcgaaaatggcaccaaagaagcaaccgacctcgtacacagcggtgactgtgccctgaatagtggcatgaaatcttgagaagaagagatggagtgctgtggttagcgagacccgtgcgaaagcaaacaagcttatcagagtgggaaaagaaaaggaaactcactcatcatccgcaccagaactcctgacctgatagaagtctgttccgaactgtttagcgttgatgataccagacatgactccctgatcgtaactggattttaggtttcagtgcgcgcagtgacgacaacgtcagcgatcgagaaatgttgcgttagaaccgagacaaatatcctatcaaagggaagactgattcgacatctggagaaactcacccgaagaggaggaaacccatagtagcagtgacggtgatagcgttcacaagcttgtttccccgaagacccatccatcgtttactgagagtgaaaaagagtgcgcgcacgatagtggttagattacaacaagaagaaaaagaacacttgttgtttcaagagaagaaagaagccgacaggcacaaaaggtttcgacaagacaagaacaagaaaaaggcgaacgaacgggtcggtgttgggctgctgctctcgagggtttcgagcgctgagctgcatgttctttttctcctgggtaggagaggaagcgccgctagacatgattgtgaaacggaggactattgattggatggaaaggtaagaaagatgtatgtagaggttggatgtcgaagagctaccaacaaaggcgaaagcgtgtcttttaagagttggtcgtgtgtgtctttgccctggacctattcttgaaggaaagtgaagcaaaaaaaaaagatcctttatgagtctcctctgcttcttatattttttatgtccgtgtcttttcaagtgaggtgcttgtgttctttgcccggcccctcttccggaaagaggaaataatatgcatttttacaaattgggataaatcgtatgaaggactcaaaaccaaagggttcaaagggtgcacaactgagtttgtcagttcggatgggagtctaaaaagatcggccgctggaccccgcggcatcatctgtggagtcccagctggcaatttatcagtcgtttgagctccctttataaaacttgtcagaaatgttcgcccttgaactatattaagatacactagtaggaggtggagtatccacatgtgacatcatcggcatcatccttcttcctatatttcttggcaggcctcataagtcaaatgtctacagatctgtttatccgagctaggtcggatgattttgaccggccgagacaaacatctaaccgagcattctctattaacaatgtctcgttccaatagatagaaattcgggtcttgtctttgagagatgaacaaaagagaggacgagacaaagcaaagacaagactgatagaaaactcgatgagacgatcgggattcgtttacagttggaactgctaaccttgttttcattctgtcagttctttctctcgggttcatatcgcttggcccgtcaaagaaacgaccactgataaagagaatgaaggagaactgtacagtaacccctcgtgcggacgtgtctcaaacacaaagcctcgttcggagtaatgaaggtatgctgacctcctgtgagccatcgatacgacgaaaagaccgacctttcggattctaatagatcgggcataatcgtataatctagtctcggtgctattcgtatgggtttcgtagatctaatagctcgcacccgggaaagccagaatagaaaaaaaaaaaagaaaaaaaaaaa

SEQ ID NO: 2999 - DNA, 34696 bp, Xanthophyllomyces dendrorhous
  misc_feature (2510)..(2519): n is a, c, g, or t
aaaaagaaaaaaaaaaaaggacgccgcccgctagacggagtcgtattcatccatctcgtgcattagaccgcttgatttcatccttcgccaagcagtctattctgaccaacagccgcttaagagatcgcataatctgatcgaaccatcttcgatagaggtaactctttcgttagacgggggactacctgcctgactattgaacaatatagctttgtcttcttggagcggatttgtgaaaacgtctaaaaacggcccgagtacgtttccgtttatatcagtcgtgtgctcggtaagaatgtgcacgagatgggattactatccaaagagtagagactcagtgacagctggggatacgttcgcggcacagtggaaagggacctatgtccagcgtctagatgacggatcctctctgcggagtccatccgaggaatttatagacaagtaataaccaaagagagaaaaaaaggacgagataagatggcagcagaggctgttgagaatactcggatatagtgcatcgtcttctgattgtcatctacctacctaagacttagctagcgcatcaggctagatgatatctgcttctctcttctgttctgccgttttctttcttctccttcctttccttctccttcagctttcactagaactgtttttgagttgctgagatcattctgttcgatttccgagctcctcagagaccatacttgctgtttgaggcatcagcgttcatattgaacagttctgctggtttcgttcagttatcgttcacactgtacttagcacatcattttcaccatcattattctaaattgcttcaagaggcgtaccccgatgttagtcttctatgtttctgaagatatatgacctggtatctgattcttgttgagctatctgtgactggtaccagtgtatagaggatagaatcaaacagtaatgtaattgttcaacacattctttgttgtccattcacttttacatcccaaactggcaccagtatagaaaatcaaaaacaacgaggaagaaatctaggatgacggtggatttcctcaaatctaaacatatcgctgaacaggatgaaggaactcacttgatcgaggaaagcattcgacaactcatttcacaattgttattctcaactctaaacccttccccggtgctgatctctagattgagtccctcgatttcctcacatacacgccgcatcatctgtcagacattcaagatagaatgatatggaagtcctcactgggagctgcatcgtgtttgacaacctgaactaatgatgagtgtctataaagtggcaggcacacagtacggagacgaccaagaactctgagccttaaatgttataggcgctcgtgttgtgcctccgaaagaaatcccttcagttagggttataacggattgatcttccatagtatctacttcaacaccagatttagccaaaacatcagtttattccatccaagaactttctgcaatatctctattctcctgagatttggcaatgtacagttaaacagaacatattcatcatattgtggatggcttgttacaagcggggaacgttggagaaaccaagctgtcaaagagggaaaaggctgggtctatcatcgtcggccgaatcaaaagggaactgaagacccaaacaagagtattgacgtagtcctctaaggaacatcgattgtctctgccgaggaagaagttgatgtagatggcattggctatcatatcacagggcgtttacggtccagatgttttagcctacatgcgcggtttcagccggttcggcctcagtctgaagcagaccgattcactctatgagagtatcaggattatgtactcgaaattgaacagcaccacaaggttgagcaaagccaccaagcaagcatctaaacgagctgtatgaggctgaaggccgttatatctaatcttgaaagactcctctccatgggcgcgtcaaatagacgcgttcagcggctgaagcagacgcgtctgtctctcaacatcagatgcagaggaatattcacccgaatcaaacgagaaaagacattgcttattcatgatgtttcaagtagacgtctgaagcatgctatgggcatgtaaaaaggagaacataagaggattggctttttacgccaatcctgcacttagtctgggcgtcaggggagtaaaaagagaaaagaaggaaatagagaataaacaacacaagccgatttttttcttcttaccccaagtctaatctctctctatcctcgacctcgctttcttttttctttctccaacttctgctctcgacctaatctgtttcatcagcacattcgtttaatttacatacatatacatctaccctctctcaaccatccagcccatcattctctatcgtcatgtcttcccgccgatctagagctaacatggtcctacacgctcaagcacgcgccgtcgtgtctgcttctcctctttcctctcctgcatcttactcttcttcttcttcttcttcttcttcnnnnnnnnnnttctacctctacacctctgccttcccgaacgatggctgcgttccaagaagttgtgaccgttcgttcgactgagtctgcatcggcaacagctacagctgccgccaaggtgaaactacctgtcggagcaattgcaggtggcacggtcgcgggggttttggtcgtgatatttgccgggttattctggtggtggtgggttgccaacaagcccagagttagttctatctgacctctctctttctctcgatcactgactgcgttcaaaatgctgactcgctatatgttggaatccggtcttcaaatcttcttctaaatttctttggtctcttggcacgcacaggaaatgactcctgaggaacgacaggctcgacgacgaccgttgcctaagactgctcccggcgtagtaccccgttcgtttctattttctctctttcttgcttcgttcctattcttatcacatcttctcgcaacctaactggacgtgaaaactaaccacgaccatatccatcctgccatacgcaatcaagaaccagtctcgacaacacgaccttcagcatcaaaaaatccttattctgagaaggctgtgccattatcttccctgagatcttcacccactcggtcaacatctggaacgcctcttttggcagctgctgcctctgcttctgaatcatccgttgtcttgccaattgtcaacaagcacgctcctgtaaaaccatcgccactagcatcatcccgaatagcagctcccatcgaggagagtccaacgtatcccaaatggggtgaagttccattcgtggctcctccccttgcacccttcagcggatcccatcaacagtcgattcctcccccgactcaagaaacttactatgaacaaccggctggatcttctaacgggatttattcagctgatcctcgatcagtcgacaacccttttgctggaggatcgcccccaactgaggtgtatccccaagagaagatcggatacctcacagtcggcactccagccgggaaggaagttcgaaggacatccaatgtgtcagctgtgagcgagggctcaatgtattcgaacgcagacgaggacgcgtatgacatggtgtctgtcaatgcttactcgggacagcagccgcaataccagcagcatgccccaccatatggcgatcagaggcgataggattattcaaccgtccggatcaatttacaatcaagacggaaactttattttccttgctcatatcctaccatgcgtatcaagtctttcgcgtgctcttcttctcaatctttagctttatttctgttgtacctattcctgtttgcgcggtccgcgtattcatctctgcctcatataaacattagtcttctcctctctttcacttttccttgtttcgggtttctttctctcattccatcttttctggctctactctctcctaggatttgttccttgccattatcttcttttctggtcttctcatggactcttttactgcgccctcgagggttcattcttccgtagtatatatatccctgcttctcttctatttcttgatcatcctccaggtatgctacaaagtcttctttatcagatcctctgcttctctatgatatcgagttcttagtttatgcgtgatccttttgagctcgatcattaaatgcctcttttctttccttcggttttatattcttttctcaatttaatcttcagcattagattttattttgtctagaagtgtttgaggtgtattgggatgaggtgaatcgaaattcgaaataaatgtagtaaaatcagctaacggtagaaaagactaaatggatagtacaagtagaagagacaatctcacattctccctcatccaagtgatcaaatcacatcgatctgtatcctttttgagtcctgcaaatgccatctttgttcctgggatgtaacctgaggagtacatgagtgggtaagagtgtgattgaaagatagggcgaatcgtccaaggaattgtatgggatttgttttggagggttcattttcgtttcgcttgatcagcaacgatacacgacgacgacgatgacggcaaacaagaacgttgctaacttgcctttaggattgagaaggtactcgaataacgtatgttcatccctatcaaccaaacaagtgcaaaacgtataagatcctccgtacgtcttgagcgaaacaccgacgaaatgttataccaagcagagatagctgccaacaagtttttgacagagagagaacgaaccatacgattcccttgttgacattggcagctgtataattataatccggagactgccccgtctttcgtccacttctcaacccaagccgacgaacggtgacgttcgaaagaaactcttgttagaacagactcgatgatgccaaccccattcgagtcaagtacaggcgctactgaaagggaagagcgtacaaaagcccgaataggttcggcccaactttatgtggaccgtcctgatcgacagtatgacactgggcgcatctggtctattgatggttcatccaggtatcgagaagataaagaagcgggcgataagcacatgcagctatgtgttgtaccaccagtaagctgaaaatgttactgactttgaacatccgagctccctgtaggactcgttagttgtcaacatatcatctccacgcatctccatgtattcaacacagatgaatcggacgaacctttgagatatctccttcgacaaaagacatgatgatagctaaagtcttgaaacacgaatgcctttaactgcttacaaggatgaagtatgaggtacccgatatggagagagtttgtatgtggttagcacgatgagtaggtgagtatcaatatcgatcagaactaacaaacaaagaaagagaaagaaggaggggatcaagtagagagagagaaatcgaaatgggatcaacggctcagttaagtccctcaagactgaggggacttggcctgggaccgtcggaaaagaccgcaaaagaagtcttgagaatctaggagtcacatagacctatctgattgaatctcacatccttccgtcggcaatacgcaacgatctctaatcaagtgaagggctttgggattatacatgcttttgttatagacaatcatgtcgatttcgtgcgcaacgtattatttctgaagctttcttgtatcccctgcaaagtacagcatgcatttcaacctatttactctagccctttcccactgcctctgatggatactttacgcggcgttataagaccaccaaggatgaacacacccggatacatgtatctgttcaatcgatctcagcgtattgactggagagagcgcatacaaacactagtagatcaatccaaacgccagctctctggtgatctttgtcgtttgctatgatgagctccctccgtctttgtccggaactggacggagagaacggacggatctggttgaaccaatcggaaagtaattatatatacatgtaactaccacgaaggaacaaaccacgatgatacagattactacacaacagggagagattggcaaagccagaaacattcgattaaaaccccaatccaacgctgccgctgatgaggcactcgatgagccgcactctgaccatcagagaccgacggagaagaccccacggtggaatgttatgcaacagcaaccgccgaaacgggcgaatcagggtggatgttttaggcgaccgtaaccttgattacgtaaaatcgcggaaggcggaaatcgtttcgacgactgcgtggcgaataagaagcttgcaataagaagctctccggtttttttttcccttcgaccaccaccaacgacttttctttctctcactttcattctctttcttttctcgttactctttctactctttaatcaatctatcaacaatgcctttcgcctctggagatactaagaagggagccgctaccttcaagaaggcttgcgctcagtgccacactgtgttcgttcttcccttctctcttcccttcgcatcaccttttttctctttctcgctgttgtatcgactaatcgatcgatctgttccttctcaaattacagtgaggctggaggagccaacaaggtcggacctaaccttcacggtttgttcggacgacagtccggtcaggttgagggattcgcctagtgagtcccttttttcccttaacacctgtataccattcctccctccgtacaggaatctatagaactaaccgatcacgtttatgaaaaccagctccaaggctaacttggctaagggtgtcacctgggaggagaacactcttttcgatgtatgtttcttgcttatcagctctttcttttctccatatggaagctgattggctgaatccgattcatttcctacctttttttcttatcagtacctcgagaaccccaagaaggttagtcttgtcttccttctcatcgtagagaatgacagatattgtccgatcagacgaactcttgtcgatccgatccgactagatcatccgtctgtcaatgtcgttccctcccaatcattgttctgacttctcgccttattttcgcttttatagtacattcctggaaccaagatggcttacgccggtctcaagaaggagaaggacagaaacgatcttggttagttgccttcacattatcaatcgttacatgcacttggctgacgatcgctcatttactcttgatcttgtttctagtcacctacctcaaggagtccaccgcttaaaacacctttggtgaacccctcattcgtttgcactcgactcccttcccacacatatataacaatacccacacactcctctctagctatctagttctcctttcgtgtttcgattcttctgtttgtttttctacatcctcaacatacatgggtttattttcattatgaggaaagaaacccctctatgtgcaaagtaatgagaagagaaaagagaacacaccaatcatagtaaagtagaaccagaaaaaagtgacgtacgtacttgctatccaactcgaccaatcgggtcatttgtgtgagtcctcatgggtttaagggaagaattcgaacgacgagatagtgattacataatacgcacgttttctcaggtgccaaatcagccaatcagtcgagctttatgttccttctctccttgccgattgcatctctcgagcaaaagattgatggatcaaaaatcttgggcgatccctggggcgcttggcgggctctttgttctttctttatgttcttgtcggaaggggaaaaaagttgtagaccaagacatttacacccgttgctcttgatattagaacgtatatcgtaggttgcgccgtcttgacatcaatcgatctccacaggatttgtacaccttcttcaacatacatggcgtattatataaaacagcttattacaagtctgatggcctgatagaaacaaagggtgaagaatacacacagccgctattcatttaaggccaaacctaagtctttcctttattctttctgagcttggctacagctcgtgtgggtttgacaacgctctcgttcacttggactgtcattctctttgaagggttttccatcaaccggcccgctttgatctgttccgagccttatgtaatcattcacgatcaactgcgttatcttttccgttctacgttcgcagctcacgagagaaaaaggacaaagaggaagaaagacatagattgaaaggaggcaacagactcacggacaaagcttgataggagagaaggaacatatatgggcgccagtttctgaatgtccgtagtccgtaacacggattgaagcctcatcttgctagcggtgactttatgcgtcttactcctctgctgccagtttgccttgatgagcgaaccgaatgtgcgagccaatgtcgttgcgtaaggaggattagggataacctcaccatcgaaggggaaggcaccgttaaaaccgtgcgtagggtgacgaacgatctccagaagcccttccacatactctgcgcgctgggaaagagtgacgtttgttcgaaacatagcgcatgaaatcggaggaaaatcgtagggttagttctaccgatgtcggtttacaccgaccagcaccagccgtgagggaaactgagaagggactaacagctcgggtggagaccagcatgtgtaaaaaatctacgcaaggctgcaagccatgcctgatgaggcctctgtctatgttgttccttagcttttgtaaaccttttaggttttttttgtgcgcctcgaatcgtcggtcaaacccttggacgagatcgttgaagacgttcatcggtttctgaccatccacttgatgagattgataatatacagcgcgacaatacttgatgtacgaaaccacctgtacgaaagggagaaaaaaaacacattgagaaaaataaatcacaggacatggcagtattggtcttaattgcagggggcaccgattgagagaccgaagaaaaacaagtgatgtcgagatcatgcctaccattaagagatccctggcatcatcgatatgagtgcggatcgacgttgaataatttgcaatctgcttctcaagatccttaacaacaggcaccgagtagctatcagaaaccccactttgaacgagatcctgtactattcttccaaactacacacaaatgccaagtagagggatcagcctggagggggaagagtgagcatgatcaatgtatgataactcgctacctttacagtccattcggaaacgtccatggaccttgcgctcagttctgatttacttctcagtcctgggcagtgatttgaacgaagacgcggaagacaagaagaagaaagccagatatcagccaaagataaaaatgtcataaaatcagcatgcgtatgccaatcaagcactaaaagtattcgcatcgatcggttcaagacttaccttgcatcagcgagccatccggatagcccctcacttccttgtaaaacatcttggcacactctgtgaggtatggagggctgtatcgacgatcaaagtcgaaggaagtgggtgtaaacaagccacaattggggtggtacaagatctctctaactgataagagatccgattcgatctatgtcacggaacaatgcttagtatttgacaaggttcaatcaaatcaaggtatgaatggaatggatcccacacttaccaacagtctcttcgttgtttggtggtcttgctcgtcagacttgtacatctgtttggtattggttatcgtgccttgagaaatacctttcaagaaagaacgctttaacaaatgacaacagtagtcacggtaagcaagctacatgacagcaaaacatgtgtgaagcatgatgcacgaagagctcttcttacctggaatttagcttggctcatgacataaagctgaagatattgaggcgcataagacgcgaaaagactcttgaggtacgaaagttcgtcgaccaatcgtccggtgtccttcggaacgttctctctgtagtcgccatcgtgtgtctggattaccaagatcaagacatacatataaagagttagtgccgactcttctttaggtttcctctattgtcttctgttgaaatcgttgtaatggatcactataatcaagcgataccaaggaagaactgcgtaccggtgattgttgtatcgatacatcttctacagctagcgcacctttagttgagcttcttaaatcctagtaaaatcaaatcgagggaacatcaaaagattaatcaacaaactgcttagtcggacagcactctcaacaacaacgacaaccgaaacacggacctgaggaagtatttctatcgttatggttttctattcgaatcaatacaaacccatcagtaataagtctttctctgtagaattcgctcgtcaacggagagatggcagaagacatactccatgaatactattgccatgaactctctttatgctctcccttgattcctcggatggatttgatagtgaaaatatggcagtccggttcgactcccatcgcagtagcttcattggaggcataccgcctagactgtccaaacaactatcaatctgatccttttggatattactgggaagattgtgtacctgagaagatttcaaaaagagaccgaagagaaacatgtttccaagaaaagaacggaaaagtagatgaagacgtaagcatatacgattggcatggaaaaaattggatatgatgagtgctagagatgagttttaaagatagagcatggcgtgtctgagataaaagacaaaatacgcacacgaaaagtattccatttctcatgttctagcccgattatatctgatgagtcagtcttagctgggataactcgaatattcacgggacgctgtagagcacagtatcaagaaagacaaaggagagtggtatcaattgcatgttcactttgattatcaaagtgaaaggcaagtattcactccgccaaaacagcgtccatgtaaacctaagatagattgtagagtttcgcggtcctgaaccggaatgactgccgtgcattctcctatcttcttcctgatccggtttatagaatttggatgtatatcgggtatcagtgtgcgaatgtacagcatgatatcttgacaagacattgctggagatagcgaagatatctgggtcagattgataatgattagaaatgaatgttcgttagaatcggtgcacttgcgacaacaaaattctcttattcagtgatagaaacacatacaagcagagtacgaccagataagcaatttcggttggcatttttatcggaggagctggacatccagtacaatggagctatgtcgagcatatcctttcattaaaattagataaaataaaatgagaaaaggccatcgtacgtacgaagatacgattaatggagagtcagaataagttgttccaaatcggtcagcaatttatggcgctgcaaaacttgatggacgaacactctgaagttcaggttgaactctcatgaccatcttcttcagttcatatacggatatacccccaatatctaccagaatttgttggtttaacatggctatgctgggtactgcccaaccttcgcgaaggagtaactcgcgtagatcgtttgcaatgtgtttgcgaggaaactttttcgaaaagctgatctgtgaaagatgtgtgacaattcgaaagtattgtctgttagtacaaaggataatactgagatgaatagacaggacaaactagactctaacctgcatagtgactaattcaggtatactgcttaggaacagtatccggctatcagagcgggatatatcgcggctttcatacttatttgccagaccaacttgcgcggaagaagacacgacacggggattttgccctctttttgaggtcgagagagcctctaagaacttgcgctcctgtttcggggacggaacgatagctgtcatcgccggactcgcaggcacagcggtaagattctgttgaaacgacacgcgtgtaatcacggtagactcgacggtattggcaatctgctattcaggataagagaatatagtatatgtcgagacagaactcactccccaatgtgcctgaatatcatggattgaactcaacaatttctgttggtcctcttgtgatgtctgaatgagcccggacacctcgcctgtcgacttccgagcatcgagcacgtttatactattagaccaaaagaagttccttaaggagtaagaattcatatcgggaggcaatggaaaaatctaggtagtgatcccattgaaagaagtcagatgtctctaagtcactgaaagggcctagagtcttagctcgatgatacgttaaacgaagagagaggcacgaacagaggtgatgacctgatgtccatctcttggtatctcttttgtctctgtccgaactgatacaccattttctttgagtcgagaggcagcggttgatgaacgtgatctaaagaatgatgccgatggtggaggactgtagcaaggcttgcctttcaaagtcactaaagatgacgatgaggacgagcgttggaatgatgatcctaagaacactaaacaagacgaaagctccaggagcaacaccatcaagtcagtctggagctgcagctctcacagaagaacgacatcaaatgcagcgtacggttgatataacgacgttgtatctttccgggcaacatcactttctactgaagaacaagccaacgatgatcagcgatatggaagtaaaggatggaggagatgtttcaggaacatagatgtttcagggcctagggttaacattggttacaaagatttggttacgatccatgatatcacaaactttggttacgatcgcccctccgttgtattccgtccgctcgtgcttacgctggtaatctggttgaagctcattcgatcctcacttttctccactctttctagtcgatttatcgatctggccgctcttcgttattacccacaacacaccaggtcagccgaaaaggagtaaactggctctggttctggaaagagacatcaaaagacgagaaaaagccatcccgttaggagaagtttgaggtttaatgagcccatgaatttactacgacaatttcaactctcgtcgctgccttctccaactatttcgtctctatcgcctcgtcatgatccacaattctcgtcggttggcgtttgttccgctgaaaggaacacccaatccgagtcctatgagctgtacgtactcagttgtgccatgctgtatgtgttctgtttaccatgcagctgaaactttacgcttctgtcttgttcttctataattttatttgtacgtttgggtttctctttttcttttttcttttttcaccttcctttactattcagtatcgactcgtcgacttgcaaagatcttgacaccaccttctttacctccaccctctcagttatcctcggctcgttcgcatactttggatctaccagttcatcctactcgttcccatgcctctcgcccaacatcacctcctcggtcttcatccaatgtacgactcaaatacatgcccatattcgaagatcataccctgtatacaccgagattttctgattcttcagaaccaccgataccgacatattcaatcggttcaaccgaacggctgactccttcgcctaaacagatgaaaccatccaagaaacggccggctttatcctcgccttctatgtccaattctcttcctgcttctgcttcctctccacctaatagatcgactgcaccatcatacatacccccatcaaaatcaacgaccaacgcatcttcattatcaccatcgctaccatcattatcatcgttgcggccactgccatcgacatcatcatcatcatcgtcatcaccatcattacctgcgcttgaagtagtacatcccttaccctccaaagttccgccatcaatattgatatcagaatccgtgaggctgagcgccgatgaattggcgcaactaccagccgacgaaaaagtctacctagtagcactacagtcgatatcaaacccagaagaactcgcccgattcttaaatttcgcaaaagcatgggtgaaggtggggaaaaaagtaccagagcgaacaggatgggttatcgcaggttggtttacataagcttctctctctctttctgtagacttgtatttactgactgactcataatactaaatcccatgcgctcaaacgaacatttatattaacaataaaaaggaaagctaccactgatcgatagtttaaaagtacttcgttcgacccgacaatatgagattggtcgcgtcccatctggtcaggtcgctcaagttctcctccgaaagcttctagaagagattcaaaagccaaaagggattccaccaccagtcaagtcgatggccattcttgaacgaatatacaatctatggcctaggtcggagaacgtctctccagctacttcctcatcagtctcaccgccgacctcgttttcatcagacgatccatcttctattgagaaggtaacggtgtccttcgtcgaggacccactctcttgggcgctcctaatcgcggcatacagcttaatccttaaacaggaccggtacccattcaaatacaactttatcgagcgtgaacaggaatccaactcgacatcgacgttcggaataaaagagaatcttttatctatacggaactacaagcttgaggacaggctggctgcgttgagttcgatctggtccgcttatgatgtacgagatgagaaagagcgatcgactatcaagaaagtcgttgacgggtttccctatcttgactccaacaagttcgaaagctggttcgacatgtttaaggagactatcgaagatgaaggaggaatttgggcgtcgagacatcggttagagaacatggttcttggccgagcacgattggttaagttatcgaaagactggacggctggaacggatgtgaaccggttgacttatccttgtcttccacccgtccgaccaccatcatcatcaccaccatcaataacacactcaccacaaccggcaacgacaacaaccccgtcctcaccacctcgattagctcctcttatcctatcgtttcatattcccccttcctcgcccatctctcccgagtcttccaatcctaatgctgtcttccgaacgactctttcgacaacaagggatcttgtatctgatcttcggtcttcctttgttcgatatccatccgacccgattctcctcctctttgcttttcgactggccttccgggtccctccttcggaccctgacaggtcaactctcctttctgatcttcttagtcgagtcaaagtgcctgtgtcgtggagtcaagtcatgaagttggagaacgagagaacgacgggaacagttcagaggaagagacggcagtggaccaggaaagtcgtgaaagagggcttggatgagttgggaggcgtgttgaaggggaggtcaagattgtgggaggatttattgaattcttgaccaaaaagaccgacggagaaactcagcgatagcctacaccatcttagtagtacacaagtgctgagactgagcaatatcaaacagaaggaaagctacagaatgtgacatcagcaatctttcctacgtcaaccggaaaacgtcttgataaggaagaatatagacaaagcacaagaagaacgagacgatgcccctcgcgcagaggggtcgaggtggggggttacggtcaagcttaatcgtcttcatgaataacaatcgttggttgttcaaacacgacctcctttacaacaaccttgtcttcctctcccttctctctctcgacgtcaacctcttcctccctcactttcaccacgatatcctcctctccatcttttgagcggtcgacatcagatccttcatcgtcatcagatgcgtctcctggccgtttaaatgtcacagcagccgctccacctcccagctttcttttcttctctgccccaccatcactcgcacccgtattagcaactcctgatgcatcggcagacgcggctcgaccggcgttggatcgggcggctttcttcttttgacgtttcagtcggttcttagacgtctttgcctcagactcggccaaggccgcagcttgtcgttcttcgaactctttctgctccgcttcctaggagagggacaaaaggaacaaacatattgaatgcgaggtagagggtgtgaatgacgcgtctgtttatgggtgaagacagaacctaagggacaaactttcttcgacttctcgtccatcatcttgagccgctcgtactctcttcttctattctgtttgtagacgtgaaactctccggaaccggctccggcagaagaaccctgaacgttcttcatcatctctctaggcgcacgaagcgtcttttccttcgtaggtttaggaatatgaacctccttcgaagggtccttgagaagcttctcaagctgcatcaagtttgagccagagaacgaccataccaatgacagaggaaacacccaaggcactgtcagtcgaccgcaaccagtaggtcccagaaagaataagggaaaggacgaacgtgaagtcgctgggcctcgaccggagtcagattgtgcttatttacaggggtagacgatccagaaaccggaagagacgaaggatccggagaagctgaaggagccatgatgaatgtaagagcaaaggatgagcggatggataagctatgagtaaagacgcaaagatagatggatggccgttggtggatagaagtgtccaaacgaaagaggattacgggcgttcagcagaaaaaaactatccagactacaaatcctcctaatcaggtctacaagaatttcctaataaaatctcgatcacaatttccatcctctctttcttctcttggctctttctttcgtttgtttccatcaatctatctacaaacagcactgactcttagcgaacaacgactcgtgctgttctcctcgtgttctatcccgatagatagtcttggttcattcaaggcccgtcagagaaatatatattgaaacctttggcgtctttttcggatggctgtttatcacccccatcacctgcttgccccttcatcctatccagccaattcttatccaatctcactcgtctttgatccttatgccgatcttctttggtcaggctcatctaccggtcttgtccaatcattctcatctcctgcgtctttcacgaggaacgtctgttttcccgctcatggaagcaaaccgcttggcatcactcaggccggactcgctatcaactcacccgccgtcagagagatttgggtaggcgatagagagatcatcagcttgacagaacgagggctcggcggacggaaacgaggaggagcagccaagtgggcactggatgaaggagcaacagcgttgagcagcatgtgtatctctcctacaaactcgtcagagatcatcgctggtggcacccaaccggcagcgctaatcgtcaacactcatacgggttcgctgattcgaacggtacgcttcatctttactcttttgaaagctcaaacatatctatcgtccaaaactgatcatggagtaatctgccgctcaggtcgactgtccaaacctgagattcgttcgacgagcagctagattggttgcgaccgggtcaaccgacggcctcgtcaggttccatgatcccagatcgatgaaagttgagcagagcatatccgcccatcttggtggtcttacaggacttgaggccgtggggtggaatgttatgactttaggatataccgtcaagttcgtccttccctttgtcttcatatccctcacgcgtggatttgtgtatgagcatgatgttcaagtatctatcatctggactcgttctcaacttgtttatcagacaaggtcacccactccctgatcccatggtcaaggtgtttgatgtccgaacgttcaagcctcttcctgcaatctcgttcgagacaggccctgcattcgtcctgccggatcttaagaaacaagactcgatgattgtcgtgtccgtccaaggatctttcatggcggtagagattggtaaaccctgggaagccaggttccatcaagtgagtattcatcttgaatcatcaggtttggagaggtcgtcgacatcaaactgaacttgacttcctgaatgggttgatcttgcaaagctcgacgtatcgacgtacgtgacatctgcagcaatctcctcgtcaggctcattccttgcatttggagacgccgggggaaatcatcatatctggtcttccatccaggatccgctttcttccgagatcgactcagtcaccttcaatggatttgagggtattcaaacagaatggcccgatgcagtcactgaggcttctattcctacgttgactgttgacgcacctcctccaccatcagtatctgtcgcgccggtgatgggaatgccaacgtccaacaatgaggaagatccttctcgactggaaccattgaatttgattggaatgcctcattatacgacccctctcctgtcaaacatccctgcatcgacatactgtccaccaaccagtcctttcttcaacccgcctgcgaagattccggcgagtgtgctcggcacaatgcggatggttgatttcgtgggctatgcacagacacctagggagttgaagggaacaagaaacagagtagggccgagaaagaagaaggcaggcgaaggtggaccgggtggaccgagattcaggagtgaacagacaagggagcctagggagggagatagggttgggacggaaggtgaaggagaggcaggaagaggagcggagggagagggaagcaagtacagaaaagttgaaatccaatacagcaaattcggttcgtactcacgttggcgatctctctgtgttctcatttttgggcgttataaagatgacgaggcaaataatgactttccttcattgtgtccgggaaattctttatttgggagtaacaggggtggaagactttgatttcgggtaaatatgttgttaccgttaatctgtcacctggcgtgttgctctgcgaatctgataccgtctcttctcgttataccctttccagatattacaatcaaacgcaatactctggactcgagacccatatcgcgagctcatacacgaactcgcttcttcaggcacttcactataccttacccttccgattgattgcgaagtctcatatttccacggcttgtacgagggagcattgcctgttatgcgagtgcgggtttctatttaggatgctggaagatgcagcaggaacgaattgtcaggctacaaatttctcgagggctgtcggaggaattccacaaagtacgcaattctctttgaatcttcccaatcccaagagtgatctgagttacactgttgaccacttgtcgtttcagttcatgcgctaggtttgttcgactcggaagacgagtcaggcccaccgaaagcgtatggtacactccttcaaaacttcaccagattcgctcttgaacacatgtcagccgaagcaaagacgtacaatctaaacccaaactcaagtcagtctcagagccagacgaatccctggttattcccgatgttaccaatacctcgatcgatcccttcgacagtcgcccaggttacaggtttggagttgaagcagacgaacacctgtctagcttgtggaacaaggacggcgaggacggggattcatcatatgatcgatctgacttatagaagaaaggtatgcattacatctcttgttctgcgctagaagtatcccaaagagacacacagaaagagaggaggaggaaatatcaagcgaggctcattatccggttttatctttgatgttatccaggccctaccaaacgaattacctaccaacaaagacttttcctctgtcttacacgactctataacccgagataccaccactaaagcagtctgcatacactgtaaacagttcgctcccctccgaaatcgacgatcgctttcttctccgtctgctatagaaagctcgacaacaatgttgcctcctgtgctttgcttgaacgccgctttacattcagcggatatcatggaggatttctggatggatcggccgaataggccaagacctttcttgcccacggcgtttggcttcgtacaggatggtgaggatttcaaaattttgggaccagaatggagaggatcgtggaaaaaggcagaggcaatgtatgagctcagagtatgttcctttctttcaaggatggcatgtttgttgagtgacagctcaggcgctaactcttctcttcttgactatgttaggctctgatcgtcgagactcatgctggaacagatgaacgtcatctagtctcaattgtgaaaagtgagttctttctcccttttcttacactttgatatatatcttttgtctccatactgaaatttccatcattgctgtggctcttctctatcatgatcagttcctgcggaagagttggattcagaagcagcctcgccatggtacatcttcaacgatttccttgtctcgaacatctccgaagaagaagccttgagtttcgccggatcttggaaggtgatgatctttcttcattcttcattctacttcttcactgtttggctcacggattttctctttgcttctatgaaacctttttctccctcgtctggatggggctgaacagacgcctgctgtgatcatctatgagaggacagactctcgacagcctcttgatctatcaatcttacctatgggaatcgagccttctatccttagtcgggatgtttccgtttcttggtaaaccttctccttccttcgtcatcctgttcagtttttgatccattctgggctaacaattgtatggtttgttctgttgttgtctttggtcatatcatgcatcaaggaatcgaaacccggctcgtatgaaacaccgatacttgacgcctgatgagttaccagaggccggaacgctggttgcgattgatgcagagtttgtagccatgcagtttgtaagtttaagtcgttctactgaaacacctgactctttcggcacgcacatcggactgacacgacgagtaaaaaacacaataataaggatgacttggagcttcgatcggatgggacaaagaaggtgcttcgaccatcgaagttgtcgttggcaagagtgtcgtgtttgaggggttctggatctcaagaagaagtgccattcatagatgatcatatccatacaagtgaaccagtggtggactacctaactgatttctctgggattcatcgtaagtttgcgcctgttcgtgttcttgtctccagtcgccttccatctaataatcgtattcatcatcgttatctacccttacagctggagacttagatcctccgttatcggaacatacattagtccctctcaaggtcgcctacaagaagcttcggttgttggtcgatctaggttgtatctttatcggacatggtctcaaggtttgtctcattctaacactcagaacggaagtattatgaagctcatcttttctcgattcttaatcatctctgtatctttctttcacagaaagattttcggattatcagttagcccttctcattctcagaaatgctttattctctccattatgtatgaatactgatataagtttcactccaccacaacctcatcataatacagacatattcgtcccgccaagtcaagtgctggacacggtcgatctctactcgagtccgcaacgacaacgaaaggtgtcgcttaggttcttgacttggttcttgctaaaaaatgatattcagacgggcgagcacgattcgatcgaggtgagtctgtttcatatgccttccttggttctcatttcgcttattttggctttcttcccttataaattcaatacatgaaaggacgcccgagctgctttgcaactatatcgattgtatcttggtttccagaaggaaggccgatttgatgatgtgatggatgatatctttgccgaagggaaacgtttggttagtttctcatcgttcggaagattcttcttcctagacccaggaactgatcctggctctcattatgtcattcggggcatatagaattggaaacccccaggtgctgcaccacctccgccggatagatggccaccggtggctatgtccacgacccaaccatcaactcccgaacctcgactcgctctgcctgcccacgcgtcgtccgcacaaactcagatgacatctactatgcgtcgattaccgaatggaccacctttccctcctcgaccgccaccgccttcgacttcatcgtcaggatcggtcccgatgcctcatttgtcacccattgcgtactcaaatccatcccctcatcctctctcaccacctggtcaagtaggtagttcttatttacttccccattctcatcttggtccacaccaacaacaggccttcccggtctggccttccatcggaggatctggtcaaggacaacatggtggtaataatggtacgggacattacctaggcccttcttctcagcctccctctcagcagacacagagccattggaggtcctatggaggaggcgcagataatgggatgccttggagttgagataagtgaggtgaagagagaaaagaagaggataaagaagaaaaggacagtaaaaatggatataatgaacacaagtacttgaacggttatggccatgaaagtttaagaatgatctctcgctctggccgttctcttttgcttattcctatgcttttcgttgagctctcatcaagtgataagacagagacacacaaagtaactgtttcttatcttcatttgcagatgaggctgtcatctctatctaggtcgttgtcgagagattttgttcaaatcctccgacgcgtgtctgtttttctagttattcagctgcttgccactctaggcagttctatcactcgtcatctcatccatctaatttcatctgattcactccttccgccctcatccatcctcttcctctgctctcccccttcccacagatgcagtcctcccgtgagtgtactcggccgagctcgccttcagtgcctccaccggatctggataattttgactggccaggggttgtggtggaaggttaccacgcctggtcggatacaagccttcctcatgtacacgatgcagaatgcgactcaatttcaaaacccaagacccacgtgtcaggaaaaaagcaggaaaaggtcgatgcagggattgcaccctggttggatgcagaacatggagggacccataatgtgagtccttcgatcaagaaggaggaggaggctggatacgtgtctgctcttcccaggagattcttcttatgagactaactgagatcgatcactggttcttttgtcgtggcttgcttgtccttgcatgccttgatttatctctataggcctctggatcagcatcagcatcgacatccaactctgtcagtccatcgggctactcgcaaccagttcgaacactaagttcatccacatcatcgcctcacctaccagccgttcgatcctcatcaaaatcaacgagcacatcatcttttaactccggcccatttggtcgatcacgacatgccagcaattctggaaagtctggtatctcgactccaagcatgagaccatcaccacctggagaaccagcaaccgcggggaaggtcgcttccgcatcaaacaatgcgtcgcctcatccggtagctccgatcgaggagaagaggaagaagtttctaggtcgactaggaatctcaaccaaacgaagaccagctacagttcagacagtagaagatgcgactccttcatccaatccaagacttgcacctgctgccgctcagcgaaaatccactcagcactcgacggacctcaagagccaacatcactcccaccttacaagtcatcttccaaaaggagtcgtcccgcctcatctagctcttccccacctgacatcattcatgccgatagaacaaaggcagaaggaagctccttcactggaagacccgaggaaggttcgaaagtctagcaagaaatctacttggtcagataattcgagtgaggaagctatgaaatcggtctcaggatcgagaagctctcagctgtttactcttgacaccaacctagaccatatggaaggcattgtcagtagggactgggacgacgcatctggaagcatacatagcggctcggtcgttggcttatggccggagggaggaggcagtgtctcttctatcgggtcatcctcagttggatctagatccggcacactcccacagcatcataccactttcactaatccttttgcgcctgcttccaatcaagcctcaagaaatccatcaaattcttcaagctccatcaaaggagcacccgtcttcacaacttcactccctcgacgtccatcccagcttcgatcgatggtcactccaagtgatgaacttggcacaaatccatttgaccaactggcctcaaacaagacccctcaattctctccaagtacagagttccgtaatccgtttgagatgactgaagtagatctcactcggggttccctcgatcccgtcacctcacctctttcgatgcctggtggttcgaaatcatcagatggccaaccagatttcatgggctctagacaagcgaatgtagcaccacctatccggagtcaatttcaggcatggacagcaccagagtcgtggggtgtcgaaggcgatcaagaggatgagtcatcagatgacgaagaggttgccgacgcgccaacgatgatggattctgcagctggtccttccagcttgaatgtggtaggtggaggtccaaggttggacggcacaagaacgggatcgaagggtgataatcaaagaggttcgcaatatacggtggacagttcagatggagttctagggaaagacacgttgcgtgcctcatcaaacggatcgatagctgtgccaggtgggataggaggtccgtcgacaaggccaatcgctagccgtggatcacaaggaggaaaacaaagtatgacaaacgcattcggaagaccatcgactggcagtactatcactggtggtattggtgagataagtagtagaccggcaacgaccagcgggttgtctaaaatgacctcgggtggttcattgggctcggttcgtattcgcgtcgcatcttcattctcctcttcatgggcctcaatagaagactgataattcaagaactggtttggtgtcatatagaccgcttttatccggatatacatctctgatggatcgtataaagtacttgctgtcgcgctgacggctactacaatggagatcatctatcacatctctgcgaagcttcttatttctaaaggtggccatcggctatacataagagagcgagggaatggtacgttctcactgcgataaatctatgggctctttacaccctacttcacctagctccatgccatccaatctgttgaccttcttcttcgtcctcgttctatgtgcagaccgacccttagacgctagagaaaagcccgcactgattcagagaaggagactgattcaagctgggtatcagggcattgatggcttagacgaacttgggaaggacgacgtgagcatgttgtgcaagttcgtcttccgactaccacaactcccgggaatcgagagtgtaggtcttctctcttttctttcaacataattcgtttgataatcaggttctgaaacaccgacttcgtcgcttttttcaacgtgggatgcgtacaggccgatgagaactctttcgattcatcatttgagtacgtcgatatatccggacgagatctacaagtctttcctatctttctacatcgacacgcacacaccatcgttctcctcaacctttcaaaaaacccacttcaagagctcccatctgattttatccaggcttgcacaaccctcagagaactcaagatgtcccatatgtctctgaaacgaataccacagtcaattcgccaaagttcctcccttacccggctagacttgtcttgcaatcgaattgccgatttggaccaaggtggcttcaatgatatccccgggttactttctctacgcgtacagaataatcggctttccgtcttacctgcttacttcggccagttacgtactctcaagtatcttaatctctccaacaactcttttgaggcgttccctagtatcgtttgcgagataaggtcattggtcgacttggacatctctttcaacgcgatctcataccttcctccagaagtgggaaaactagtgaatctcgaaaggttccttattgttggtaacctggtgacctcgatcccaagcagtttcgctaggctggagaacctacgcgagtttgactgccgacggaatcggattgtcgatttcgagtacgcatatgcccttccgaaactagaggtgctcagggccgagaggaacgatgtgaacgtatttggggccaggtttggaccgaagatgagcgacgtcaacttatcatataactcaatcaccaagttctcattgtcatcccgcagtccagacacagcgttcggccttaccaacctggatctatcgttcgccaagctttcctcgattgacgatgaggccatggcccatctggttagcctcgtcgtgcttaagctagacggaaacaagttcacaagtttgccagatagtatagcaaacctttctttgcttcgggaaatccactgcgccgataatgctctcactgttctccccgatggaatttctcagcttcagaaacttgagatcatcaacgtccataacaacaacttgggacaaattcctcctgggatctggtattgctctagtcttgtcactctcaacgccagttcaaacttgctagaaacgttccccgatccaccggaggaagccactcaggtcaaaagagatttctctaacgaggatggcgacgaaaacgatagtcctttccctctaggcgccagacttcgtcaattatacctatgcgacaatcagctcacagacgacgtcttccacccggtctctctgctcacctctctgcgaacgctcaacttgagttttaacgagattcttgaaatcccagcgtggactcttcggaagaaccggtcacttgtggcgctctatcttagcggaaacaagctgacaagcttgccagcagaagatctagagaatctgatgtctttgatggtcttccacgtgaacgggaacaaattacaatctctgccggcggagttatcagatatgcgtcgactaacggtgttggatgtcggaagtaatgtgctaaagtataacattgataattggcagtttgattggaactggtacgttccaacaaattccttgacctttttcaccattcactatatttcattctaggcgcttatctcttctcttttgaatctcttccatagggcaaaaaatgttgagctccgttacctaaatctatcagggaacaagcgattcgaaatcaagcccagtgccgatcgaagccatctcaacgagtactttggccaaggcaacagccgaaacgagtttgctgcaagttttgctccactcgtgaacatccggacgcttggtctcatggatgtcactgtccgaattatccctcccgatgagacagaggaccgacgagttcgatccacagtttccgaagtcaacaacatgtcgtatggtttctccgatacgttgggaaagtacgaacatctccttctcaatgatttggttgtgcctagtttccgagaaaaggacaacgaggcgctgtttggaatattcgggctcagtcatgcgacaaatccgggactagtcagtcggattccttacctcatctccgaatggtttcaaaagactttctcgaatcagctcagtaagttaaaagaaggagaaggcgtggcagatgcgttgcgtcgaacgttccttcttcttaacaagacctgttatgaggccctaacatcagaaagtatgaccggccggaaaggatcccaagcgagcgctggagctacgatgaattctggggcacaaaacggaccatcctccctaaatgccgccgttcttcgaacaggagcctctgctgtggttgcttatgtggtcgacaaagttctttatgtcgcaaatgccggagcttgtcaggctgttgtctccaagaagggaacagctgaagcactctcatccaagcatgaaccctttgagcgatcggaagctgctcgaatccgatcagccgaagggtggattactgccaaagggctgctcaatgaggagctcgacgtatcccgtggatttggcttttaccatcttattcccgctgttaattcttgcccggatgttcgctcgtacacgctttcggactcggacgaatttgtcatcctcgccaacaaaggtctttgggactgcatgacatatcaaacggcggtagacatcgctcgaactgagaaggacgattcaatgatggccgcccaaaagttgcgagattttgccctcagttatggtatggacggcgcaatcatggtcatgattatcagtgtcggggatctgttcaacacccggatgctagctaaaaaggccgcgttcgacagctctacactgaccgaaggttattacccgaaacgagctctgagaaagggcaagatcgatcatgtcggggaccgaacgctcgctcgacttgaccgagaaattccacctcccactggatttgttgctatcgtctttaccgacataaagaactctaccgcgctgtgggagacaaatcagggtatgcaaacggccatcaaaatgcacaacagcttgcttcgtcgtcagttacgaagtattggtggttatgaggtcaaaacggaaggagacgcgttcatggtgtctttccccacggttgcctcggctgttctatggtcatttacctgccagctgatgctgttacaggaagattggccgagtgagattctagaatgtgaggatgggaaagaggtgttcgacgaagatggtcagattatttaccgtggtctgtgggtcaggatgggcatccattggggtaacccagtgtgcgaggcggatccgatcacaaaacgaatggactactttggcccgatggtgaacaaagcgtccagggtaagtagtgtagcggatggaggtcagatcatggtcagtcagggagtcgttcaagagatgaaggctctgtttgaatccttggatgctcctcaaacggatgatgcgatggacggagaggtcgaggagaaatttggaccgcatgctgctcaattgagaaagctcggatttggtgtgtcgttcgtcggggaaaagaaattgaaaggtcggtctacattatgtttatgatcacgttaattggaggctgatcattgacatgttcctctttactcttctgaaggtctcgagaaccacgagaaactttcattggtttacccagcagccctttccggacgactggcaagcgtagcaaaccaagacaatgtcaagaccggacagatttttgagcccaagcaagggctcctcaatgtcgattgcgtccgatatctttccttcctctgcacccgactcgaggtgctttcctcgacgggcgttccgttcgctcatacatctcaattgccaaagaatacaccgcgacgaattcctactacttcaacgcttgtaaatcctcagatcacgttggatatgacggacgaggagctttttgcgatcgttaattcttgtaagcctcgatttgttttcttcatcgagagatttaagttggagcgcgactgatggatgtaatcatgcacgacggtttttttcccaataaagtgacggctcggatcgagaattcgttgagcacaatgtacctcaaacaactcgatgggttttctactgttctggccgcgctttcgcaggggctcgccatggattctaggttgctcgttcatgccatggggttgttcagtaacctgatgaacccggctgaatcttcttctttgccttaacttcttttttctctggcaaatcggtcggctgttttgtcctttttgttcatattctattctcgcctttcctctctttccttaagcattctcaagcctttttccttatcagccttttcaattgttgttctttctcttctgaggaaagtagagaaggatccatcttccatcttgcctttcgggctcgtcgttgtatatcaagacatcttcttctctccttctacactttatcctgtctcgttcatgattcttctgactcatgtctacttcttccctacatctgtccctcattaaatctaatctaactacttatccctttcccctcatcttcctaattctgttgtattttcctttcctccttccctctgcgtccacatgctggaaaatgttgttttcactcctttctcaaaaataaaggcgtatgtccaggccaacgggggatgtgttacatttctatgtcctatatcttcgtgtttcgtatctcacggtcttctataacttaaggttccaatgtttcatgtctggtgtgttttacacccatctttcttggaaggagagaagtgacagacgatcgtccgtttggctcattatcagccttatcaacaacaatatcatcatcatttgcgcccctagttgtttctaaaatttcctccgtgtcacggaatctatgaaactgaaaaaaggaaaagagaaggaagacggatctatggcatgcggcatttgttttagggtttcgtatataaaatcctcaagaggatgagcaatggggaataggggaggggcagggaagagtggaatgaagaggacagatggacggatggatgggggtttatacaatttgtagacctgagttgaataaatccaaatctatgacacacgtacgtgcttgaaagggggcatgaaggggaaggagaagagaacggagaaaaggaaggaagagaagcccgtgcgcatttgagtcgtcttgactactcgatcccaaaccaacgccttttcaattctcgagtaatcctggacgtctcggctgatgctcctccttctcccttgagaactgtcttgttttctatcgcccgtctgtttttcgcgcccagatagaagagaggaaaaggaaataaaggaaggaagaacaaaaaagagaagaaagaaaagttcagcacttgattttgcgaagaataaaagcaaatgaaaagtcgaaacgcaccggcctagataaggcataacatcttgaagaccaccccaggggacgtatttcaggacgaggggggacccttctgggacgaaggtgtttgcgatcgatgatgtcaatgcgtcgcacatgcctatcatacacaagtcaattgtttgttcttcaggtcaggattctttctcgttccatttgatttcctctttttgtaaaagattacgtctgaagacgaaccgtataattgtcccatggagactcgatctctgactgcctgggagacacttaacaatgtctttccgtcaggtccaacctggccgaccgcgagcttcctgtcaacgagaccggcgatgaccttggcgcaactttcctggttgtgcgaggcgatgatgacgcctactgtgggcacggcggtaccgctggcaacatccgactgaacatgatccaagagccagtccagaccggaatcgaaacaatcatcagtctctggcttctgctgccagactggttccggaccggtggaagcgtagaccgggtgttgtcgccatcgatcggattcgacgccgtggtaggcgcctcttacgagcttgacaccgagtgagtatccattggccttggcatgaatataagagtggcgcatgtgttccgggtttctgatgaagaggattttcaaaaaggtgaaggtttgtcagcgctttgtggaacgtagatgaaggggtagagatgtgaaggaaagaaaaatagcaagaccaaccgtcgaaggtaggcctggtaggttccgtagacaagaggttggacgtttggccaagattcggccgtgaccggaatctcaactgtatctgcgtttttcgtggacgaagagggtaactcgaaacccaactttccgatccaggacgaagagaaagaaccggtggtcgaggtagaaccgaggagggagctggagggttggctaggtgtcttgttgtactctagagataggatcgtttggaacgcgtcgattgccggctgcaagacgaaccgacaggatgatcagtatatagtcggaagaatgagttaaacaagccgaacgaacctgataccaagagtattctgcatcgatgatgactctgactccagagtgcctagctttgtttaaaattgtcctcatgtccttgtgaagcaatcgaagagcctcgagatcagacgtcgagactccgttcgagatgtttggcaagatgagcgtggtgtttcctttggcagtcatcaattcgagttctcgatctgtcggtgtctgcgggaggggacgacgtttgtgtaagatgagtgagtaagaccgggagactgttgtcagttgaagattttgagatgaaggagatgaagaaaatctcttacgccgggataatatgttgatgaggtggcatctggttgagctgctcgaagcgcgagaatggtgttcgacgcccgttccaacactgtgggatctgccatcaagccagactggaggatggatttgaatatggacagaatgagcgagatgggcgaggcgaatgaggcagatgacgtaaaagagaaaatcaagagacacaggggacctacaaacttgagggcaatccagctggaaccgatatcatgctcgttgttctttctcgcgagacttgcttcatatccacacacttcgatcgagtttacggtctgtgcgatcttcttctctgcctcgattctgctcgcctgaagttttctctgtccttcaggggagtcagccggcttgtctgtttggtcatgagactcctcatcagagacctcgaccgaataattaagcagcgtcccgatctggttccttctgagctgtcgaatggtgggcaggcagtcgaacgcggtttcgccacccacaaactgggcgaagaatgtgtgcttcaccgcgaacctgaccgatggaaggagaacacggggacgaagaagaaggtggaggtgaggatcgaaatgatgttgcggtgagcacgaggacgaacggtgaggcatcacaagacctagatctagaaatggagacctagagatgaagacctacatggttaaagaggatacaacgggaatctgactgagggtcgaaaggatggctggagagttatcgaccacccaagggatcttgctgaagaggagggcgacaacgggaagagcgtggaagaaggaaaggacataagcgaggataagcaaatgaagagcgacacacacacacatgcaaagaagagagaagacaaaacatagagagatagagagagaaaacgccgtctactgaccagcaggtatagacaaaccagctattcacgagctggcttgtgggcgtacttctcagttgactatctacgggtggtgttgaccagggtttgacgatttgttctgcctgcacggcattctccgactgggccttgtaggcgagaaggattcctacggttgtgatcggagcgagcaccttacctgcccgaatagagccaagtgaagccaagcgggacatgtgagctgggtgtgagtatggatggatgagtggacgagtatgtgagtgattgatgaagcgaagaagaaagaggaaaggaaaaaaaagaaacagattggctaaagatgaagagagaagagaagaaaaagaaggagaacacccgcgcgcttgccgcccgcaataaccgccagcgagtgactttgtatctgtgctttatcctgtttgtcctacactttgcaacccaagtgattctatcaggagctactttctattcggaattctacctattggttctatacagggagggagtagggtacaccgaaggcgaagcacagaaagacccaacagggaggtcgtctgcgttgggttcgattgagtgagcgcggtatctctgagacatagatatcgttatcctgtgaaggtcacgtgctatatctgtttgttatctatcgaagtttgcacagccctaaatgaagcgtgatcctgggcgccacaacaacgtgacgctgcatcatcaggcctgcgtaagtcattgtaaacaatcgagatagaaaaaagggttcgactataaatagcacagaagaaaaatgtatgacagacccgagatgttgtctaagtatcgctcagggctaccataggtgaatatagatggatagtttcatctatttctgaggacattcccgggcctgcccgtcttttcgtgtgcctgtgcccgtgcctgcgtgtcaagcccctgtttctgatccctagtgcctagttcctggtgcctggtgcctagtgcctgatacgtatccctgcccgtctgcttgctttccttctctaccatccgtttccctcgttttttctccttcttccttctccccctctcctttgtcttcttccctccgtcttgacattgctcgcttcctgcttcatcgcactctgcacacccaaggtccgagctcgctccaggtggtctcgttctagacggttttctttctctttggctcttctgtcggcctttctgttggctcgtttgtcagccagtctggttttctccccttcctctcattacgctcgcttgagaatccccttcctcgcccacttctcgctcttctcacgttccttccttgcctcagccgtcctccccctcccttcctc

SEQ ID NO: 3000 - DNA, 2944 bp, Xanthophyllomyces dendrorhous
tttttcatagaagttagaaatagggaaacaaatcaagaaagaaaagtcaaaaaaacaccgcccgtccaggacttctagaccggtaagtatctcccatacgcgtttaccgacgcatatactcatcgactgactcccggtccgtcccgaattaatcttctaatcgttcccgttacaacagctaattcctacctcgtcaccctcagaccacctcgtagcttcaccatggcggtcaccacccttcccggcccagtaggaccaatttcggcggatacctactttgctccctcaccgacgttcctcccacatcatcatagatgctcctcgtcccagtcgaccatcagaccaatccccatccaatcgcccagcctgccccgaaatacttctggtcggatgtctgactccggactcacactctgtacggacagtcttcctttccctgcaaacgacctcaaacgtgtccgctttccttgtcccgtgggcgagccagacctgttttcggtatgtgtttgttgctttcgtcaaaaaaacctggttgcagctcgtcctcatacagattttttgtacttgtctcttcctcttctcattccggacaatatcagtctactcatcacacatggtccccactcgagtacgatcgaacaccaatcgagccgccgtcagaagaggaacgctcgtgtttccttcctaaacgaggtgaacgttgcttctccgcccccatgccgtgcactcttccatccagtccctcacaaagcccatatccaaagtcctttatcctttcggactttgatccaaacgactcccccgtctggagtgaatcagaggaggatgtttgttcagatagtccggtcgatggccaacacgccgaaggcagtagcgacgatcacaacgatcaccactacgacattgacattgacaacgatgataatcacggcgatgatgatgaagagcaagacgaagacgacgacgacggcgaggcagtcgagagaaggttaagaatggcggccggtctatggggaggtagtgagagtagcctgtcggatggagacgtcggcgatgacgatgatctcggaagtgcggtggctcggtgcaaagaaagactcagactctggcgattgggctgcgaggagggtaagtcctattttccttctctctctcttttatcactcacgccccctccctcttcttcatcgctgacatcttttcctttgcttacccctaaaaggtgactcgtctgtgcatcgagagcgtcttgatgagacagatacctcagatgatcctgaaacagactgtgaacagaccccttcgtcctctaccttagtctttcctatcactatcactcgccaatccttctctggcttccccatttctccctctccggccgattaccatcccgatggctcgactcccactccttcctttcatctcgctgcctcgacccccactccggccttccactttcccttatcgaccagcccaacgtcggccatggcgatctctccctcggaagcatccccatccagccgaaggctcatgtgggcccggtcgcttaacaaacagttctccggtcatctcgacgatgaagcaccagccacaccttcagttgatggcgaacgccctccactgtcgatctttcctcgagcaaactggtcgtctgtctcggactccccaccgcccacaccagattgggatctgacgagaacgatgacgatacccgagccgtcaccgtcatcacagctcaaagagtctcccaacaagcttccccgcctgaccagaaccgatagcggtttctttccttccgccaaaccgataactcccagtttggaaacgctttctaccatgatggacttgccggattctttcgaatcttcacttcccctgtcacccgccgagcctgtacgccaatcgtatcttgttccctcttatccgtcagactcagcttctgtctcgttcccgacggccagcctggatccctcgaggcaatcaactgagcccttattgttctcgccttcactctccgtttcatcctctctctcgctctccatatcggatgattctctttcggaaggacaccccctcattcgtccatcaccacctgacctctcgaccttttcttgggctcatgctcttttccgagagaagactgactcggttgcagtcgaaggggatgaccgggtgtcgtttgacagctggtaaagcgacggatatcccctttttttccctaccttgtcgttttctgttctccctcaattcgtcgctgttgttctttcctccccttccattttcgatttctatccctttttcattacattcactttccctatacaacacacatacacacatcaactcacacatgcaatctgctcgcattcggtttgaggaattgacactcttctcccttctttccgacccctccctttcttaacccttacacgatccgtctctgtctcttttttacttcttgaatcaagtgcacccaacatacaccgtcatttgtccaatattcttcttttctctcgtctcgagcgagggtcttgtttgcctttttctcttcttccccttctgcttacttgcttgttcatttgatcattaagacttacctctttcgcttcgagtcccagtttcagttatggcgctctttttttttctcgttggtgaacataacagctcgatgggttgtcgaatacttgtcgtttgtttgtttgttctttcgttctttcgttctttcgttctttcgtgtgtgatggtgattgcatgataccctgcgcctacttcttttttttctctcaaagtggttttcgatacctttaccgataccaatatcgacaaatcagcgtgaaatatcaatcaatcgatcactaaaccgactgattgttagatagaagaaaagcagatctgaacgaaaaaaaagaagaagattatatgaaaacaagttgaataaatcgat

SEQ ID NO: 3001 - DNA, 6531 bp, Xanthophyllomyces dendrorhous
gaatgaactatcatccggtcgaccggtcggaaaaggtatattaaaatttgggaagcataatgaacaaaatgagaaacagaacaaaaacaaaacaaaacagtgggggatcaagcgtattatatacacgaaatgagcaaagatgaaagggggaaaaaggggagcagattaaaagaggagaatgagatgactggaaggaagaaaagaatgacaatgatgatgacaagcaaagatcgagatagagatatgttgttccaaaacttggggaaaaaaaagacttcttaaaggacaagatgggcttggaagtctagaatgaattgggaacgttcgtcaggggggatgccgattgggcggtttcggctgagaattgagagaaaaactattgttttccaccggtcccccagaaacaacagaaatggaagatcaaaaaaaaatcaggcgtaagaacgagtgttctctgatacagacatagctgcgagccggaagtcaggtagaaagagaacataccgaatcccatgaaggccaatcaaacatctggtttggtaccccactgacgagaaattcatctgaccaattcgaacttggtgtgccctgtaacccactttcagcttctccgctgcccgttcggtgcgcttgccccaatctcatctccatgttcgtccctgaccccatccctaagcctgaatccgggctttgaccagaaccagaactagatccggaaaccatgccgttctcgatcgtcagactcggtagaccgggcgttggcattggcggaacaaacccgacgagattgcccgtctttatgtccgggttgaagttccatcccgatcctgttcctaatactccaaagtcaaccccgtttggttcttgttcctgcccagagatacgtaccgactcggaccgagagccaccggccgggctaggtcgatcggaaggctcgatcgttccctgcaagacgccagactcgtcaagttgtttctttaacgcgtcagccgccatgaatacgcctcctccgggaagagatctatcggctttgaaagagacggcctcatgcaagtctggtcggttattccgaacgccatgggtagggttaagtcgtttgttgtttgcctggtgaggatgctgaccatgattaccaaaggatccacgaccccgggcgtgaggcgaatgtgcatgaagcgctgcgttgtacaagagagacattacttccaccgtctgtaaaacaaagcagagaaggaaggtaaagaagcggatgagatgatagcttctggaaagccaaaggagcaacaccgaaacgagtagagttgatgacttactctacgacggatactcatgtgttcaggttgcacagcggtttcccatctacggcacgtcccacttagcgttttgagcgcttccagcgccgccggatctttccttctagcccaggtatgatactgcaagaacgagaccaactccgttcaactgatgcatcacaactttgatctgacgaaagagaggggaacacccgtacctgaatgagcgctatcgaagtggccgaataagaggtcacaaaaaatgtatccaatgcggaatcattcgcatctagccaaaagatagcctctttagacaacgaaaagcactccgtccaggaggagatatcgaggcagaacgttaggtgtcgaggaccttcataggaaatccgctggtggactctccagctgtgacatgatgcaatggaaagaacgaacaaaattagtccaagacgcctcagattcggactcaagacgcctcgatagaacaggaatacatacaacaagaataagattgcagtataaaacacttgcaagagacctgatcaaactggactgtcagtgcactgcgtgggaatatgtacagaaagtcaaaagacagatacgaacctgcttgcagaccagtatgaggaccctgaaattgtaaagccggagcaagactagatcgccagaacctcaactctcttaacaggtcgttcagttgttggtcattcgtatgggctaaccccatcggacttgaaaacgaacggtcaaggaaacgaggaatatcagaagacgaaacgtcttgtgacagagatgaaagagcacatacccatagatcgtcttggtcacttttccaagtaagatgctcagtttgagaaattcgctgaggaaaagataaggcgcgccctggcaggccggatcggatattcgatcaggtaggggaacctcgaacggatcttttgtcgatcgttgaaaaggttcgttaagatcagcccgatgagaatatgagataaggaaaacaaagaaaagaggcacttaccgggtagaagaacgtcgcaatcgtgcagatcgatcaggattggcacacctaacgaggccgcgtaccatctgtccatgatgacacagcaactccatacccgtctcttcagctcgagctgagagtttcggaacgatggtcagacggaagagattttgatcagcacaaaaggcgacagggaatgctagagaaagagagaagcaaggtgaacgtacgaaagctcgttcttccaatcgggcttgatccgacaagtggtcggtcttcttgatctcatctcgatggagaccaagctcttgagccctgcaagacgtgttggtaatttgataagaggcaagtcagtttacagtctcggcgtcttccacggaaaagcctgctttgagagaaggtagaaaagagacaaagaccaagagaccgagatatgatggacacgtacattctgacggcaaccccgagtctgatgtttgcgaccgctccaccaaggttgacctccaccttgtgaagatcgccgacggtacttaggaccaaaagactctgtacgttgactagactgatttcactcagcacatcgttcttcttgataattccattgatgatctttctcaactcttggaagatctctcgggggatgtctcgcctggtagctgccacgccgcatatggcgtacagcaagagtggtggaggcgaaggaaggtcaagaaactcgtgcttggtaatgacagggaagagcggggaaatagtggtaaagtagatgttgagaagactttcgaacaccgccggggtcaacttggaagcgcctccattgtcaccgaagcgagaacaaggttgcttgccagcgaggccagcaagatggtcgccattttcttcggacgaaggatcgtaaacttttatcaatccgtcgccctcagctccgatctcatagaacgtgtggtgtttgagatcgtactcgctgaacgagcccgccggcaagctggcacttgaatggagcaagaacggaacggatgtcggaccttggactctggccagtcgaggcccttcgttagaggatctcggaacgatcttcggagggttcggtattgaaggcgaagggttggccggggacaagttgttcggcgcggacactgaaagctggtacgggctgtaagtctgagacgcgtagggcgacgcggccgaaaacgggtgctgatccggaaaagacgacggctttggcgacggatggattgagtacggatgtgaggctggtgcgtagtgaggttggtttggaacggccgaaaacgcgagatttgagatcccagaggccgacggagggaacgaacttgtcgttgaggagccagctcggccatgagtcacgatagccgaggtagacgcagaaggtgcgatagaagaggcggatgaggacccagatcgatgctgttgttgttgttgattaccaggccaccggtcatctgttggaggagatcttgtaggcagatcctcacctgaggtatcaggtgtggccagactcgacttccgttctcgggataggacctgggaagcggccgaactggtggatgccgcgacagctgccgctgattccgaacccctcttctttttgaatctggtctcggtgatgggaaggaaaaaagtgcattcaacctgggcgtttagacaatgcttacaaaccggaggctccgagttgggcagaatgtcgcatctggttttcgagcttctgcatttgtcgcaagctcggctcgttttcgttcgtttctcggcagacgattcggatggaggcgatccaggtccggtgagaaccggagtgagtacagagggagatatcactggcttctgcttgtttgacgaaggaaagggtgaggtattgaccgagagtgcaggcagagcgtcaatagtagccagctgcggggatgctattaatttgcgtttttttgatggtgagagcgagaccagaaccgaagcatccatttcagcaaatgatatgagcagatgcagagtttatggcaaagataaaggaggatggcggatgctgatggacgatggccaagcactggcagcactggagactcaagaacaaagaagaagagaatggaaagcaaggatatgcggcccaatgtctacaagatgagcaggctatcgagagacgacgatgagggtgtcgaagttggatgatggaaggaagtaaacgatgctgacgaagagagagtctaaaaaaagcatggaaaacatggagagataccatcaacccagtcgttgatctctcttcacatacatctgctgacgacaacgcacacaccgttttatcttctttctctcatgctgctgtactgtctttgatgaagctgacaagcgttgttgctgagccatatgtcgagcttacttccttcgctcgttggtccgcgcttgagacccgcctcttggtgatctgatcgctgacattgcaaatccacatccgttctcgagtatcgtgtgttccggaatgatgaccatcgcctgagtcaataagtttcgagagccattgatttgagttgccatgagagaatcatcaaggtgagactagatgctgagagactgaccatcatcagttctctcgagcatcattcaaccctcattctgccttgcccgtccttgacacgtccgtccagtccttccattttctccttgcccttcaggccatgcgctatttcctctacactaccttctttcgttcgaacggtaccatagatactcgcggtcggccggccatctctctctctctctctctcgttacaatgtacccgtcaggacacatatgttgaacttgttttcgggtttgtcattgaatgaaccacgacattgcttcggtagccacagacgctggcaatgcaggttctcatgagcataaacagttcagtactggagagaacaagttgaaggatccttcattctaactcagttgaatcacaccgcaaactttgaatgtcggtcggaacacttcacaatcactgattcaccaaaagtcaaactgctgcatccaaccaaatggcttcatctctgatgctactaggcatgttctataatgttacttgctcccaccctcaacacatatctgtcctagtatgcgcacacacaggcagtatggtgctccttccatgagcaactggaaggcagaaaacaagacccggcctccgacggttactaaccagccagatacagatagcatatcctggccggacgacgttcacgttggcattcatccaatcctcaaccaccaggtcatcgcgtaggactcttgtctgattcaggcgagaacaagtgagatgccaacagaacggatgttcccaaagacatgcttcccggttccgagaggtaggtatcatccgctcgagttcttaccttcaccttgcaagtcagctcacataccatatcaaacacatgtccgactttcttccttccatagcaatacactcgtacgaaccatttataatacccagatcatactcatccttttgcgagccaaacaaacggaacgatatctggaattcgccgggatggaaaccgaaggctgcgggaccaagattcctccttccgaagagtgaagcggccgcttcaattcgaatcgtacctagaacaccggcagactttggtatgaaccgatcaggtttcttcacaaaaaagacgactagaccagcagaaaaagaaccgaaatcccaacctgttcaggtcgtcacttgtgtttgtctcctattcttcgcttgttaccgtctcgtaacgttgtttcctctctttctttcttagtctgaccagtctggcgattgcgttcaacagattcacctcttgcctcccgaactagattcgaatactctccggaagttcttctggacatccgggattcgcgttcttgaagcttggaaacctatcggaaagcggtccggtatgatccagacatcttttgaagatcaattcaaggcgctgcgtcggataaatagagaacccaggccatggggggtgagttttgaacacttatatgagtctctgtgtgttttgattttgatgatcctgattcactgattcattgatggttcgttcgaccttaaagatcctacaaactcaatcagcaggattggcgacggttgcgatcgtattatctccattagaggaatcatcgttcagacttgcctctggcaaattcagcatcgatccaaatagaaaagacaacaatgcgtcaaaaatatcaaatccatccacctcctcctc

SEQ ID NO: 3002 - DNA, 20806 bp, Xanthophyllomyces dendrorhous
tcctcctcctcttcttccagccctctccttgcgtccactctcgcaaccgccaaaaccaagcaaagcacacaaccgatagggtctccgttacccgtctcagtacgatcgaacgctccagaaccgaaacagaaggggtctgtaaaggccatggcaaagctcgaaaaggctcagaaaagcccacagacaaagaacgtttcaactcagaatgtttcgtcaaaaggcgattcctcaacatctgcagacgtcgtgttcaaacagaacacatcaaacgttcctcctccgcccaagacgcagaaaaggccttctgaaaccaacattgccggtaccccatcccgacctaaacccataaccagacagtctgataagaaacaaagggaaatgtctccaccgaaaatcaacaaacaggtcaacgttgggagtgtcgtaaagcaaaccaagtcgcctatcaccgaggctaaatctcgagttaaaacaccgaccgagaagaggacagatacgaacgacaagatagaacgagtcaagacgacgggcgaacaaaagacgcagccaagtgcctcatcaccctcactttcagccaaggaaaaaaaaaagaagaaagacctatcgatggagagatctaaggctattcaaaaggtacgactttctttattggaacttggttcagatgaaggcttcatcggctgagggtagtacaccgttctgtatgtcacacccccactcatctgtttatgtttcgttcaatttttcttgatctgataggttttgacgagtgtgtacaaagcggaccccaagcctgaagaaggggatcggaccagctctctcgccctctaaatcatctactggtatgttatttttattagtttaatcttacttttgtcaattctgcttggcgttgaccctcgctcgaccttcctgactgtttgtcgttcagaattctccatgaaggacgatcggaaatgcaagatcaagtttctagactgataccgggatatatagaattaatctccagagtgttcggacagctggcatgaagcgcagaaggaaatatcccatcgaatcacgatacaacattcggtgcggatctagatagacacatagtttagctatgtgggtggaaggaagccgactgattgtaagagtgtgcctctcggctcgggaagtcgaggaaggaatctatcgaatgtcctaaaggttaaggaaatcatcttcgtcttcgtccaaaagctcgttgacccatctgtttcatacatcgtgtttgtggcagtgaacaaattaaggaatgagaaaaaggagtatcagggacctgatttgttcatttgtatcgtgattgaacatgagccgatagaaaagaaagggggcaaacctgaagaacggactagctgggaaaccgaccacctatgatgttgaccacccatatacccaccatcaatgtagaacgcatcagaccaatcacatcaagcggctgacaactagagtacaaacgatagacgaacattgttgtaatcgccttcgatcttctcaatcaatagacctcccagaccctatacacaacagagttgattgattcagcatgtacaccagtcatatgacgcaaaattggatacaaatgaaggaaaactggtaggaaatgcatacctgaattccaaatccacctgctttcccctgatgtgtgtttcaaacagccgcgttcaacaataattagagtcgatccttcgagaaaagaagaaagcagagttgcttaccattccttcgttcgagtccactaagaatgcgagataaaatcaatcaatgacaacccagtgaaatcataaagacgaagaaaaggacatgtaagagaaaagtcttaccataactctctaacgcgcttactggattatttgcgaacgtcactaaagtagagcaggtggtcgaacgcatcgcatagccaggtgcgctaattgtgggaaatactgtatgtacaaaaatgaattacggctgagctctaagcgagtcgagacaagtcgggatcgaagaaaaataaaacgaggagaacgggaaagacacactcaaaacaacggaggtgataacctggcaggtttgactgttcatatcgagtaacattctcaactgtttcatcaatattttatacaaagtcaaattcagcttgatcgagtagattcacatatgaggaagcagatattcaaggcgaacattatctcctttcgaggagggtttctctaagatcacgctctccggtccaccagatcctgtacccagttcatatcttgcctgtgggtctctctgaggagggaacacaacgattgtatcggctatcaattgaacgatttacgcaagagaaagggtcagtgtcatgagaaggcttctcgatggtaggtttatgaggtttgacctgaaatcacaagttctggggcgtcttccggattttctcgaactagtctctcatagacttctctgccctaagattatttggtcacgacaagaaggagggttcagattgaacatgcgatctacattcgacttgaagggaagaacaggagcgcaccttttcaccggcggtcgccgttgggtaagcactcaggtcttctctgtactgatcatgcggtaaatcctcctcaaaagttgacggcacaatctccggagcaagtccctacattcaagtcagcaaacagatgcaatcaaatgcgtaagcttggcttacgatcagctcttgatagaaagtgattgagagaatcagacagactgacgagtgattgcaggatttctttccgccggggcgaggctgaggctagaacgacccgcttgttagccatcttgttgaaagccgggagggcgagcgcatgagggagcacggcttggtgctttgggagagctaccatgtttccgatccgatttatggtgatgaaagtaaggatgaggttgttgtctggccgggacgatgctgaagagcccagaggagctgacgtaatgggaagggtcactctcgtgcctgagttctgttcctccgctcagttgttgttgctttagcgcgctctactcacaccaatctcaacgggcgtggtgagcatgtgtctgtatacccataaggaaacctcgctcacatactatccatcatagaaacacaacaagacagatggtgtgtcgaacggaggggactctgaattggatggttacacttgctgatcactacttgtcgggaaggagccccgcaaaaatacacagcaagttttttcttggaatgcttttttgaacatcctaacggtcgtacccgttgcagcatacacacactcaccctcgcctgcagcccgcattctcaactcgatgggacctcctcaacgggtaaggtataactctcgcgctagagcctccacagctgggggctcatcccacaaaaagcgatccagatcgacggccgtcgtggacgagtccgttgctggtactaccgctgatggttcttccggaggagaccaccaaatggatattgtcgtcccaaaaacaaaagaggagaaggaagaggagaggaagcagagactcaaggccgaggttcgtatgatgttttctccctttttctttctgcagcgcgtatgttgtcaatgacccagcaagatctgttcctcgctcacgtacttgcacatcattctcaacagctcgtagcggcctcagagacgaaaatgtcgagtaagaagctcaagcggctggacggcttcatcgtacgtgcttcacacttcgtcggtcacctcatctgattcgttggctaatcttctctctttgtaccgtacaggccaagaaacttaaaaaggaagctcgtgttgagctcttcggaaaattacagtccgtcttattttgctccctctgtaaattcaataccgatcatattcatgaactgaatcgtctgtgtacctcttgaataaaacctctacctccaatgacagagcatcccaggcatcacttcctacatcattacttccttcgctcgcctcagcctcaacccttggttctagacatctctcttcccatgctgagcgagcggccaaagcagaagatttatctgtccgaaagttacttgacaagcagcacaaaaaacgaagactgaacgattcagaaacatctggttccggttctgaaggtgaagatgaggatgattgggagtccaaatttggagacactggtggagaggcagtccctctgcagcggtatattgctgaacccgaggacgaggctgagactcatgaagaattcatacagaaaggcagaccgacaagcggaattgatggggtgatggctgtagaaactctgccagcgacgggaaccgtaggaggtgcactcaagaaagtcgacttgggttccgtcgtcgttggaggggcactacgaaagaaagaggatggtggcgcgtcggtcaaggtcgtttcaatgaagaaagctaaaggaaaaggaaagatggtgagtttatcattatttgaagttcctgttgctttagcctctttcactgacctcgtcaatcttaaatctggacaagatgacatttggagcctggaaatcactcgataaaaaagcaagcgctccttcggattcatcattcgattcgtcagattcggaaatggatacagattcagaagacaatgacgatgacatgtctgactctgacgaagatgatatgtctgactctgaggatgacagcgactcagaggagaacgatgaggagagtgaggaggaggaggagatgagcgaagagcaaacgacgaagaggaaacgaaaggccacgaatttcaaagcttgggcgatccaacaactcgagtccacgtacaaacaagtcgatgagtcacctatcgatcctgcttctcttgctcgatctcaagctcgaccggcttacgaggaaggtctcaacttggtatctggttccgctctcaagacgcctgtcacggatgaaaacggccaatctgctgtcgaacccctttctaccgacttgaacaccgtccctcctccgaagaaagagtcccgaccgattccctcagtaaaaattggtcctctgggtgaaacccttcgaattcctgcttcatcccttcttgtccgatcgtcaaatcccaagaatagacaacttgtgaaccgaccagaggaacttcaaaagaagaggttggaactcccagtagtagctgatgaacaagaaattatggaaaagatattgatcagcaacgtcgtggtactctgtggagagactggatcaggaaaaacaacgcaagttcctcagttcttatatgaggctggatttggaactgctggtagtggtgcgcatttttctctacttttatttccccagggtctctatcccatgtaactcattctccttattctctatcgaacttgatagacaatccgggaatggtggctgtgacccaaccgagacgagtagcagccatgtcgatggctgctcgagtggcttctgagctctctctcccttcttccaaagtctcctaccagatcagatacgacgctaccgtgtctcctgagacagctatcaagttcatgactgatggtgttctccttcgggagatcgcaagagatctcttgttgacaaagtattcggttgtgatcgtagatgaggcgcacgagagaagtgtgaatacggatgtgttgatcggcttgttgagcagaatcgttcagctgaggaaaaaacggtttgatgaagctccggaaggtgccaaagtatgtgttcaattggttgtgtcgtgttttgccaaattttattgactttatcttctttggacttcactgtctatcgctcagcccccaccgttgaggttggtaatcatgtcggctacccttcgagtgaccgattttacactcaatacccgacttttcaagacccctccacccaccatcactattcctacccggcaacaccccgtcacagttcatttcaaccgacgaacaccatctgattacctaggcgaggccttaaaaaaagtcagcaagattcacactcggcttccaccaggaggtattctagtgtttcttactggtcaaggagagatccagacattggtcaagaatctagagaaggcctatggtgttaaggcttgggaagagaggaagagacagagagaaaaggcaaacctcaagctgaaagagaggaacaattggtggaaggaagataagaagacatcaaagaaggaagatgaggaggcaaagaaagatatgaagcttgttgcgaataatggttagttcatgttctcaggtctctcatacctgtcttattaatttcactaatgcatcttatattcactttaaccaaacactttgtccactatatcagccgacatggagatcgaagatatggatttcgcacaggagagggccgatctagcgggagatgtcgacgatggtgctgattctgatccagaagctctagatagcgactctgactcggaagatgaaatcatcttgaatgaggctgaatctgaaggtgagatatcttcgtcagatctatctctacaacctgcgccaatttcgaacaaattttgctgactctacaatatcggaatcttatctgtccttatctcgattagttccgatgcacatcttgccgttgtactcgctcttgccaagtgacaaacagatgaaagtcttcgccgaacctccggaaggcacgagactggtagtggtcgctacaaacgtagcagagacctcacttactatcccagggattcgatatgttgtcgattgcggtcgagccaaggagcgacacttcgatccggtgtctggcgtccaggcctttaaagtgtcgtggatttccaaggcatccgcatctcagcgagcaggtcgagcgggtcgaaccggtcctggccattgctaccgattatactcctccccggtctttgaaaactactttgaacaattcgctgaaccagaaattcttcgaatgcctatcgaaggaatcgtcctccaaatgaagagcatgaacatctcagctgtggtcaatttcccattccctacacctcctaacagggactcactagccaaagctgagaaaattttgacgctgttaggagcgttggaccccagtacgaaagaacgctcgttcgctacgattacccctcttggcgaagcactctcattctttcccgtttcgcctaggttctcaaagatgctagtgtctggtcagtcacatggctgtctaccttacgtgattgcctcggtggctgtgctagctgtaggagatccattcctgagagaggctgcattgggtaacgatggtgagggtgaagacgatgaagatgagtcgatggcggaggcatcggccgaactttcacatatcaggagcgcagagattagacagaaggaggaacaaagattgaagagacgatcattcttccaaactcaggcggttcgtttatctgtctcttttttccctttcctggtccgtttgctaccctccttgtaaagcgtcccggctgatattctctttcgctttcataggtttataactctctgggcaatggggcgagtgatgttttcaggatgctagccgtcgtaggcgcttacgagtacgatggcactggcgaaaagttttgcgccaaaaacttcatccgaccaaaggtttgtttgcatcaggccttgcttctttcgtaattacaaggtagctgaactgactgtcgtgatttatttctgtctattgacgtttattctcgtgaaggctatgcaagaaatacacaaacttcgagctcaaatttctcacatcgctcaagccaaccttccatctgcttctccttcttcatctatccaacctcttttctcgccaaaactctccccccccaactcgactcagctcaaagtcctccgacaacttttaacgtccgctttcatcgaccaagtagccgttcgaaaggacattttagatccatcttctcgatcggcaggtgcaaaattcgaatcaacaagaggagtagcgtatagagctatgggtgtggatgaagatgtctacatacatccgagctcagttttgttccatggagaacctccagaatgggtcgtttggcaggatgtagttcgaacgagcaaaatctggatcaaaagtatgtcctttttcctttgtccttcttctcttcgttcctctgactgaccctctgtatcaacttttccttttttgattggacgacttgctacttaaacttgaaaatagctgtaacgaaaatgaatccagcctggcttccatctctctccccacctcaatttatctcatattcaaaaccgctcgagacacctcgttcgatctcccaagcgaaactggtaggctcgaaggaaggagagactagggaaacgtttgtcattccgaggttccacatgtcagctcttgcttctggtgcagggttggatagcaaaggagtggaattgccgccgatgaagcgcatagaaatctggaagggtggtcgatggactttaaagtgatgttacagttgattcatgttctaggttccaccaaacttcacatgtttaagaatgtatttcatcgtcaacgattattcagtattccttcaactatgagaaactgaggtgtattttgttggtctacataaacagtacatctatacaaagaaagcccgcaaagcattgacatgaagctatgtcgacatgaacaactgtcgacaaccccttcattcactttcttttggggtcttttctccaaaaccaaatcctttaccgaacccactcttcttattcttcttggtacctgcttccccgaactcttcgttccactgcgattcagtcattgagagaacaaatcgattaagatcagttttcgataattgtaaaggtggaaaccatgcacaattttgacaagagtggtacgaaccttcctgagctgaggcagagatcccatctcctccgaaccagaacttgacgtgttttttaatgcatactcaaaatgccgagccataaggaccctcttcttgatttcctttttcgcagttttgccttctttcgtcgccgtcgtcgacatccttgatcctgagtctttcggtagaaccttcaacccctctaaatcctcttttggtgggttcttccaggtcggtatcttcttctgtcggagaacgtcttccggtgacccttcggtagtcaccagcggagtctcctggtcagatggatctaaagagcattgactagcttgattctcaggcttagaactgatcgaagatgttgaggtgccggaagaagtctctgatgtagaaagctttggagtattcgttacgcttgatgagctatcggaggccgtcgagtttgaggtcaatccagattcattcttggcagaaccttcgttggcgttttgaggtttggcccatggcaaaacgtaaagctctttaaccgcttcttgagcagccatcacacagaggtctaagagattgatgaataaacccgaataagttacttgaaggttactttacttcaggtttaaaagtcaagagacaaacgtttcagatcactacccgaataggtgtcagtgtccttagctaacttcgcaagatctacgtcaggtgccagctcttctgttttgcaaagaattttgaggatggcttatcatgaaacataaccactgttcagtgtcgacaatctatgatgcaacaacagattctagctcaccttctcgttccttcagtccgggaaggtcaatgagcaaccgccgaggaagtcgtcgaaggacttaatcatagataaataagattggtcaacaccgtagcccattatattcagtgatatcgtttacaatccctatctacgcacctgcttcgtccaaatcttgaggtcttcatttgaggaaacaatgacatttatcatgacatattagtaaacggtatggggagatatcttcacaaatcggattgatcagcttaccggttggtggcgccaatcaccaccagtcttgtgtctttgttcaaggactgtttgataggtccaacagatcaataattctttcagtaatagctagtaagacatcaatttaagatgaaacttacagcggaggaaagtccatccatctcctgcataaactcagttaatacttgacgtctcgagttgtcaccagtgcctgccgatccagttcgagtctaaaatttagataaaccatcgtgaagttcttcaacttaaagccgtacggtgaacagcacagtagatgaacaaaaaacatacctggaaaagtgcatccaattctgtgataaccatttcaaattcaatgataagtttagcgtcccagtcagaagaacgtacattgatccaacagaagagaatggcaccaaccatcgatgaatacgatgcagggagacaattttcgagcgactgtgaagacagccttgaccagctctgatgagcacaggaacacgtattggtcagcccgttctgaatgttaacatttaaggttgagaggtagacactcactttcggcttctccgacatacatatcctgaatagcacgaacgaaattagctcgatacaatagatcatgagaaggaagagagacataccatcacatcagatggttgaatggacatcattcgcgctccacttgcttttgccaaagctctaacaagtagagtctttccagttccaggcgggccgaataatagagctcctgatgatgaatgatttttcaaaactgagaaacaatcaagagaaacagcgtaaatcgagtcagtatttcctcgatatcccagctttatgttgacttgataataaagaaaaccttcattgactaacttccagtgctaaacgcttccgggaagagaagaggtaaggagactacactcctacggcagacaataaaaggcaaatttacatcgggttagtctcgaagatatgatgatcgatgcaagaccaggacatggaagaagtacgaaccttatagcatcgattgttttttctggcagatgcacatcgtcaaacgtttctttcaccaattttgggtcaacaattgttggcaagattctcttctcatacttgtttagagatgagtccctcttcagtgcttcgatcacataatcctttccgtcctttgcatctttcacttctcttaatccctccacaggtagctttgggtttgtcttggatccttttactgatgcatcgacattttcttcaacctctttgactggcctggcgcttccatgtcgagtctcgttttcgatagcgttatccgtaacctctttgatcccgtattgaggtgatgcctctttccctgtaggaaaatagtagagatactcatcgaggctggatgtctggtgagcagcaaccttgtgcataaattctcggaaggcttccgcttgcccctggtgatctgagcgagcgattaccgcttttagaacatccttccatccgtatgtcaactcattgagcgaaagtcgatcttcgatggatgatcgagtagaggaactagactcagatcgtttggatgaagtgggcttggttggcggttggcgcttgagagacttgtgatcgatagacgctccagcggcgatgcccgagtaagcaacgacgttgtcccaaggaattatcgtttgcttggtctgtttgatgaatcgatttatgaactttgccgcattcgccgctcgttcctgaaacgccagcgccggaggttggaagagatggtgaggggtatgaatgagttcttcttgaatagaatctttacttgcgaacaaatcggccatcggctgaagctcttcgatacttcccgtgagattcgctttcgaagcgacggcgcctagcttgaagaggatttcgttaattttgaaacggatgctttctcgttggtgtgtttctctcttacggttgacttttgttggcaggacatttacaactctccaaaccccgtgcttagacttcccccggcccttttttgaaccaagctttctgcctcgctcatcagatgggaagaaagggctgtcgccgcccagaccaccgagcccagagagattgatccgaaaagcaactccttcttccgggagtcggtccatcccaggaaacaacgggaattcaattggagccaagggagtagttgaagaggaagggtcgacaaaaccaggaatcagatctccccaagctccaatagtgaccttttccattctcttctgcaagaccgctgttcgaagcccttcttcttctccctccggaacgacgtttgtcatttgatcgcgtgacatgttcaaccgctggatcggagtctctcgtggatattcattgaattcctcaggtagttgcggccaggagtgattcgaaggtcgtttgcttggcgcagaattcaacaccgatggacccaagccaagtacgatcgtagctggtgcggtatcgtttctaaaagaatgaacggcgtcggccagagcatggaaccatgatgatcgttgatcttttgaatttcttgttcctccaaaatcatacgtgttcttgagaatttctgcgttttggatatatataattcgaggcttgactggctccttggcagatgcttttgagtccacacttggcggtttggaaacttgagaccggactagagactcgaacaacatctgaactgcttgaggcagctcgagcacagaatatggagaaaaggaatttgatggagatactatcatgtcggtcgactgtgatcgagaatttgaaaaagtgagctcgcttgaagcaacacccaagtcgcccaccggatcacacgatggtatacttggttcgaatcgagtcgcctgtgttgagagcgcgttttcttcatcgtccaagtgcgaccggaaagcatccaagtcgatttctgtatgcagagactctctcgacgccgttgaagaaggaggagctggcggactagcgctcattagtttgaacggattgctatccaagggcatgatagccatccctgttcctagaccgtcaccatgaccttctgaacacaaatcgatggcatctaagaagacgacttcagcttctatctgagcagctacctcctccaccgctgcagtgactacataaccgcctccatcgatcgggcaataacagcctataacgggctcaacccgaccttcgtctgaatcagccgagtttcgctgagcgtagtacatggactccaagatggccgctttcagaactgagagattggcatgggttggaatcgcatcataggcgatactgatatgtttaggcacctttggtagatttaacgtcgaaggttcatcctccgaaacaggtgcgtagcactccggcatgaaatctggatcggatgaatatcggccctcaagcgttctgcttgaaggagctgtcacataaacatgagggttgtaacctttcaatgacaagctaaggcttttactgagtgagaagcccatcgagcttgtcatcgagaggagtcgtttgattgagtttgctgatggccgagaaggattgttcttaggtttcgaaggagtcgaagacttggtgatgttcgtccgagggaaggccactaaaggtgaactggagaaggacctcctagaactaggaagacccgatcgaatctgggccaatatcgtccgacgggaaacacgacagggtagcatgactatattaaaagacgatcaagatgaacagatcaagattggcttcagcaaggggttctgtttctagataggttagacaagtgatgcttctcgactctgttcgctctgagaaaccaaggccggaatttacctgatacagagaagttatatcagaagaagacttccacaagaccagtttacagcgaagaagaagatgagaaggagagaaagagagaaagagaagaagggaaccgatagaaaggggtgaagattcctgaatggcgacttgatgcagacgttgtgattcgggtcctggaaagacagtcggaccgatttctatcgagatgagagtcaaggccaacgtcagaagagtgaacgtccaaaggaaagatgatgggcaacgccatgctctcacaaagaaactggaatatatatactttgtcaggtttctatggtcccacgtatgcgatgatgttgacgagatgtgggcagtcacttggaggaggtcgaagagagcgaactgaatacagcgagatcggtgtgtcgtcaacatctcgtgggagtaacgactgagtcatcaatattaataagtgttatcatcatcttgcatgtttccgtcgtttcaagatcaatgatcatttcaggacccatcttggtcgatggacatcaaatcagatatcgtctcgtttcatggttgatcataaaggagttgttggacgatcaagacccatcagaagagttgtgttagatgatagattgcgcgcatctggtactttcaacgcttggcacaacacagatctagaacgagttagattacaagtggataaatcgcaagaagaacaaaaattcgaagaggagggtaaatgatcccaatagaggtatgagatagaggtataagaacgaaggagagaaaaacgcaaaggagggaattgaaccgaataaagaatctcgctagtatagagaacatacacaaataaacatcaagcctgaaagtcggaaagagcacgaaatgaacaaagatattgaaatgacactaccgactgtagaggaggacggtggggaagagaacccttcggcatgcacacacatacaatctgtcaaaataaaaggccagcaaaagaacagagacaaagaaaaaatgacgaagctttccacaactgctcaagatgaatcgcgggtctcaaagaaaccactgtcgttttcgttcatccttactctcattttcttccttgcctttcctatgagggagggttcggccacctcctgctcaccatcgccatccgactcttctctatcttcttccttcctctctctcttctccccaggcttaatctcgctcgtcttcacatccccaaataccagctcagtacgcccaccagcggcagccactgtggctaacatcgaccttcctactgcccaacttccccttcgcttctttccactttccaggaacaagcctcctccggcactaccccctgccctccctggtgttgcgttgaacttgataccagggccgccgccgccgctgataccaccgtttgcttcctctggagtcccgaacccggcaccgacgtcccaagtgccaaatcctgcaggagtagcaggtgcgagacccaaagaccttgtcaagctaagtgattgcggtgatgaaaactgatggcccgaaggaggtgacgacgttccgaacggaatggattttgatgtcgaagacatcgctcggagagaggaagacgaatcggccaaggacggaccaccgagcctaaccgaggacttggctgagcctggtgtgggcctgaaaggcgtcctggtggacgaaagcgatggagtgtagaccagggtggttgaggacgatgatgatttgtaaggggtagggaatatagtgggtagtgtgacggagccacccaaagaatgaatcaacggtgtggttgccgtgatagatcttctgggaggtacctgaggtagcgcaaacacgggttccttaacgacctgttcgcccaactttcgtttcagcgtgttaactctatgagatcggggcgtcgaaacattgctggctggctgaggcgggctggaaagacagccccggaaccgaaactcgtccgaacgatcagatgaattctcttcatcttcaccttcagcatcactgtcacctgctggctcaagacgttctcgttccctggctccactcggtcgtccatccagatcctcttcatcaaggtccttagaatccaaccacgcaggcttgacaacgacgactctgcctagactggttgaccgaattgagggcgtcggagtgccgatcactccaaacggagctctcggctcggccggaccagcgcgatctagttctctgttggaattcagtgatgtttggggaaggccgacaggagatgataaatcctggtgtctgctcggcctgtgagatgtttgtgtggtccggggttgggatgcaggcgagtcaggtaccggcaacacccaactacctacttggggccgaagggaaagcgagtaggctccggatagatgaggtgtactatgtgaggtcttcccggaagaaggaacgggcgcaaggatatcatctgtcaaaggctctggaggatgacgtgaaagcgatctggatcgggctacagacggtcgaccaggcggaaccgatggagattgagggtccaaagatcctccagatgttgatctcttcaaagcgaacgggttgttgtgcagacgatgtatgttttgagaaggaggaagtgattcgtccgactcggatggatgtttcttggacgcttgaccccatggcagatcctgttcttcatctccgttctcttgcaattcatcccctcgcattcgaccgtcaaccctatgtcggtctctacgttgttctctatcgataccgtccggggcgtgtccgttcctgtctgttctttctgccgactcgtcaaacttcacaggtgagctacctgtcttgagctgtaacaacaattcagccgccccatcttcgacacctcccgtctcggcccatgaacttttgtaactccaccctgcgacgtctgaaggtcctcccgaaggaggatttgcccatgggtttgctcctccagtattcctgatgccaaggtcattggattcagacgctgttgttcgaaacgcgtacgatggtctttcgggcgatgctgcggccgaggcaggtctgactatcatgtcgtacccattcgttccagtcttgacagaaaattccaacgccttcgctaagagtggtaccgaactctgacgaatgatcggtgcgggtgccgtcagacgggatccgtaatgttgaggatgaggatggacaagtgaaatgttcgttgaagaggattgttcgtcagaagactgcggatggtgatagttgaaggtgttgtctggagatggatatatctgagcggacaagacagaagaaggcggcggactcatacgtgatggaggcggatagggtgaatatgggtatgttgtggatgttacattgatctgtcgttctgtgtgatgaggttggtgatagtgggtcgatagagtcacttggtgaggtgggttgctcggctgagaaggaggctgtccgtaggtcgcttggaacgcgggatgatggggatagaacgtagcgaagccgggtgaaggattgtgccacaccctttgttgatgaagttgttgatggtcagacacttgaagtgatggatcgtatgaggactgctgctgcgacgaggaggaggattgaatgaagacaggctgaggggcatattgctgttgttgttgttgctgctgctgctgctgctgttgctgttgctgatcgatagaatctcgtgagaagtttgaagagggttgttgggacgtatagtttggttgaggaatttgatgttgccatgaagaatcgtgtgagtccggataagatatgttttgatggaaaccagaaccgggtctgttggatgtttcgccattaggatagtaccctgtttggtttggactccaatcctggctagatatgtaaggttgggagtggttgctggaataaggatacgattgctgagatcctccaaacgagttcttctccgttaacactgtccgcgtcgaagtctgacttcttcgaaactctacttcatcgcctagcgcatcgagcgaggcccctcgacctttgcccttaccaagtcctcgagggtagttctgctcgtaggaaataggatattcacccccagaagccggaggatagtcgtatgatagattgccgtctgcaagatcacgagaagtttcgtcagaatcgtactcatcatagccgatgtccgatcccgatgcctgggagtcaaagtcggacgagagggctgctccttctttgacagacggtaatctagaacgagcctccgcactgaaaagagaagcatcgtcgtcaatagatgatgagtttgaaagcatggcaatttcaaaagttgtaccaaccgtttccgtttagcccagcgtctcttactagccaatgatcttgctctcctctcttcgtccgtcttgggccgtcgatcgtcaactgtatgttcaagtaaaacaagaagtcaatattgctgatgaatagaaatgttcttgccgtgtcgaatcgatcgagtaagaggcgaggcatatacctttgtcccatctggttctacgaggttgtgctgataatggaattttatgcttgtctgataagtgacgtctccatattgagcctattgttttgaagaagagagcagataccggttttccttgatgattagaccccgtctgtattctggcccgtccgatgtgttgtggcacgatagcaagccaaaggggatgaacgactcacgggcatgcttccctgtgtatatcttgtcacaaacgaaacattcgtactctcctccttccttgcctgcactcggattgaaatcaaaccaccttccttgtttacctctgacaagttgtctgcccgagccctcttcgattcgaaactcaaggtcaaattcggtcccgtccaccatgacgcccttctcgatggtggtgagttctatattggatttcgatagtttcctagacatctttggctttgaatgtttcgagcttttcgacccaaatatcgccgaagaggatttcgacgagcctgatgaacggggtttgccgatagacgcaacggatgtgggatgtagaaacccagagatgggtggtgatactgatgttttcatctgagtggaaactgctgctgccgttggcgacgatatcaacgatgggtttgtcggtgatcgaactatagaaactgctgagagaagaggctgggcaggatggatggagggtgtggatgggctgggcttgaaggtcgctaagtcggactgatagtttggaggaagaggcgaaatagatgatcgagtccgaggaggcatattcggattagagagaacgacgagagaagatcggatggaccgagagagctgttcgggagaagaataagtagaagagaacgattcgcatgcgtttcagatcgctcgcatcaagacaccctcctgatgagaacacgaagagagcgagaagagcgtgtttgaggatgagttcaagagtgaatccaagcaggcagagagaattgttgtttagcgggacgaagagtaaacaagaagaggcaaaacaacaaggatttctttgttttattttctagtttgttattacgatttgtgtagtcttgttctaattattttcctagtgtcttttctttgtctttctatacctgttctatctgcaagctcactagcatgcactgagagcatttcttagatcgcagtgtttctgtctatgtggtcgtgtcgagtgtcagaagggtctcttgatcaatcgcagtacccttcatgaactgtttgagatgacgctcaaaggatccctccacctctttctattttctcttttctctcttctctcttctctcccctctatcgggttttcgatgaatgcgacgcgtcatacgcgctaatttaccaagacgcgtcggtttcatcggctcgctcaaacacatccatcctggtatctggtcgattcatagcctcgacaacggctgtatgcttgacgatcgttctattaggtctgagcttaacccaatcttcgcaacacgacacctccttctttcaagatctttgcgctgacttcgtccatcgcgtacgccagattatacaccacttcggacactccagactggacgatcttgatcgcacaattcaagcacggacatctgttcatgcacgcataccggcaaatttaaatcgtcagatcacacttgaccaagggaacacaaaggggaaaagacagggaaaagcgaaatggctaacgtgttgcagtacaagatcgaagatgatccgacacgctcccttccagcttccatcagtgcattttcctcggcatgcaaacagagacacatgttgactttcataccagatgaaacccaaggatcgtatgcacacgaaaaaaaaatgatatcagagaagagcagtgaaaaggtcacaaaacagggacgtacgtgctcctcctcgctcttcgcctttgttgcaccgggcgcatcctccctggttacaatttgtcatccctcgaggtgtgccgttgtatcctgtagacacaatacgcttgtcgcctaccgatatagaaagaaagagagagagacaagtggaccgatggaagaacagattagaggatcacgagatgatattgacagaattggcatctgaagacacgcacggacaaggatacaccccactcgtctcttcatgcaattcgatcgaagcgaagccaaagaggctaacgtctgatttgggaatagccgaataaacaagcgttggtctcatttaaaactacgacagaaaccaagaaaaagagagatggccataccataaagtacctgtcccaacccggtcgtaatcgttctccgtcttctaaatctatcttttctagatatgcccacagatcttccagcgtcgtatagttgttgacgatggtcaacccagatagatcgaacagttcctgcacaggcgcctgaagagtaggctgaagagtgagtgatgtcgcgagggaagaagagagcgacgtagtaggatgaccgtagaggcttagatcgtcagctgtgataaacgagggaaggtccaaacttatcggcgagcgatgggcaactttcgatgctctaaagttaagcgaagagatgagaagcagaccaggatcttcagccggctgattcatttcgcttgacgatgaccatcctgcctcttcagctcagacgatatattctcagaagaatg

SEQ ID NO: 3003 - DNA, 47377 bp, Xanthophyllomyces dendrorhous
tatattctcagaagaatgaacaaacctctcgaatctgaccatcgttccgctcttcacgccaactaataagaaccaaggtctcttgatccatccttcttggagcacgacggccgacgtaagatctgtcgtgaccgcattctgcctccatgtctttgtggcagtattaaggagtgagcatgaatctgagaacgttaagacattcttcgagaatgactcgcccggcagaggagacagtgatgttggctctcggagggaagggcaaatatcaacagatgtaagccttgcgttccgaaattgatagtggacgtctgcagctcactgtatttccttgatagttctagttgcagatgagagacagcacacacgttcaatccaaccgacgtcgtaagatagatgtctaaaaaataggggagcgtctgaaaatggatcaaaccttcgacatacctgatcgatggctatcctttggaagcccttctgagtctgtaaccaagtagcaattgtatctcttcccgagaaatctaagcctacgagcgctataaagaccattctatgtatctatgtatatatgtggttgtgctattgttgatgtaagagatctcagtctccgggtctgtgtgtatgtgtgaagctgctgaacaaaagaaaaggttgaatgaaacgcgtcgcgtgcgtgatgcgttttgaatcggtcagtcaattgtccttcccctttgatccgtttggtgtttcatctggtcaatccttttcttcgttgatctctcctctttcatctttccatctctatcaattctttttgttgtcggcttttcctgcctctcctattgatgaaccgaggctgaatcttgccggttgttgtacgctgactgggcagctcgttgaaagaccgatacttctgttaaagactgacgagtagctgactgaccgactgtacattcttccttcctttcttttctctcgagacctcaactttttctttcttttgtctcgcttgtccgtcaattgacttctgggtgttcgtcttccaggatctttttcttccaagcgcactttcttctgatatcctgatcaatcgacatgaacaagttcattcctattctggagacgagcctgcctgggaagactgaggcaaagaaatcaaagagctcaagcatagctttcgttgggctcaacatccttagagccatctcaacgatagccatattattggtggttgcttcaaccattgtcgtcatggtctcgtgagtgaacaccatgtcctttgttcttattcctatggcctcttcctgcacgtcaaggtgtctccagtcgactgaatttacgccttttcgatctcggtcatcttgatagtgatctcaaagcggtcaacgcctggatcaaggttagccgtacttttttttctcttgcgcaaaagacgagtcaagcgatatagtaacgctaaagagccatggcgttttgttttcctgaaggctggatctccttcttctggaatggcgaactcgacatcatcggccaccttggatgggattgactgtcaagtcattgagcactccagtcagatttcatctacatacaaaacgcttgttcttccttgtaattatacctgacatcaacttccttgctttcatttgatcttctgatctgaagccatcccaaaccaaacgggcggaccgttcttttctatattctatatgataattcttcttctcgtctgtttcgtcctgttcctatcggaactgggcggaccggaatacattcgcagatgcttcgagcggtacgtcttctgtgacttgcttgatcgcctggtgcttttggttttggttgaggtgcaaacgcttacatgcttgtttctgcgtgtcatcatcaacttagatatctgccgcctctcggtccagcgtacgggcttgccacccttggtttcactgaattattgtacgtgaatactgtactgtattctacttagcgcttgcccaatactaaaattgagagtttttgacggaatgtagtgtctcgaccgcaattctttcccatcatgtatccctgttcgctcagatatccgcttggattctgttcgtcatcggctgcgccaacttttgcttggttcgtcgaatcaatcgaccttatcctgaatccagtgcttctaagtacaggtcgtctgattttgtgttcctgctttcccaaactatgtttgaaaatataccacgtagggctacattggttctcgggtgaaggcgcaacgacagatcttttcgtttgagaacctatctacattgacccctcaaacgtcagccgcatatggaacttatcaagttggacgggcgtaccatcatgatcttggttccccctccttcgcggacgtcaaggacaaggttgtctctgcgttcggtcggaagcacaggtccgtcgaaatgaacgaagctttggagaacggaggtgaaaacaagaacaaaataaaggcgaagcaggagcgggtatatgtggatctggagagtggtcgtccaaacgtgcttaaggtaggaaagattcctggagtctcctttggtggacaagcggccagaagagaagctggcactagcattcttatttgtgccgattcagaaaatggtacagacggacctggctggggaggattcggacgaaaggcagagcacaaagcaaagttgaatggatacttgatctctaaacctataaacacgatgcccaagccatgatgatggggtttgtctcgctgttgtatatttatcttgtactgtgagtttctctctcttgcttttcatacctcaggttgcgcgcttatcagatgtagcacttcatcaatagatatcatttaaccctaaaaggagtttatcacgtttatacccgttcctctctattttatcaccattcgaccaaaggacgatatttccttcctaaaggacagtttgacgattcttccttctcctctttcttttatgttcgcatctcgttcggcttcatctcgacatgtccattctcgtacaagaaaattctaatatgacgcagtagctggtcggctttatcggtttcttccgccagtaaagtcggcggtgttcggtaaaatccatcttcggccatattcgggcaaccatatggcatttgtcgttcaccgccatatactaacagagtagaaacagactggaagctgatatcatggtgactctatatgttcgtgtgtcctgtccagttgacttgaacttgttcaatcgaatcacatcatgagggaggatagatgaggaagagttggtgggaaatggcgaagcaaagagagattggctgacgatgtcagaatattcagctctattcttggggattctcactgataccgttcactggtggctcgttccattcagccagtcattttaccgactgacgagcttctcacatctcatcactggccatgtgtttgactcgaaataaagccgacaaaggcgggaacccttggttgaaatcatatatctagacgctatccatcctctttcttcctcttctccttcttactcatcttctcaatcacacatagccgtctttctcaccaagccgctctaatatcaacacttcaccccaagttaaatcttacctagccaaacatgccctcctctactaggtctttcccttcgcccatggtctctctttaccgagtaagtgttcctgctacatgccgttcgacatagccgtctagggcttcagaactcccttggcttacgccttcatttctatcgcgttggttcaatagccgccaatgatatcggcctccccggcatatgctatgtctggagctgtagccaccggctctgtcctcaactttttacgcaagccgtctttgtcttccactgggttgctaggagcaggcctcgtgtcggcaggtctgttctatggcggtggaaagggaacccaatttggacttgaagacggtccctgggtctctgcgggtaagttcgagattttctttcgttctcagaggcaacgaatgtagtaacttatgtgatgttctctcctcgttcttcttccacgatatgttcagccgcctcatcgatctgcgctgccgtcactgtgccaaccgcgattcgaaccctccgaccagcgccgatcattctctctgcggctgccattggtgtaggcgcgtactatatctatgaaggtcttgaggagggatggtagatcatcacaatctctcgagaatctctctgcatggttcatctttcgtcacttcctccaggctgttcttttcctgctttattctcggcttttctgcccattgtagatatctaggtagactatcgagcgatgcttgtctgcattgtataaaaccactccatcttatagaaatatcattttgtatcgtctgttaatcatcatttagatcgtcaatttttggagtgctctcatctattcttccgggtcatgctgtcttatcatcacaatagacatagcctatgatgagttgatgaagcctgacacttgttctgttgttggttgctaagaacaaagagacgacactggagaaattcgataggcagaagccgcgctagtgaacattccttagacgcgaccaaaaatcccaaaattattcagaatttacacccactttttctcctccggcatcatcactatcaggactgttcaacgaccaccttcgattcatcgtatcctgtcccttcatcgcatccgttcccccgtatgccccccaaatccatccctcagccagctaaggaggctcttgagaaagaacaagatgttctccaagcagtcgtcctcgcagattcttataaccatcatttccaacccctcacccagcaacgacctcgatgtcttcttccgttgtgtaacgtgccgttgctcgaatggacgttggagagtctggcaatcgcgggtgtgaaggaggtcatcgtattttgtacgacaaaggcagaaatggtcaaggaggctctcaagtacgttctgctctgttcgctgggcttcctatatgatgtttctcttccctcttcttaccctctgcgtccgatggtcgcatcaccttgtctgggacgatgacatgtgttgacctctgtctatgctatctttactcattcaaccggcagaaaatccacgttctctcgaccgtcttcgcccttgacaatcactaccgttgtctccccttcggccctgtcgactggagacgctctgcgagagcttgattctatgaacgtatgtattcattttgttcagcccttactgccgtttcttccttggttggcgaagaaacgattactagaaaattatttattagtcaagtaggactgatgatcgtggttttataacatactctctaacaacagattatcaagtctgatttcattcttctgtccggagacgtcgtctcgaatattgatcttaagaatgctgtcgaagctcacaaagagagaagaaaggtctccaaggactcgatcatgactattgttgtcaaagaaggtctcggtcgtcgaattcggtaagcctgatggttgaacttactctcagttcagaagaatataggctgagagttgcttgacgttgtcgtaatttctaatattggttctctgtaggccgataccatcctcgtcgctctttgttctttctcctaaagagtcgaaccaactgcttcattatgagcctgtgccagctgttcctcgaaagaagcgggcgcatatccctggaagtgtatttgatctcaaatacggagaggaagaagttgaggtccgaaacgatttgatcgattgtgggatcgatgtgtgcagtgtagatgtgagtcgtgtctcccccccccttatttccattgatatcagcgtgttcctaacgagagtgtttttggtctcactcatgcagatcccggggctctttactgaaaactttgactatcaatctatccgtgtcgactttcttcctggaatcctgacgtccgaccttctcaacctgtctcttcatgttcactttgccggtaaaggctatgccacccgagtgagtgatactcgaagctatgatgccgtcagccgggatgtccttgcccgatggacatggcctcttgttcccgatggaaatctaccaggcgttgaaggcgaggaacgatatgaattcagaaagggaggtgtgtacgtgaccaagagcacggtgttgtctcggacatgcaccatcggaccaaacactctcatcggttcaagatcccaaatatcttcgtcttgttccatttcaacttcgatcatcggacataacgttcagattcacccgtcttgtgtcatcaaagattcttatatctgggataatgctatcattggagagggtagtgttgtcgaggggtcaatcatcggacatggagtagtactcgggaaaggtacgaaagttggaaccggatgtttaatcggagagggtgtgaagattggggagggagcgaagctcgaatccttcacaaaggtcggacgaagagcttggagagaggatggtagtgacgatgaggatgatgaggacgaagacgagggcgaggacgatgatggattgtcaaacgacgctcgagctgccatcctgggaccaaattcaaaaggtttcatctggccgagcgatgatgtgtctgccttttctgattctgaagagtccgacattgaagatccttacgagtatcatcccaacaagcgccttctctctctgggtcgtcgactatccgatctctgcctatctgattcctcgggtacaatctccgttctttcccgagagtccactccagcatcatctcctacatcatcgacttctgatcttccttcggttcccaatttgacacttgtgatggaagtcggcgatgaacctcaattcagacttgaatgtctagccacattggatcacgccttcgagaagggaggcgctgtggatgatgaatccctcgatttcgcagcattgcagatcaaatcggctagagcaacgacgaatgtcggaccaggtatcgttagagaagtggtactgttttatttgttgagcaaagtggaaggtgtggatgagaaggcgtcgacagtgaaagtcatggcggcgagtgataagctgttcgagctctggggcccgttgttgtctagatttgcagagaccacctctgagaaggttgaggttttgcagttcttacaggtaagaatctactcttccctttgatttctctgatcgctgtcaggagacgaacgaaagtctaattttttttcttccaattttgattaattgaaaaattcccccttgaaaacgcttcttctttagaaaatcctcctggacgaatcagctcttgaatcatactatcgatgttttcaggtcgcgctctaccaaaacgaggtcatcgaccagcaaaccgtcgctgcttgggtgactcatcccggatccaaagatggggaggacatgactagattatggaaagctgctgaaggattcgtcgagtgggcgatggagccggatagttcggaggaagaggacgatggaagtagtgaggaggagagtgatggaagtagtgaggaggagagtgattgaagataataatttataatgccttgtttgatgaacctctgtacgtttgaatccctagtcattcgatcacacaatgaacaagattaccatagaagagcggtggacagcgacaatctatacgatccacaagcttattcgaaacgaggaggggggagggggggaggagcgctaacaagctgatgcgcttttgcatgtgcccaagttgaaaacggcttgaaccgcaaagaaaagaagaacgaaagaggacgaagagaagagggagatagaaaacttggaagatgggagaataaacacgaaaagacaaaaaccccacaggcgagacataaaaagagaaaatctcgcacggaaagaaacatcatactcaagcttcgttggagctcggaaacaacccagaaaattactcgacgctcacaccaacaaactatctctattctactgtaatcgccaatctacctgcctaacagataatcaatcgttgatttccttcaacgcagccaaaaaagacgccttcttccttgcataagcaaagcttgattcgctcatacctcctttatagtatcgacgccaagcttcctcttccgttactttttcatccactaccttccctgccactatctcaccatccgaagtcatcttgttcttcagcttcttgtcttctacaatctcgagtcctacctgttccactctttcgactttatgttcttcctcatcgtcttcttcttctccctcctccttctctagttcccccttctccatcttcttttcatcagccagtttatcttgaacgctcgtatacaattcttcctcgtcttgaccatcaatgacttggagattagccatgtactctcggacagcatcgtttgccaccaccctacaaaagccggttaacatttcgaccgaatacaaagagtcagtacagcgctcaaatgaaccgtcatgccagcagtttgcccgaaaagacaaggaacgaatggaataacgtacgattccctatcccagttgaggacttgcagaccatcaagagatcgagctcgcgacaacgcgacgtatgcttggcctgttagtagaagatggcccgacaatattagcattatgacgggttttcattgagtaactcggtagaataactcaacaacagaggtcgaaattcattctgattcaacccaaagtctcaccttcggcaaacatattttgaaagttgacctgcactcgattgatagtttgaccctgagccttatggatacttaaagcataaccaactgagatgtcgaaacatcggcaatacaaggtgatcagcagtagatctgaagacacaaccaagaaagaaagactaacggataagtgggagctgtcaaacgcaaagttcaaaataagatatggaagcgaaggacgagttattaggtcctgagcagctccgtatatccctcgataaactcgtacaatgaaaatgattcacgaacttgatatctcgccgccaaagtttgcttgtgcgcctggttctcacccggcagctcggtcatcctgtgaaccattggtttaatcaaatatagatccccctcgatctcaaccaccggatacaacgttgggtcatccaacctcgccctctttcttggttcgagatcgattgttacaacatcatcgatctcacgttcgagatcatcgaatctcctgtcatacaacacggtcggtgtgagatactcaaacacatcggctcggatatggctttctggtatttcgatagcgagctcatcatgttcgtgggcctgtctggtcgacataaaagagtgaacgacaccggttgttccgttgacaatcctattgggaatcatgttctatttcgatgtatcgacaagagccagtcatgagtttggatcgatgcaatgtttcagtcatttggtacatacccggacaatcatcacccgagctatacgacggatggttcaaagaaggggaaaaaagaaagtctcgcaaggtggtcaatcaccatgaactgactctcgaaataattcatcggtcacaacagagaagagaacaaaagaagaatcgaacctccaactttgagatctatgatagtgggtatagatggcttgaaagccgagctgatgtaggctaagtcgttccgacgattctctcgggtcgtcaagtagttgactccaacatatcggtgggtgtcccccgcgagctgaaaaagattttggaggttctcctcttcgacttggtttcttgttggtaggctatacgtcatgatttttttcaaataagagttagtttatcaatttgttattttgtcaccggaacaagtggaattcttaggacgaagaagagaacacaagagaaaagcatacagtttcgttaaggtcgtgtcatcttcccaatctggtctctcgagtgctctgaaaaactcgtccgtttccgagtcgactattccagaccggattttgttcagatgaaagatcaaggttggatctttctgcctgaaaatttgagtcaacttgacctccaacagaatggccgttttccaacaatcggcttggaaagcgtacttaatcgaagaccatgacgttccaacaggaggcaattggaagaagtctcccgtcctagatagaaaggagcgttcgggttaaagatcagtgatgaactggttgatgtgataagggggctgtagaatgaggaatagtacgccgacttacacgatcaactgaagacccccaaatggccggtcatctcctcgaatcgttctgccaacaaaatccagtttgtcaaacagatcaccatcgatcattgatactgtcataagacaagagaagaaagcaaacaaaaacgatcaacatcagtacggagtgttcgccgcttgagttcttgagcgcatttgatgagcataccttcatcgatgatcaaaacatctgtcgaagtccatctttttctcgccgatttcccttctacctctgtcaacttgatgatcatctcctcagccgttccgtctccgagacctattccagcccaagaatgaagagttgttcccccaatgttgaaagcagaaattccggtcgaagaagtgatggctacggtctgctggagttcccggaaggcgtgaacgagatgattaatcagataacttttaccggtacctgttgaatgttgaagcagatgagcgattctgtgtgagaccggagagcggatgaagcgggtgcgtcactggaagagactgaccagcagcgcctgtgaagaacatattcgttctacatggtcccgtagaacagagggtggagaaattagacaagaacgcttcgagattgtaagacgattaaaggagagagaaagacaaagaaccagacgaaccgatatgttgtcgcgtactgcagtaacattctctgctcgtacgacaacggatggatcaacgctcttgacttgtattcctctaacgactcctcttcctccgtcaacagagcaagcgtctctgtttctatattcgggtcttttaagagcttgctctcagaagggacatgtcctcgatgctcaaagtgcatcatttgacttggcgaacttggtcgttttaatcggatttgggtcgtgctgaaccgttgtctgcgaagccatgagtggttgagactttgttgaaattggctagagggaccatgggaaagaggcgaacgatatgaagttgaagagcggatgggcagacttaattgggagagaagcgagggagtcgataaggagctgatagttcgtctgttcaaatgaattcgttccatcatccatagaaagagaacgagtgagaggagtggaagagagaagacaaggaaatgacaataagaaacacatcgggtcatccacgacaatcatcaacacttgtcgtctaaccaatatagaaaaggctaggttgagagtaatccatacctaatcagatgaactgatgagaaatcatgaggtcttgaagacactgcgatgcctgtattcatcagcaacgtcgaaggcctgcttgagaggtaggatccagtggcggatcgcataggacagaagcggctcatgcttaatccttcgtcttttgcttatttcctcttcttttcttgttcttctgagagcacagcggaaggagaagaacgttaggccaaatatctcagcagcagcagaatatcaagaaacgcctcgacatacacacgcacacaacatacaatgggcagaacccatgcgaattatcagaagtgtttgtggattgaacccagaatgagaggttggtcttaccgtgactgggcggtgcagagttctcacgtgaggcttgcgccacaatctgccttgaactgtacgcatagatacattgcctttaagtatgcttctttgtggccgttgaagattcgggcatggctgttcgctctgatcttgtatatgtgttcttacaggatggagaggcgctgtccggagttcgtcgatagaaaaagatatatagaatagtaacccaatcgacaaccatgtatacgacagacacttttacaatcttatctgatctattcctttgcgttccttcaccctcatggctttttgtagtatccagtgggtacgaacggcattccggctacgactccgtcgtacaacttcttccggacctggatactgatctgaagatttcaaacgacggcgcaagcagagctttgtaagaaaagtctactttcgagtagcagatacagaataggattgtcggcctagaaccacaactaacctcagtccccttcttccaggaacctttcttgagatagcccattcctatattcttcttcaagctgactccgggtattccgctagtaacaactccaacggcctgatccgcaggaggaacgtccgatcccttgggcaatcgagggaacacgagcgagccctctctaaatggaggcccagactcggagagcagacccactcgacgacgcgtcagagtcgacggactcgcaagctgagcgagaatgatggatgcgccagggaagtcggctgcttcacgtcgtcctttgcctgtttgagatcgacataagcggatatgaaggaaaaccccaataaacaatcagacaaggctcggcaaatcaagaacagagtctctgttaaagagaacataccgataacccagctcagtccagcttccactggactcacgctctcatcgagatcgtgtccgtagagacacattccagcttccagtcgcaagctatctcttggtccaagtcccgtcaacttgacgtcctcgtgttctttcaataaggtggtcagccgaaccgtctccgcaggaggcagagagatctggaggatacagacaaaggtcagtaaacaacatctctcgtatttaggaagtgcgtgtggaagaaactaacttcgaatccgtcctctccagtgtatcctcctcgggcaacgtgaactttgaccccagatatctcaatgaatgtagactgcccaaagtagagagtggacagatccgttgacgtcaacgactgaagaatttcggccgccttcggtcctatttaatggcaataatgacattcagtctagcttgaacagatacactccaatctctcgtcaatatatgcacctaccttgaagggcgaccaaaccccagccatcgaggacctccatctcgaccttgcccttcccggccttctcccaagcctggatcttttccttgaacaaatgcaggtcctcagctctcctacccgcattcgtcactacataaaaagtctcgtcgttctcgtgtttggtgatgatggtatcgtccacgattccccctttgtcgttcaataggacgctcaatgagccggagaagggaggcaaagccttcagatcgctaggcgtgatagactcaaggaactccctagcagatggtcctcggaagtaggtttgaaccatgtgagacacatcgaatagaccagctttggtccgaacgtgggtgtgcgataaggacgctccgccgtcggaaccgtaagagagaggcatagcaaacccggcgaaaggaacaagctttccctcattcgcgagatggaaatcatagagcggcgtcttggataggtcatcaggctgagtggacagaacaatcagaaagggaaagttcaggcgtaaggaaatgctctaacgacttcacgagaggaaagagagaagaagcggaagcagaaacagacagagtcggtgcttgaagcgtaggacctagccgaaacgataggcgaaagatatctccaggcaggctggacgcggattgcccgagttggaagattccgaagaagagatatcttggaggattgcatcactgcagaaaagggaggacaagcaagaaggaaataaggctgagagacgaagaagaagaagaagaagaaagaaaaaacggagagagaaaaattggagagaatatataatgctgatggtgagcaccgaagaaagaaaaagcggtccgatggttatcaagcgtgattgcctgttagataaggcgcttccttctcctagcatgtcctagttcttccaacatggatggctgtgatcatcaattgaataaacacgatcatagttgaccattcgcatttggagctagatatgtttgatcttatatccagtatcatcagagcggtcaagaaggagaatgtttagaatccctggaagcaagatggtcgcaatctttggaacagctttcgagataagatagatgacaaccttcaactttccaacaacctcaactgttcgtcttctggaactctacatgtttcttcaaacacattcagaaccagcacgagtcaagttgctttcttccaagatgtatataaaacatgagaattctcgagcgcacacaacgataccttcttcaaccggcgcaatccctttcctctaatgaatcttacttattttctttcttaccttgcatctctctatttcccttcctctcttcacttcgaaagctttccctcaatcatgaccaacctcatccacccgaccggcatcaacagacaacgtcgtgttgtcagagccacgttaaggttactgtgagaaaaggggccattacgtgtttcagctaagcccacgttgtggtcacgtgattctcaaggtgcacatatattttgttcagcctcgtttacgcccacaactacataccacatcatgcccggcgctcatatggtatccccggaggcacacgactggtctcgccctcctggggtctcatccaacgtcaacattgatggaaacagtcgaaactcgaatcctgtcgtcccaagtaggagccgtcagacctccaatgcgctttcggttgatactcaaactggttcggaaggattacgctccgatctctcagtctcccatgaactagatttcgtcgatgacggattcgaaattgaagaggacaacacgatagaagaagaggaggaagaagaagagatgaacagcctgggcgacattgattttgttcggagacgcgctatcaaagccggaaaggaaagggcgattggatgggatgcaaaggatggagaagagtctgttggatcgaagaggatgtcgaggataagaggtacctagttcttctctcgtttctgttccttattcgacatccatcccatactgacaatacctctgttgtattcttcggccgcctcttgttccagaagatgctaatttggatagctcattcctgcctccctcgttcgagaggtcagaattcgaaactgtatgttttcctagtatataccatcagctatattgacataggccaatcgccttaacgcccaatacctgcgcttcactccagatcgtccgtcgtctcaagacacaaacccagcctggaagtctcaaaaggaagaaagtgggaggagctttaaatacagaagacgttggtctggatgatgattgggtcggtcctttgttgtagaactattcattcctccttggtcggcgctgatttctgattccacccatatatgttgcttgctctcaattcatactctcaggaattcgctgtaagtccggttttttttcttcgttctggttttcagtgtctcgtcctgatgaataataagaccatatgggggcttcacgttactacagggttggggctctgtagcatacattcctctttcgccttcagcggttcttcaagccgagcaaaaggtactttccagactagataccaacaaccttttaggtcaattcaaggcgacaagtgttgccggaaatgctgtctttggcagtgtcttctactcgtcagtccatcataaactctttctattctctgtgcgatgtatacaccagaaagtttattgttgattcaaacttcgtgttgaatcactctcattgaacgatagattgcctgcattgtgtcaaactggaaaagtcctctcgcctctctcaatgatgatagcctgcttgatcctgctcctctggcgaggaatcatggtggagcttggaggagcaatgcgaatcaacggaggaaacgtatgtatcaacccgggtgtgatcgccgtctcgaacctcttacccatgctcaccgtgctctcacgtttttatccttgttaacacaacatagtatgcatatctcttgagcgtctctggaaagacaatgggtcttgttggagccgcagtcacccttcttgacgtgtgaggtctgtactcgaaaagagtatattcgttgatgtgactactcgtatggatctgtcatagctgaagtcactctttaaaaacgtacagggtggccaccgggaccgtatcggctggaacggcagcggcatatatcaacggagaagcaaagaatttgccgttcaaagagtatctgattgggatcctgatcttgatcggtaggttctactctcgatagccatgtgtgcttcacatatcataagagaggagaaagaatccgttgactcaaattcagatgtacattcgttgttggaatcgatctggaatagtgtttaccgctctgctgttggcaggtgttaaggactcgaccaagttaactttgtcaatttgcttattccatgtaagctttctcaaacgtatctttctggtttgtacatgtcttctaatcagtcgtgattgatttttgattcgctcgctatcacttgcttggtattgatgcgtcatcgaataagttatttaccatggcccttctaatggtggtctctaccgtggcctggattcgagaaggcaacaccacactgttgtctaactggaatctctcagtcaaatcgtgggacggcggtaacggggcggtcagagcagtattcaatgggatctgtattggctttctgggcgtgactggagtagaatgcttaccgacgtaagctatgttgctctattatccgaagaggcgtgtgtaaatgcgttcaaggctaatcgacatacgttaaattttacatagatttatagagcaaataaaaccgggagtatactcaaaagcattgaggaatctactgtatggtacgttgctttcaacctcgtcctctctttgcaatccaaacctgttaaccgtatcctcgttctgcatccctcgatgtaggagctctcctcttgaacgtccctcttctcatcatgttgcacgcgctagtccctcttccctctcttctctcagcctccaacgttcttgccctcttagcttccatctcgacttctggcggtggaggccgatggctctcgatctttgttgtggtggatgcggtagctgttctctgcggcggcgtgctctgtgggggagtggcctgttgtgcgttggttgaagagttgagtaaagacaatgtgctgcccgagagttgggggcgaaggtgggagagaacacaggcaaactgggttggggccatcatgtactttggtttatgcttaggttagccgctattttcatcttctcttcttctcgtatcttttaatgcttgacgacctagttttaatgacttgatatgtttaaaccatgtctataccaactgggatgtctaacagcgttctatgctacggctgggttctccttgacgactctgagcaatattttctcgatttctttcgaattcatgatgcttcttgtcagtgctttttttttgtttatctcgtctgatctcaaagtcttgacactatccgaccttccgttgaatgttctgtcttgtgattttagttcgcgctatctcacctcttactccggataacgctccctaatcttcctatccctgctccattctgccggtcccgtttttcagtcacccttctcgtgcatgctctcatcttcactattctcatcgggaatgccttgttgaatccactcccgttgggcctcttcgcggcctatgcagtcggaattttcagtgtcctctggacggctgagattgggtttggatcgattctccgcgcaatcgtctgggcagtcgaccagagtgaaggaacaatgattcctaggggatcaggttggatgtcgatcggatttggaaggaaattgaaggaaaacaaggacggtgatgttccgatggaaaccaagacgagtaagcttggtgatcgtgagccagaagaaatggaagaaggagggaaaggcacaggagggaaagagaagggattgagagtcgcgctgagaaaatcattgatcaaaggagtcagacggtcgaaacgaaaggtgatggtcgcatggattaaagaggacgaggtttgtatttttgcctctttttcttttcttttccggatgagaagaggaataaacggtgtatacctcgctttccttcccttaaatgttgacaccctctttgttttttcaatcatccatagatttctgcgctcattcaagtagttctatatgttctagccaacgaacagacttcccacctgatacttatccacgcgtacaactctgtgagggacatcccatccgaattacaggctaattcaaaactgttggacgaagcgtaaggccacaattgttcatctccgactttttgagaatctttcaatcctagtttgctgatgtggtctgttgctcattgatgatataggttccccgctttgacgatagacttgaagttcgttcaaggaagtttcaatccgatcgtaagtaccctctctttttctgattgtctcattcatgctgacatctgtctaccttgacttttctgtgtttggactgaaatcgtagatcgtccaagcagtatctgatactttggaaattccacattcgagacatataatcggatgtccatcacccagtcaaggagatctaggctcatttgggggcgtccgtgtagctacattccggaagtgatctggaccgagttcattcccatgactctcttgctatttcaacatctttgcctatctattttctttgtcttgccttttttaatcgcattgctttgcattcggtaacctcgatactatctacattgtatatctatcatttcggtgctttctttctctgtctctttttctattccgacctatatatgcaatcaagtgggctaacaaacttccaaatagccagaaatctgtgattgtgacattccaacaaaatctctccacaaagatacattctgaataaagaggcacgacgtgagtttccacaggaattgaatctatacaccttccacgaatgagaagagggtgaacaggcaagcgcttgaactctaacagtctctagacgtgaggacctgtgtgaagaggaaaggactcatgtcttgagttaaacctgtgcgaatgaaccttgctatcggtgtccaaacaacgactaacaaattcagtccaaacagatgggcgtgagctgaaagagtccagccttctttcaactgatacactgcttcatatctctgcccccttgcgctcgataggctgtgtgatctttgaagggggatgtcggttatattttctaacgaagcggacagcacaagacaagcaggggttgataaacaccaagtgaagaagaaaagaagacagaatgccacaactttgaggtcgtcggaacttacgcttcagtgttctttcgatcttgagccagagccgctagattgacgactcgctcggaactaccgtctggtttgtgatggatatcgaccaagccagatctctcgactctgtcttccgaactctttggtcctgtctgttggggtgcttcggtactagatgacatgatggcgactgtagttgatgatggtttgtagtagaaagagatgtgaattgtgcttgggggagttaacgcgtcatcgcccacacgaaaccccacgtcgccagagctcgtccgctcatcagagactctcgctttacttctttctgccaacgatgagtcggccaacatacatcgtcttcaccaatcctccgacccgaaaggccgttcgtcggtatatccagagccctcctgagatctctgaacatccgtttaagcgagtgaaacttcaactggactggcacacctcggatatacttgatcctatcttgacggtttccccgtccttgtgtgatcatgctttagtcccttcaccttcatcaccccggctgacgcctgttcagagcacgtcagcacgaccaacctcggtggcttttgacgcggcttctggtcatctgaaggatgcccatgtaacagtagtagaggccacgttcgatgaattttctcgagaaggacgaagaagttcaaacaagcctcaagaggcggtgggcacagttgccgagcgcagaggacttcagcaaactctcggccttgttgcggaagacgaatcaaccaagatagcctcaagtgaacatacggaaccgcgaagagatggaaggtctgagacacctaaggatgaagcaggagacgtaagccgcgctctggaagaacagacaaagttgacaacagttctggacataccggtccagagaaatcaggacaaagccatgcaaggttcgttgttaccttctacttccttctctgtctctgatgtcgtatgggttgccttccttctcgtttgtttcagctctgtctcatctcttgcctggtgtttttcatgtgagcacacaacagaacaatcttcctgtctggactacgcatctatcattctgcctacgaatcaccaaacattgccccttgtctcctctgcctctaattcgaataacgatcctgccccttccgtggcccagccgacatattctactcaaagctcagtgccatacccagacatgacaactttctcttttcttcaccggactaggccaaggatagtcgaacctcatagtgatgtcatccagcatactactcctgctgatcgtccttctcgtgagaagagccaggaacaagaaaccgacaagcgacaagacgcaggagagcgttctgttcttcactctaccagactggaagagttagtggcggcgccgatagcatcgatcatgaatcgtgacgaatcgatcgatcaaggtatcggtccttcgactgacgaccgaccgagtaggctcgaagtgccgaacttgaggactgactcgacttcgattgatatgaattctatccgcgaattaagcatgacatcgttctctttcactgtcgccgccgatacatctgcagccgcctccgctgtcagtcccactgctgatgtcgacgacaccgtctctgaaccaaatgattccacgagaccgacagaaggacctcgacggacctcgaacgtcctgaatcttgtgaaggagtccctacgagagttgaactccgaagagggtttgcaaacccggtcctctatctctcggaaaacagcccggcaagcgacgcgctcctctgcttctctcctgacgcatgttgaccaaccattagagacttcacttacaactcactcaccctactctctccaatcatccactgaatcttcattcctccctacacaggccgacactcagcctcgtccatccgttccatcatccgttcattctgaaacttctatcgatcaagcatatcctcctcatccaaaccaacctcagaaagcccatcctacccatccctatatccattcaaatctccttagaccacttcctacattcggtcaaccactggatcaaccaaccgctaacttcttgaccgtggtcacttctgtcgaactgaaatccttcgtaggtaaggacggaaggagttggctcttgggtgaattagaattgtttgatggaaagaacgttgggaggttggtcgtttggggtcatcaagctagagaatggtgcgatggcgttgggatcagaaagggtgatgttgttttgtttgaacgtccgtgctacattatcctcttcttctttctttcattctttcgactcccgctctgttttgcttccttacatgaaagcatctttgtgcgttgactgacgaaaagtaaaaccccaacgcatgcactggtttgcgtgcgcgcgcgctctgatatactttatggattctcaacagggataacgatcgtccaacccaaaccaccctcgcgtatccaaactctccaagccttccctctcgaccctcaacaaccacgatcccgacctcggaatcaaccgatatcggcgtacacgatattctaccgaacatcccttcctctgcctggtgaatccgcggaggagtggggatcgaaaagagcagacctgaggtggagaacgtcggacacaggtttgggcttggtagggcgattgaaggattgggtcgagtctgccggtgtctgaaaagagggttttccctttactttcggggaggttcgtgtgacctctttttcatctttcgatctccactcaaggggaaaaacaggtcctttagtttacaggagagaggtcagatcgaattttgctcgagctatttgaccaagtaagtccgtccgtccgtcctcaactctatatagacagcaggttgaggcctgaaaaccagagaacaactgacacaatagttggataacaagatatgacaatttcattttatcaggagaagaaataagatagatagagaaccgttcagtgagcaacaaacgagcggacgagaaacggggcacagaaagggaagggagaaaagacgaaaaagggagaggaaaaactggcaccagatagaagtacaaccgacgatacatggcgtatcgacagataacaaggaagaagaggaaaaagagaaaaaagaaaaaaggaaaggaaaaaaatgaggatagacggagagaaaaccaaacgttgaggtgatgatcaacagtggcgagagagagaaaattgagaaggatggaccactacggatggcagaaaagcaaggatgaaggagaccagagagaggaaggagcgaaagaaagggagagcaggagatagtcaggagctcttaaatacaaagaagcaaacataaaacaacaaagagtgaagaaaagcgatatgaagtacggaagaaaaagaaaccaagcgtgttttctcaataatttcaaacaagagataagggtggcgtacaagagaagaagaagggggttgttggatctctcagtggaagaaccgtttcttcttagtcgcaccctcctcgacctcgatctttgcgtgcgtatgatccatcgagtgcccgatcgggaaatgagaacagcaagtgatccccttgatccattcgtctccttcatcactgtcatcaggagtaacggcctcgttcggcggcgtgttcattcctccgccacattcgaccccttcacactgacagacaagcgcgtcgttccctgttccgcgtagcagatcggccagagtgcaccgagcggtgggctcgatcgtcatcatcgccatgatcgcaggccgagtctctctcggcaagagccggaagattgagtcgactccggtgcagtcggcagcagaagctcgggcggcactcgcattggaggccgtcgtcttggtcgtcgtggtggtcgcggcggttgacgatcgacctggcgtggcaagaccgctcgaggccacggccggaacatcgctagaaggtaaagaggtcgttccctgttgggggctagggatgttccttccggatatgttctcaggaccagtcaccgatcgttgacggacagccgaatgcgattcaggtatagccaagccctgggtggtgggtgagagtgtcgaattggctagttggttgaccagccggttatccgtatctggtccgtctatcaattcgccgttaccagagggcgagaccacaccggatgcggttcctcctctagcggttttctcgacatgagaagcaaacctcgaggcaggctcactggtggtgtgtgccctcggtcgatccatatggagcacactagggtccatctcttccggggaatcctgaagatgataatccttgttgtccacagggtggaccattgagatcttcaaagccgatttcatatgagctttctcagccgcagatattccgtctcgtggtctggcatcaatgtagctgtcgggttctgtggtcaaatgagcctggttggagggcacactctgattggtcgataacgaagatgacatcttgagatgtgcaggcagatgggagcatataaccgtggcctgagtatttggcttagacttcgacccggcggcaggggccaagagttgcgggtgggtgttgacatagagctttttaagaatgagaacgatgcgttgcttcgtcagatgtgaagactaggaatgtctgcatcagagaggagatctgaaaataccttgtagcttgcatcggtcttggcatccggcaacttccaggggaaccgtctagattgccgagaacaagacaagtagatacacaccagatcaaccttagctaacgtattcgctcaggaaagtatatgttgcatagagcgcgatgggaaccttgatggactgacctcaaaatcatacaaaggaacatcacacccaaactccagacgtcggtcttcctaggatcgtattcctggccgctgagtacctcgggtgccaagtaggggtcactaccgacgactcccgatgctttgacttgagctttgcctgggtattggaacacggtggccgttccaaagtcaatgagcttgacaacgttgctcgtagtcatgacgcagttatcgagtttgagatcacgatgggcaagtcccatgccatggagatagttgacaccgtcgacgatctgtcggaacacgcaatagatctcaggtcgagccatcttgccagacatgacgaccgagaataagtcgtacggagcatattccatcacctagatgtacaccaggaggaaaaaaaacgtcagcaccaaagatgcctatcgtacaacagaggtagacgaccaagtacaaacctcataataatgcccatgatcgttcacgatatcgactgtctctatgacgttgacgtgtctgagtgtgacacccacacaaaactcggcggtgaccttcttctggtactctttctcgctctctcccaatcgctttggccggaactctttgacggcatagatgacactgccacctttggttgagcccttgatcaaccggacggttcctccagcacccgaaccaaggactttaccccactttccgtactttttagaaagctgggcctgggtcgcattcgccaacgaagggtgtgggttgtggtggtggagtgaggacgagagggctgtggatgaacccgggggtgttcctccaaagacaggggtgtgagttccgcctgagaacgaatgctgatagttgggatttagatgtttctgtccggcggtaggaagaggaggcgggttagagggaagaaagcgttgactagccgagcgaccaagtgagccagcaggcgaaccagcgacgctgcctgtcacagcggaagcttcctcgcggacttgcaagcttcgttctgggacttgaggcaatccgggagcgtttgtcggatcaaagacgtcctgcgaagctttgggtaccggccgattttctttagttgaagttcctgccgtgctcgcctgagtgagaccgaggacagaactagggggcgaggtgcgatccttgttcgagtgggcggctgaatgaccaaagtaaccggttttcttcgtggtggggaatttttcattcaaaggagattcaacatgttgtggagaaccgttggcggtcccaggcgcatgtgcgggtgtatcgagcgcgttgagatggtgcttgtgagggtggcttcctccgatatgggtgtggagaaaccgcttgaggtcgtgtagggggccggtgtgatgtttgacgggccgggtgacgatcgaatggttctgatgggtgggtgatgagggcctggtggacgtcgagttgtttccggttggcgtgtgagttggggagtgaaaggttgaggacgcccgcttggtgaacccaaacgtgcttcgtctggacggggcgacggatggagcccgggaaggcgctcttgaggatgtgaccgaatcgacatcccgacggtcggactgcggggaggaggggacctggagaaacgaattcgaagacaaagaccaggacgatgaggatgaggagggtggttcgttggaggatgaagcaaacgaagagatgccgttggtggacgttggcccagagatgaaggaaggatggttggcgagatcaggagaagagatggcgtgtcggcattgcaagggcgacgaagggaccgagggtgatttgcaaaacgacaggcggattaaggaacgagacggtttgagggttttggtggacgagggggatatgggacgaaagtcggatgggtatggggagagatatttcatcgttgggcgttttgatttgtcgaagagagtagaaaccccgggaagtgttcaagatacggggtgagaacgagtgaagcgacgaggaatgacggatcgaagatagcaagaaaggagtgaaacgaatgtcagtgatgttgattcagaaaacacaaacacagaagaagataagaaaagctcgagatggcaagaagggatggaaagaatgtccaagcaggaggtcgaaaggggactgaagctgggcgagatgttcctttcttggcagggaacttctgtgagcgttctatgatgttttgtagaggtacacacggtcatggacgccctgttcttttcctctataaggaagctggatggcggagggtgagggtttgttcgaggatggtcttctcgttcaggttgtttatcgtcatctccttcacccagactattgtttcttgaagggaaacatcaagtttgaccctcccgcctcctgcctgagaacgtttctggcccagtatgaagcatgggacagtgtcccatgctccttccttgagagttcggttgactcggggcgatcatgtccaactctctgtctttcggaacaacagatccgactatctggacggacaaaacggatacgaggaggaaggaacgcacactatcggcggtagccatctgctctgccttggcctgagtaaacgaactggatcgcataccgtccatctggtgtgcaggcggatggatctgggtggatgcctatgttgtatttggaaggaacagaccgaggtgttgacgaccgcgatagaataggaacgaggtaaacagaaaagaaagaaagaaaggacgacgatcggcgacagaaggggtaacccaaggggagagcgaaaagatgggtatatgcagacatggacatgaacgatcggtcagcttctccgaggtgacagaaaacttggttgaacgatgacatcttcaatctgtttgacccaacgtgcgaaagggaatgatcatctcattctttctctcgtcctttttatctgacagatgagatacacattctctatactggtcttcttctgggtcattcaagaatccaccaaggcttttgcgatggacgaatgtaaggatgggtctccccaacgaaactataccctgcttggccaaaagaccgggccaagatctcgccgcgcgtcttttcccctttttcttctgttctctcctttcgcccttttgagatgaagaagaattgggaatcgggagaagactgacctgaatcatgttttgacgttcgagttatatgatgtttgcctgcccacgatgatcgctttgagaaaatacgaaaagacagagaaacacaaagaaagaaagagaaagagaagaggaaagggatcaacgaagagaaagaagaaaggaaaagaacagaagaaaaaagagcgatagcaggaaaaaaaggccaggcaggaatcgaggccgggtacgaaaactattaggaaaatgatgggagtctattaggaaagcgattagaaggctgattaggaaaaaaagaagggaccgtttgcctgattacaaagcatgctcggccgggcaatgaagccgaccggcagccggtcggcagccgaattaggccgggatgatttaccccagaaggaaatatatttatacatccagcttcggagggaaccccacaggattcttcggcaatcttgttagggttatctaattgaccggcggcctttctcttgattttctattcctctgcttttcatcacgttcccttttcatcgaagaaacactagcaagcagcttgttgatggtaatgatgataatgatgatgatgacgacgacgacgacgacgacaggggactgtcagcaatgagaacaataatgctggtggcgatgatgctggtagcgttaaagcatccgtggctagtacaacacaatgcagaattccaattcatatcttgtccggccacctccttcatctctggccttcatccgcgtcatgtggatgatacatctccatgatccattcctttgaatctatttcacataccatcatatcagaaagagagccggaaggacatgttggttcttgtttcggacaactctctctgcgcaagctctgagagaaggtctggtggtgtcggttttgtttcggtcgggaatttgagattggttacatattcaataacacgtgattgtggcgacaaccgcatagcttacatcttacttctcgctgttacctatcacaggtaaccattctttgctcttgtccctcctggttctactacttctctcgctcttcactcacatcccccgtccgttcatcaactcatcgagtactggaccgttcggtctatatatcgacacatcagctcacgcaagcacgcactccctcctagaacagtccctctcatataaaacacgcacatacttatacacgcaaaagcgagaatgttccgttcgactctccgaccgacactctcccggtccttcagcacgaccccctcagtgtcgtatccccgggcaccgctctaccctccattccaaacgaccactgctcccagaaagctcgatgctcgactgcgatcgctacaagacccactctcaccaactaagcctcgagtatccgatccacctcggccagacagaaagtatccgtccgagctcgatcagccattgagaaagtacgcaaagccacaacgttccaaatgggatgggccggagagtgacgttcgggatttcaaaggtggaaagtgggccgggaaggaaggctttttggctgatcctcagttcgaaggcgttgaaaacatcatcgagcaaagaggaggcctgagaaagatcaagcccagccaagtctttgtcggaagggccaaggtctctggttttgtcccaatctatgtagacgtcagtccacgtgtttttgtcttctttcctcttcttccttttcttactcacggggatatggattttgaactcacaacaatcaacgtcctccacgtccttttttttctctttttttttctctctctttctggttctgactctcctcggggctatctagaaacgaaggacccagcctttcaccatcatcaagcagattcaaggcgatcccaaggtacgctatcccttcagatggatctcatccccctcctttcacttgtatcatcgtgttgtctccctctatacagcctttaacttacacctgctcttccctgttcccgatctttgttcttccttccctcttcaccattcaggctctcctcagcccattgctcaagtacttgacgctcaaacgaccggatcatagacgaggagctgagggcagaatcagacctgtcaccggcgagattgagatcaaaggtgcttggaaggaggaggttagggagtacttgcttagccaagggttctagagggtgaacaggaagtaggccgggaaagagacgaaggaacgaaaacaaagcacaatatcatgatggatttgcttctcaagttcttgcttgcttgcttgttgaggctctcgtttggatcctttctctgccctcatggctggtgtgactctttctccgtgccaattccccggatccaatgctcagatccagatggcgaccctttcattcaccttttttccagacacagacagaacaatgggtgaagaccatctatagacagtttccttcaagaagaggaaacgaacgagttgaatttcgtagggtttagcagcccaggttctggtaacctatcgacctcctttccctatgtgatccaatacatatcccatcgagagcgaagagcgagaggaaggaacaagattctgtaagaaagacttctagggaatatgaaagcacacaagaatcaagaagagaagagagtgagagacgaacgttgacatatttgatgatcgtagggatacaagtcaagttgtaaggattcttcctaaagactgaatccgaagatctccaagacgaccggtcgcctacgtattgtatctcgagatctattcgttcatccatcggatcgatggggcatgcgaatcaagtgggaattcaggtagaaatgtgcagaaagatcgaaggtttcgacaatcaacagattaggacaagtctgttagctcttgcttttgacatggtggtagacattatgcgaaaggctacgtactatgcttagggctactcttctggtacgactcgaccaatggtatagcttccacacagtcctttcattttgaaagacaacaacagcgatagtcaaggcatcacaaacaatcttagtcagaccattgagaagagaggagtcgagctttgcttggtctggctaggaaacaaagtacaaaaagaagagtacgagcctgcgctgcgaaactcacaggacaccacaggttctttttgacctcgtcgtaatccgagaaaaagatgatgaaaaagttctcttcaggagaactagccgatttggacagtacggatggaaggatctcttcgttggccatcgttcttgctcaaagatgatatgtcgaggatgaggttgatcaaggaataccttatggaggttgcttattcaatggatcaaccgtcttctgggaaacaaaacgtcatatcacgtgatcacactccttgcgtttgttcaaaccccatccagcctcttgacttggatgtgtgttaaccatccttgaaggacccagtgtgttcacgagtcatatgtattggttcaaaagtaaatagaaagcagatcgagaacgaccatagcgatcgctagctcagatggtgagccggaagaaagaggagaaaggaggatagaccaaccgattcattcattccctcttcacgacaattcggtcttacagcccttcaatcttcgatcacagaaacgatcgcctcgtatattacccagacatactctccatcaatcatgagagcaagtccaagccaacgtgagtgcagggtgttccagtcgaagctgatgatgatgtatgtccgaggacccagtcagagttttgactctgccggccgccgggtttggtaataaccggggaacgtcgaggtcaacttcttctccttcttcttgtccttcaactcgacctggtcagacactcacactcaaatacacacaatcacatacacactcgcacacaaccacgcacatctctcacagcagtactgcctcacataagcaatatgcccatctccacgcccttaacgaaagcactcggtatcagaattcccgtcgtccagtcagtatacacacattgctcttctagtcaccttgatgatccaattacctccaccacttgaacggacgaactcatcatcatctaattcttcttaattctattgtactacaggggtgggatgcaggtgagtgtgtgctgcttgacggagagatcttgatacgcaccgttgttgacctgattcgattaccttatatggaaattcccgttccaaagtgggttggtgtaccgttcgttcatatattcactcccgtcgttcacctacctgttcacggctgatctccttcatcgtcgtaaataatcatatcgatatagagcactggccagcgcagtgtctaacgctggaggtctcgggatgttgactgctcttagtgagcacacctttagaaattactaaaggctcagtttgagtttctgaagtctgacgtgcaacccttgatatcccacaaatcagctcaaccttcgcctgacgcgctccgcaaggccatcaaggagacccaaggcctaacatccaagccatttgtcagtacaacgataccttgagatctaccatactacccttgattgaacgtcagcggcatgttttctggggattgttagggagttaacattacgctgctaccatcgatcaacccacctgattatgaaggctatgcgagggcagccgtcgaagagggagtcaaagtgtttgagacggccgggaacaaccgtacgtgagaatctatcggattcgatgacccacagccaaccaacatgctaatcagtgctacaaacagctggaccactcatcaagttcctgaagtctaagcgtgagtcacgccttttgaatggagtcattcatcgacgcgatgtctcatcctggcttccttgtctacatatatgacataatcatagagtgctacataatacacaaatgtaccacgattcggcatgctaaatctgcccagaaactgggcgttgattgtttgagtatagatggctttgaatgtacgtggtcgtactgccaatttttaaaaatttagatctccggggcttatggtatctcttttacaactcgtgctatcatcaaaaggtgctggccatcctggagagcaagatattggaggtctcgtcctggtatgcttcgctatggccttatacgagctgacgaaaatagcaactgatctacccgattaatcatggttctagctggctcgagccgctcaggacctctcaatcccttacatcgctagtggagggtttgctgatgctgtaagtcacctaattacaccttctttctttcaactgtgttgaatcgaaaaatgtagacctaatgaatattcttctccttcttatccgaatgagtagagaggattcgtcagcgctcttgcgcttggagcagcggtaagtgtctctgtctcgtcgcgaggtttatatgattatagtcagctcaatgacactgataactttcgatcgcaattccgggaactggctgacatagggcatcaacatgggtactcggtatgtcttttcatcaaggtccaccatagtttgtgtcatgtcgcgctcaaacaccattacggtcttcagtttcatgtgcactgtcgagtcaccgatccaccagaacatcaaagagaagatagtcgcttccgacgaaactgacactgtacacagttcgttcatgcttttgaaatataaatcaagatggcgattggcatgtcgatctttgttgtctgaccatgcacgcgccaacgtgaacaatgattctagttttcaggactctcggaaatactgcgagagtcttcaagaacgcagtttccaaagaaggttggttgttcgcctcttcaaaccacagatagatatagaaatggatcttgacgttgacctgcaactttgcgttctgacagttgttaggctcgagcgtcgaccacaaggtgccaagtttgaagaactcagagatctcgtttctggttcgttatcatttcttctttctctctctttggcttttgatcattcataatcgagctctcgtggaaacgttagtgaaacaattggatctactaactgacgcttctttctctcctttcatcgatgacaggtgctagaggacgaagtaagtctttcctaatttccttcaattctcatgatttatcatcgcatttcctcttgagaaacaatcagaacacacatatcaatcaatcctctcttcgtttatgttaacccttcccccccggaataaaaaaagccgtatatgaaactggagattctgatgctggaatctggtccgccggaatttcggttggactcatcaaggacatcccaacttgtcaggctttgctcaataggcttgagaaggaaggggaggagatcatcaaaggtcgactaggaggactttgtgtaggtgatgatacagatcaggtcaaggcaaagctctaggtggtcaaggaatcttttttcttttttctatcatttcgatttacctttcttgtttgttagctgagagagaaagagagacgaaaggcaaagagatcgactggggttgcgagtgttttcaattgtatgtatatcatgcgcaacaaggttgtatcttagaaattccaggtgaatcaagacagagaaagtctagttcgataacaagcacaaagagaattccatctgttatatatctgaacatgcatcaagctagggcctttcaatccagacgtctcgtccaatctccgctcttacccccgctcttcttggtgacacatacgtcctgaatgatcatctcttttccggcgaccgctttgaccacttcaagtaaaacgcgcgaggatgaaacaaggaagatggtaagaatccgagatcgtgtatagctcaaccgtctttctcggatcgtctaaacatgcgacatggtcagactcactatcccagatggttaaaagtgtgaccgagacggaagtcagcgcttccatctgatggaaccggcaggaacagagtacccccgagagaatagagtagatgaaaacaacgacaataagcaataggatagagagagaaatatttgtacagaagactcacctcgacccccgttccacctacacattccgccacgctatccactctgacccaacctccgttatttgtccctgtcttttgaatcaattcaaacttcacgtccaccgagctcagattgatctgatgacagagcggaatgagatctgacgttcgtttggcacccatgatacctgctagttgagcgacgatgaggggatctcctttcttgtttagagaggaagacggttgggagttggaaagcagagaaaacgctgcttcgggctagattcacaaaagagccaatgttgagacagaacccaagtgggataaaagaggagaaggatacatgaaggtgaagaaaaagaggctgacaaggtagatctttccggaagcagtggccgatcgcagagtcgctacctttggcgtgatagaaaccatgcgaggcttgcctgtctctggatcgatatgcgttaacgtcgaagctgtcgaggtatatttggacgatccctctcgaggtggtttgcggctcgtcaaaggcgaacgttgtgaggcagatggtattggggaggtactggaaaaagaggaggagtaagcgcgcaagaggcgcggggctgatggcagattcagattgggaagaacaaagagagagagatgggtagttttgaagggggttctgttcagattggacagcaagtaggaaggggtgtacgttgcggttgtcccggctcgcaaagatcggtttgaatgactatctgtacgatataccaaatgatccgataccacgtcaagccaaaatctcatgatgttcagaagacaaatcaaagacgaaagtgaggctgatagagagaatcgttgaagactgaccctccgatcaagatcatcggtctgttcattccatccttcagctgtttcatccctgcatgcttctccttcttccttccaacggccatcgcgattgtctcgaccaactctgcgtccgatgcattcgaccggagcttatcccttaacgagacttctgtttgcccaaacagacagacctgatggatcggccaaaatttgagtcaatgagatcattaatcaattgaagcatttcatctaaccattcagagacaagtagaagattcgtactttgaggtttccatcggcagtgattcgaagtcggttgcacgttccacagaaatgttctgtctgttgtaaccggaaatatgccaaagaaaacaaggctgtaagcctgtgggtttccgttttgaatcgctaagcggaatatgctattttgtttaagactaaccatactggtgataaaaccaaaagagccttggaagccagggactttccatcccttacttgtatcattggcgtcgtcttgtttcttgataagttttttgtattttgatcgtatgaccgaaagcatatcttgataagagtaaagctttccataggaccatctattacctttgagatatgcgcgcggaggtgtacatcagtttctcgtttcggtcaaacataagctctgaggttgacttatagacgtaccactgaaaggcatatattcgataaacctgatttcaacctttctgttcttagtgatctctatgaaatcgagaatctcatcttcgttgaatcctttcatgatgacaacgttcagtttgactgtgagccctttatccgccaacccaagcgcagtttccaacgaagccatgacgagatggtgacccggtcggcgagtaatgaattcaaacttggcagggtgaagtgtatctagagagatgtttaggtgagttagaccggaggagaccagcgttggaagtttccggtgcaaggcaatcccattcgaagtgatgcctatctgggttagaccaatatcttgaagctggttcaagctagctggatatggtttcaccacaagtcatgaaaagtattagaatgagacgcattgtgttgctatttcaagtgacctagacaaaccgatgagcttagtgattcccttccgaacggtaggttctccgccagtcaacctgatcttcgtcaccccttgttcgacaaatagcctggccaatttgagaatctcgtcatctgccaacatgttgaccgatggctgtaagggcacaccttcctccggcatgcagtacgtgcctatgagagttcatgggaacagtcagagcgaacattaaggagagaagacggaaaaggacacgagtcagaacatggccattgaacgagtcaaacatagtgaggtggatgatcagcctacaccggagattgcatttctcagtgagagagattcgaaggtaggtatgatgccgattgaagccgtccgtcaatggagagacatatggatgagcttcatcaatggccttgactttagactgttgttcagttggacgaatcgatgatcatcagtgttcgccagaaattcgagtcagcgtatacgatcaaggagacaagcaaagcaacaagagatctgtcgatgtcgatagaaagcgatgaagcaggtgggtatgttaatcaccttgacggcctttttgagcgcctctgaatttctactgcctctgatgccatcttcttcgtgagaagcagcagctagcccatggttgaaggcagcaggactcgtggaaagaagtctctggtttgtaggatttgccaggccgaagagatgatttgacaagactctggagcatctcgggctggaaaacgccaggaagaaggacatgcactgggataatctgaggccttcctatcctacgagataggacacgggtagacgatgaacggaaggtagcgaccggagagaagagtaggccagcgaacgatggtgatgatgacgatgatggttgtgtatgattaataaagtggaggaagcacgagcgaaagacatcaacgacggtcaaccgataacaacgatcactcaccatccacaccatccacaccatcatctctctttctcagagggccttgctcaagtccatgctgaacgctcttggccgtaccatacgtcgatatccccctgcctgtcggtaatggctcctgtcgtttgctccgtttgccgttcgtcggctagcatgatctgtgcggaatgtgtacttcgtcggtgagtctcttgtgcacaccatcctatcgcgatgtctccatcgtttacctctatgagaggctcattgtatatcttgaacaaacatatagccttctccaacaccgtgtagcagagactgcgttgaaagcttctttgaaaagacatatcgaacgcacaacagccgacacacttgatggcccaggtgggttgcatcaagtaagagacctcgagggcaaactggctgagaagcgacgaagtttgaacataatcaaaaagtacactgagctcgctcgaagaagaaaccaagctcgtaggtctgattgtgttctactcttgtctgaggatgaaatattgtcgttcgataacgagctgatcatgatgtgcacaacggggtatcgtcatcattagtcaaactacagatcgttaacttggactctcatctgatcctcagacgatcatacctcctccaggctcctcatccagcttctctttctgttcctacaccatggcatgcgcttgcccttctccaaaccagacaaatcctcttgagagaggtcatgttcgcgtttgatgttcacctaggaggcagagacgaggaggacgactctgaggacgaagaggggttgggtctaggcgccagggccgtcggagcaggttccaacggacagagtcaaggaagcaaggggcaagaagatagcgtggcgggggtggtgttgcctcttcctggagacatgcaacgtcagtttttacctctgtgtcttggtctgagatgtaaagtcgtgaaatagagaggagaatcttatcatcctgacgagtatgcttttgtttacgatcgaacgacagtctatcctccattagaaaccacggctgcactgcaacagacactacacctactccttcttttttcgtcctatctggcgttgcctaccgggcttccctttactcccgtcctctctcctccgtctctattgccgtccccgcattttccctcgcttggattaaacccgacggcgcttcccttgacatatcctcaaaagtcatccaagactatcaccctgtctctcgctgcggtgcagtacgatgtctgttatctagctgcgcacgttgggattcagattccgcttcacgaaagttcgtatgtgctgagaaatctctggcgaatcatcgaggaagggaacccgcctggttcaagcgggacggctactgctggcgcagggatcagctttgacggaaaaatcatcgagccagtcaagttagaacgaatccaattaagtctgaagggcgtggtaggaagttccagcaagagcggagttgatagacagcttgatcgagaggtgcgaagaaaggagaaagaacggttgaagagggaagaaactccggaagagagagaagaccggagacggaaacgaaggattcgcagagaggaaagagatagaggtaaagacagagataaggacaaggaggacgaatgggaagttctcgatactggagacacgaaagagccagcccaaccaggcaacccggtcgagggcgctcataagggagacggctgagagtaagcctggacgcgaggatccgggctggcagatttgtaaagaagattgacaatgtagatgttaatttaagacggcaacggtgtcttataagtcctgaagccgacgatggtgatacagaaagttctgccggtgttcctcagacacacatctatcagaccaacaaccatcatccgtaccatgtcgaccgtacctgccaatccactactagatagctcagtcattcccactatcgacactcgggttcagctccggggaagagatggcgacgtggccgttccagtcatggccactggaacctgggcttggggagactctcagatctgggattacaaggaggaaggttcgtgctttccatccatatccttgtctttatacgttctccgatcgaagacggatgcaaccagcggatcatagaggcgagcaccagaacagtcgtgtccatactgacatctcggctggtacggatggttagatttcgagaacatcaagcttgctttcttggaggcccttgagcaacagggtggtttcttcgatacagccgaggtaagatgtcgtttacctgatcgtgtgacgtttgagtgttctttgtctcgctcgctcgatgagactgatgttgcgtttggaacgtcctcatgttcgtacacatctcaggtctatgcgaaaggagagtccgagagaatcatcggacggatcatcaagtctctgacacctgagcaacgagccaagatccatattgctaccaaggtctgtctgttttcctccagatcgaccggtagcttatgaaagatgtttatcgaacgcgtttgttcatcttggttcgatcttgggtacacatgtatatggtgtagtggcttcctattcccagtccctcaaaccctttcttcttcactcctggacttgtctctgggttgaagaaaagtttggccaggttgggtttggactcagtcgatctctaccaggtaagttcccagtgtgtctctctcaagttcccttctttccttcatgctatgtgggcaggatcgacaactgaaggagctgaatcggcggcttgacttcttcgcaacatagatccatggtcccatcggtttccactcgtgggaggcccaaggtagggagctggccgaatgtgttaaacaaggacttacaaaggtattttcttcaaagatctctcgtttccttcttcagtacatgcatcaagcgcgaaatctcaaatgttctccttgacccgggcaccttagacggtgggcgtgtccaacttcagtaaagagcagctcatcaagatctcagacgtgcttgagtcccatggcgtgccccttgcgtcaaaccagatcgagctcaacttgatcaggcagtaccctcttcgaagtggattgatcgaggagatgaacaagagaggtgtcgtctgcttggcttgtgagtgacctgatcgttgctttctgttttgcccagaagcttacttgggcctttcgctgattctgggttattcaactcgatgaattcttccagactctcctctggctcaaggtcgattgactggaaagtactctgcggcgaacccacctacatcaggtcgaaggtccggtttgttctttttactttgtcttttttttcctctactctcagctgacatacatcctctcctcaacattccccaggttctccaacatccccatgaaccttgttgatccgctggtagagggtatgcgcgagattgccgagaagagaaacgtctcaatcggagcgatcgctctcaactgggtgttgtccaaaggtgccttttttctttctctgagttcctccctctggtgtatgtgccaacctgcatcggctctgactctgggtggcttgactcaacaggggctattcctcttggaggagccaagaacgcatcccaagccaagcaaaacgctcaaggcaagttcaacgactatctcttctctcttaaacaacttgcgtctaacaggcacatcttcggttttggttaacaaatggattaatgaatgaataaacaatcgatcgatcgaatcacttaacgcagcccttggcttccgattgacggaagaagagatcacacgactggagacgctaggtctcgagggtaccaagacgttcgtccttcttttcgtgttcattcgttccaggtaactatcattacgaaagctgatcaaagatccttttctctcttcttcttgaaaccgtctcgattggtttgacaggacttggtggcagaagggttaatctttgagatcatcctgggtacttctttctctatgattttcatcttgacctaacttgccaacgtttgcgttgtgattgctcttctgcttttctgctcccatcgtttcgagagatgtgttatatatgccgaccgcactatgaatgattaacttattcgaactctctgagaaagatcgcatgacacaatcaagtgtttttctttttcctgattatttatttgattcttcttactatctactccaaaaaagccagatcgtctgaagactctactggtccaatacgccttcaaagttgagccttcctagtattcaagactttttccgagatccacttttcgagctcctcattaaaccgagctggctgagcaagttgaatcctgagacgacaaaaggaaaatcattagtcggtattagcgcatgaaggaagataaacaagtacgaaatatacgtcgagagacaaaaccggtgaccgtttgaaaaaacaaaaagagacgaaccagtgatcggtatcgaaatcaacgatcgtagcatccaccgcgttgtttttgaatgattccttgccaatctcaggaatacagacataatcctgtagggcagctgcgaaaaaacttggtttcgatagctttgttcgatcccgcacggctgttagaacgatcggattgacaaaagagcgcgaaagagtcgactttagccttttgattatagccattcgacataatagaatcacaaacctgcgttgtcatcgttctccagtccctgagcaacgatccggtagtagttcaatgaggcatacatcccaccttcgactaactcggctactttggcatcaaagctctaacgaagaaaccggaaaccaaaaagtttatccattactcgtgtcagtattgactgagcgcatagaaacccaacatagctgggtttaggaggatgagaagggtcaagagcgagtgcaaaagaaatacggacggcttgcgacatgtaagaaggcaaagcgcactgtttcttctcttgaagccatcgatccatcccaccaaccggtgcaacgtactctctccacaaggtaggatcgtctgggaacagaagatgagcaaatccttcaacctgtcgaataaatagagtgttcgaagaattccaaaaaatgttagcttctatcgatcgaaatcacaaaccaagagtaaagcaggacaacaaggcaacatacgttctcgaggagagtcttctcgactccatcgatactgagaaacttccagtacccaaagagttcactaccgaccgtcttcttaaggtgccccaacatgatatccagaggaggaacaggccgaggagggttgaatggaacggcagtgaaggcaaagccgagaaacctatcttcatgataagttaccaatctcgaagcagtggctgatcccctataggattatagtatcgcaatggcaaggtcaatatgttcaggccgttatcatatgattgtctccttcactgtcgaagcgcaggaaaacataacacataaggaaatcagaaaactgaccagtcatgcccaatgacaatagcatccccaaccttttcgctttccaagacttccatcagatcatcagccagagacttgtggatgtaaaggctaggatcatcaggcttatccgtctggccgtagccaagcatgtcgggacagacgattccatagcctttagaggcaaagaacgatgtctgagcgtcccagtctcgatgggtcgaaggaaaaccgtgaatgaaaagaagggtgggaagccatgggtttgagggtgaagtgtacagataggagtatgtaagagatcgtgaggtcttgaatgtcttagcctgcatagcaggatgtacgtgggtacagatgtatacaagagagagatgaagctgatgggttagaacggagagatgagatggaaggagaagatgatatacgttcgatgtggttagtcaccctccatcaactttcataactggagtccttgctagcgttagacacagcgccaagtgtcgtctaggatgtacagaagacaaccgaatgcgttcggatgaaaggctactaaaatcgggtgaaaggcatgtctacgcatgttaatgatttatgtatgaaatcttgttatacatctatttctcaactcgctcaatccatcgcccatgcctctccactaaactctcaacgataaccttctcgatctcttcagttgactcccttccaccttccagcctgatccaagtttcatcgtaagttctctcagatccttcattcgatatgttcgtggttgccgatgaacaggacgaagaagaaggcgtggaagagctggaggcaggctcgacaaagacgacttcaaactttcgacggtgaagatcgttgccgatgaccatctggtggttatatcgatcgagggcacctcgcgctttaggaagaagtaaagattcatccgtttccaactggaaaacggaagatagtagaatgctagcgtcagaatggtagtccaaacctttggatacttcggaaaacacacgggaaagcctaccttgaaagagacaacataaccctctttagtccactcgcttaccagcggcttgaggatttttggtacttgatccatgaccaacgttagccggccatccgaaccagctactggacccgattggattttatgctccgcctatggttttctcgtccgcacaccacgtttgaagaggaaaaggcaatacatcagcccctttcaaaaactttatgtctcgatctataggacacagataaaccgaccattttttcttcaggcagatagaaatcagagaccgcggctgccagatagaacaacccatgtctaccaaccccgtgttcacttcccatgacctgactgatacctctcaacaaccacaagtactcattcactgtgacgaatggaattgttagtagcgtgccttcctcttggacttgatgatgcttagccaagataggcagcagtcttgagatctctggaggatggacttctatctttgatgaggatgatgtttctgctgaagttgatgatgagggagagacatccggcttgatggttaggagatcgagaaagggccgagtagaatgagagtaatgtctagagaatggcagaagggaatgctgtcggtggagaaagatcacagagtatgatggatgggagaggaaatattcggctgaggtcgctcctcttgttcctgttcaaccattgagccatcttcctctccgagtaagtaaatgcaaagggccaccttcgaacggatacccaattggctttggcatacgtaccagctgagaagttatccaagaaccggaccctgtggttgagatgagaaatcaccggaagtttagatctttcccctctaacatctaagcaacacttagaacgggagcagtgaaaagaaaaaggagaggtgggacactgtacatgttcttctccaaagggacactagttcctccgctctacatacgtattccagaaagaaagaccatgggtttgaagattaacatctgcatctttatatccccttctgctctgtggtcttcacccagtgaaaccaggatcaaattcaagcagggagaccgacaggagagagtcagacgtacggtaaccaaaacgacccgtcttccaagtcccttcattctcgaaatgaactcttgtgctttcgcttgatcatgctccaactgaggcggtggtgcctgggtagtaaaatatgatgtcgttgagattgacatgcttccgctccttcttgatgattttccctcgaacaaggatcctatgtttcctagagatgctctacgttggagttctagatagtttaggttgaggatttgggacaatgtggccgagatggatccttcttttctctctcttcttttcggagtagtgcgataggctcaagcaaattcgtccccatcgggtcttcctattcttctcaaccccccatgatttcaactcattatagccaggctagccttccggcgtgtaccgacatcaggttttttctttctttttacccttgatcttcctatcccttgattatatctttaatcttctacaagccaaggaaaaaaaagagaaaacgtcgtctctctttgagggatgagagaatcgttatgcatagatcctgacagaacgatagagtttgagaaagagagagttctatgtgccatagaaggaaagatggatggagaatataaccacaaaagaacaggatagaaatttatcaaatgaatgagaaggattgagtggaagaagaagatgtgatacaaaatcaagatgggcggtgaaggatgtgatgcgttaagcagtcttcgcaggtccggaagtagacgttttaggggtaagtttgattcccttcgtctttttaaggtgctttcgagtcgagtctgtttgaaggggaacaacaatggaagaaagcaagcggtaagcaaggtgagatggtcatccctaaaactaacaaagccagaggtagaaaggcacgtacgttcgataatcttcttgtcctcttcatcgtcgaacttgacgctctctccctccttcttgaccttctccgcctcttccaacgccttctcctcctcttcaacagagattggcagcggaacgaacggctcatccacctcatcggctggttcagcctcggactcctgggcgagtcgagccttcttggacagtcgggaaactttgaactttgcgacgtagaaaccgtcaactgagagaaaaagtgtgtatggtaaagatgatcagcaatcagacacaaacacagaaaacatgatgaaaagatgaaggttgaaacctaccattgtggacgtgaggccagtatcgtctagtaagcttcattctgtctccaaacactctgcccttgtagtttgcgaaaccttctcttccaaactccagaccagtatcaaccaacttgacgttcggtcgcttcctcaacgcgtactccaccaccgactcgttctcgtccacagtgacggaacaagttgaatacacaaggtaaccaccagtgggcgagtctgggttgatggaatcgatagcacaaagaatgagttgcttttgaaggtgggaaaggaggtggaaatctcgctcggactttaaggtagatagagagggacatgaagataagtatggacagacaacgataacgagccttgtcgaacatgatacgtatagcacacaagatactcaccttgttgactttgacactggcatccttggcgatgacacccgttccactgcaaggcgcgtcgagaaggactctgtcgaaaccacccatcaccttagggaactctcttccatcgtagttgcagaccaccacgttcttgcaacccagtcggtggatgtttgccgtgagactctttgttcgggccttgtttgagtcgttcgcaaacacaagtccggtgttctgaaggagagcagagatgtacgtcgtctttccaccaggggcagaggccatgtcgagcactcgctcgttcggttgaggcgcaagggccatgaccgggaggaaagaagaagcggcttgaagcatgtaatgacctccgaggtactctggggtagcaccgatcgggacggcactttcgaacacctgcaatccaaccttggtccactttcctatcggctcgaggttgactccacgactgatcaacgcttgagcaagatcccgtcgcctcgttcggagtgtgttggttcggatcgtcactggtctcggcgtctcgttggcgtcaaagaaagcgatggcctaaagcaataagaaaggcatcagaagatgaaagctagtgagcgagacgaggtaagaaaagagatgatcagatgagtatgaaacaaacctcagacaaggggaaaagctgaagaagcttctcagcaaggaactcgttatagccatagtaggttgcgatatcggtaatcaattgctcccagtactctgacctggacctggttagatgatcgtagccatttacaagagagaggaaggagaatttagcgccatggcctaagtaggaaaaattccaaggaagaagaaccacatactttccgtctttccccccaaacttgctccagtcactcaaaatccgaatcaactcgcccaatcgtcgctcaacctttcggagtccaccttcgccaacacctttcgtcttctcggtctccctctcttccacac

SEQ ID NO: 3004 - DNA, 19096 bp, Xanthophyllomyces dendrorhous
gtctccctctcttccacactgggtagctcgaacttctcctctccatcgaacgaatcatcgtcctcgacgtcctcgccatcgattggctcaccatcctcgccaaggatatttgtctgaatctcgtctccgtccgagtcgacctgaggaactttggaagactttgctgctggctcctcatcttcggatgtctctgctcccgaagtatcctcttctccagacaagaactcgccgtcttcgtcggagtcggatgggaagtctccttcatcgagattgaattggttatcagctcctggtggaagttgaccagcctcatcatcagagaaatcatcagattcggcttccgagtcactaaattgcaactcccgaggagcgggtcggggcatgccttcgtcatcgttgctgtgaatatgcattaggtttgacagaccgggacacgcttagcgagagcaggcctttgaacaaagaaaaagacgattacgagaaagataggaaaaaacctaccctccagccagctggaactcctctccgatctcttcatcatcgctgaatccatcaagcatagttctacatgaaccgaagaagaaagtcaaagtagaggaacgatcagaggattgggaggtgagctcaagaagggatgcagagctaaactctcaggagcatctataggaaacatgatactcacgcctcatcttccatatcatctgcctcagacttcttcttccccttagtcttctttgccgagccagacacactggactctaccggctttttggggttcttgatcttacgacctttggcatccaatctaaccttctttccacctgatcgagggacgtagccgtccgcctttcgcttggatccttgaggtccagacgaagctgcaggagtctcgagcgtttgggggggtccctgtttgttcttcgctaatcttcccatggtaagcgtgtctctgtgggtttggaggggaagaggggaggagttgcaaggaaagactgaggacgagggaagcgaaaagtagagtattcaggcgggaatttttggattggcagtcacgtgttgattacacagcaattgagaatgtaagtgcacgtgactttcaatcacgtgctgttgagatcaatactaaattgtcggctctagctctaatcaaaaagagataagtttatcctgagaaggccgaaacagaaggagcccgagaaaatatggagattggggaaaggggcaacgggccgcactgcacgtgggtgtagagtagaataatataagatgaaggcaagctggtagtgagagaaagacagacaactggagacagtgagttggttgattgtatggctcttgatgcatacagtcagactccacaggccataggatcatccggcgaaaagggaagaccggggtaagatggatcaagatatacaattgcaattaagagagggcaaagaacgggaagcgggaaggcggagaataaacatcaagaatacattgcacaacccacaaagcttgataaatcttccagatgggaaaaaccttttcgccaagccggaccgaccaacggagtcttgctcgtttagattgtatgagatgtgtatgatgagattatgattgatgtctcctgtactagtcaatttgggttatgagaaagtctatctcatttgatggacacccaccgtcagggcgatactgcgccagagtgagctgaacggacaacaattagcattgcccgatcattacttctatgacgagcttgattctaagaccaaacaagctggcgaaaagaaacccaacctgaatactttatttcttttccaccaccttctttcttctttctccaagtctctttcttcgcttcttttaaattttctcaggcttctcttggtaaaacagtcgcagaccctttcgtttcttggactgagtcctctcagttgaaaacactggctatttgatgggacaacattatggaacctacagacagtcatgacacccgcagcgcaaactatcattttcaatcatctataccctacagcgttccatccaatccttctaccagcatggccgaccgggaggaggctattcgatcagctccctgggatccaccggatccatacaccagtgattcttcggccaacaactcgatagccgttcagccgacagcacctctttatccggcctttctaccctcatcggtagccgcggcaggccgttttcctgaatcattcagatctgtcccatatgccggctcggctaacgaattcgatccatccaagatatacacatactccattccattcatcggtcatcctggacagcaacctcccactggtggctatcatcatatggaaaacgagttgagccgaccggacgaacccgatgagccctctccacttcaaatagcacccgtccaggacaccaaagtttcggccaatttccttgaagttatccagccgtcaggtcttgaacaaactgatcttggcttcgagagcaattttctagcagagcccacactccaagtaccgtcatatccagagaagtccactgactcggtagatagtactcattaccgccatcgcgaggcgtacgtcccatcccatggtcgatcccacactcatttgacctcgagctgtcatgatacacatcatgaatctcaagccaatccttcaacccaagtaagggtcgagggagatattggttgtcattacatacatcaacccagcacaagctcattcttacctttcacatctactgttagcaattcgttatacgccaatattcccacccctcaccacacagagtactctcttgcccctcatccccagactcacccagttccttcatacccaacctcttaccatccaaatcaaccagctggcatctcaatcaattatccgaccatcgtcgagacagaggctgggatgccactcggcccgagaccggaagtgatagagcacggagagaatacaagcgaaggatgggagctcaactcatcctttcagccgccagcctcttctttgaccgttggaagacatgagttctacaccggatcgacattacttccctctgattcatctggctcaatatatccaacaattcatcagaatccttcatcagccattcacctttctccaggccaacaatactatcagttccttcaaccatcactacagcagcaacatcaaattcctatgcacaaagcaacgccagttctacacaatgctcttccctcgccgtcaacgtcttcatcatccaaaccaagccagtcgttcgtctatccagatcaggaacacaattcgattcccaatgctagttcggcatattccttcttagaatctcggtctaggtcgatctctcattcgaacccgtcttcttccccgccctctcacaacaccccttcatcaaccctacaatttccaatcttggctccagccggtcaaccagtttcatatcttgctgattctgaaccctcctcagctcagtccttgacattcgccgaccagccgattgatcctataaaatcgaccacgctccccttagagttcctgaagggcaaccctaagcagggcgctaccagcaagaaaaagaaacgaacggtccatccaaatccaccgcttgcgtcatgttccatctgtcagaaatcattgatgagactattgatgcgtggaacgacggaagattgggagactgactggtttggatggtgggtctgtagagaatgttccgagagtcaaatggatgatacatcccagattgaagtttactcaggtgcgactaggtctggaatggtatctcaagactcgttcaattcagtcttaggtccggagaaggcaaaacgtagagaccgaccaattggatcagtctttggtcaaatcataagcggtagtttgtcaaatggaacgagagcaggcggagttggaagacggaaacgaacaagggaaacgatgaataccgaggctcctttggtttgtgatgtttgcttcaggttcaaaggacagggcggaattgttcctaaagacggaaggagtgaactaaagttcagcgttgaggtttgttctcgctctctctctcactctgttttctttccctttctctccttgatggaggttttactcctcaaaatcaagaaaaaaagcgcaactgactcgcagacgaacgctttctgaaatgccatattgaaagtttgtatgtataagctgcgaggaaaaatacaggcgttgtacagactgtggatctggtggaggagcaaggattgggttagttcatagccatcctctctcctctcaaatctgttttacaccagactatttttgttgacaaagtgacttgatgcttcgttctaatatctctctgatgcgctgatgaaatccgctgtcgttgatgtttcaagaattggaaagtggttagtcccttcttgatcggctcgtccttttcctcctattccagtctcacgttcaatttatccttctatcgacaggcgttcgaaggaacttttcattaataacagaaagacatgttcgctctctcatgtacgaattggatcggcccctatgaaagtaggaacatgggatgtaaaagactttgaaaatgatcatgtttgggttgagttgcttgatttgtgcgtctttctgcgttcttgttttcttcttatcgacaaccttcgtctttgatactgaacggcttatctgtgctttttgctccgttttcgaaatctgcatttttttccagatgtgaagcgttatggaaagatagactattgtcaaggatggccgttccagatgtacttgaagcgaacctgggagatctaaacgatcgacctgtcagtttaccctctgtctcttctgttttttctcttgatacatcctatttaccctccatccttcacgccttttctcttttggcactcgcgcatcatttatatatcgcctaatcaacgcagaggacattcgcagatgttcaagccaccctcgacgctggttggccaagccgtcaacctttaattgatgcccgtcaaaagatgatgtcacctcagctttcttccgagctctcacgcacagtcaattacggtgacaatcggatagatacaagaagtgggcagaggtttaggaagtatctcggtctgacgtggtgtaaatgtaaaccgagaagatccggtctggtctcaacgtttaccaatggtggtcatggtgatagtgggcttggtgggagctcaggttcaggagatgaggctttggagattgttaaggaagggaaacaatccggagaagaatcaggggaaggtctgttgtctttccttttttgatccactccggtagatcacaagctagatcacagtcattttggggttcaaaaatatacatgataggtctcattggacacgagagcataaataatatcatcccaccgggctatgaactcgtagggctctatatcggtgattggaacgtagatggtcagtttttccatcatctttcccccctttcttgatcgatcgtgtttcgatgttgactggatatcccgcttctcttgccatcttccatccttcatatctctgttgccccatatcagacgggacgctgcttataaccacgtctcttcctttcgaagggagtgataggtcagtggttctattctggtttcggttatgatgcgggtgatgatcattgattgttttgtgattctcttcaagtagcgaggatcgaacctgtaagacactttgagtaatctctcccatagagcgatgagaaaaggagaagccctgactttcttgacggtcggttatctagctctgacagttggggaaatgatattacgcagtaagcgcctttcgccccgttcagtcttatctcgtcgtttaagaattttccttctcataacaagttgtgtcgattttcttgtctagtcgtgactgaaatcgaagagaccaacgctgcactgacggcccacggtcaaacccaaggagaggaacaagtcgggagaaaggcgccatcattagaacatatatggtgcatttcggatgggatgacctcccagattagggataagatgcatggtttgtctgaacataatatgtctaattcctttttggattctctgtagtcaacctctatctttcttttctgataactcttctaatggtattccatagaatctctaaccagaaaaagacagtttcttcccctggatgaatacctagctctgcaccgaacagtccgaccagagatcttccatgagctcccgtattcccttcctggaccttgggtcgatggcgtaggcataccaggtacgatcatggtccgatggttggggccacattttgaccgggaacaacttgaagaagtgagcgtcagttttgttttgtttttctcttccttttgtcgttctctccgatgtttgtttgtatcgtcagtattctgacattgagaaattgtgcgctacccgggaatttgatacatctcagtcgataggaaagaacgatatcgggaaaaagtcgatcaaagctagggtcatcaaggggtgacgggaagacggtgcagcgtgtatttttaccataaaataatcctctcatcaatacttatggcataaggtttaactgttcgagtgtttctttcatgtctctcgtacttctcttgcaacgcaagcgagcttgtccggacagtctatctgtgcgagttcaacctattcctttcgcccactcaagagaagagatagaagaaaggcacagaatttctcaagaggtgtaaccactggttacaccagctgtcttgcgaaagagaggcagctagtcagtcaagccagacggacccacatcgacagcgagcatacacatccagagtccacgctacatacttctacagacatttgtcggtctgatctgtcgatagccacgctctctatccataaagaccatatattgactgttcggcgtgactcaaaaagtcaaacagaaaggtgaggcagagacaggtcatacgcgtttttcctttgtccgtggagtgaacgggaacacattctgtgcaaccgttgtttcgattgcttttcgcctttcctcttcctcctgttcggtccaggtgtcttattaagcttggatcttgcactgtggacagattggactcgtagtgtcttgcaggattcatccggggaaacatctctggtcgatcatctggattggacggccttctttcgtcatctgtacgttgggcaaacacgcgtctttccggaaggctcttaatctcgaactcatccgttctctttccttggtttcttttgatcacctttggaatcgtctctctttgggtttctctcttttcttatcttgtgttcaccagagcttttctgtgtggatagatcctcactttcttcgaaaatcaatctcttggttcccttgaacgtctctttctctctgagcagtatcaggaccatcatgcctcgagctcaaactagtgggtctaccaccacagctacccttcctcagactcggtaaggcatttctatgtttattgcctttttgaatctatgcttcaaaagcttcgtgcagtcgagaaacaaggtcgatctgacaatcaatcattttgaatgacttggacgcgtcttagatcccgtcgtcaaatccctccatcgtcttcaaacttgtcatcagcaaccaacttagctccatcgtcatctcgaaaccagcttttacctcctcatccagactcagatccgaacgtgccgtcctccagaacaatcagaccgttagctggggttcttcccactggcggctcatcttcttcttcctctctgaccacacctgtgtccttcaaggttgaagcccataaacttccatccggacagatcgctgatgtgatcgtgttggatgactcgccctcacctgctcctccaccactgccgtcgtcttcctctacttcgtcatctgtgagtaaacggctcaaaccgatgtcatcgtcagcaactacaggcagtggaggcgggagcgtaggtggagctggatatgcagtcggcgatacgaattcaagttcaaagttcggtcatagctcaagtaaagctcagggaagctattctggtgaagtttatgcaacaaacggaggaacgggaaggaagagaaaagccgatgagggtttgccagtgggcattggatccggaaaagttagtaagatcacgaatgggtacacggatcataaagtgagtagtagaggtgccagccatctttcctttttgccggtgttttctcgagtccgactcttggtcgacccggactcaacgcgatttgtcatgctttgattcattcgcacttcttacaatcaagtcgacacatgcgtctacttcaagttcatcatcgagtcatcgacaacatacccagccactcctaccaccttgtgacgacgccgaaggtcactatatcgttcatattcacgccgtcatcgccgatcgttgtgcgtctactctttccattctttgtcatctgttccatacccttaggaagagtacgagtttgtcttaatcgccgtgttcatatcacgtggtaccattcagatcggatagagaaaaaactgggagagggaactttcggtaaagtggttcaagcgtgtgacattcggcggccagagaggaaatatgcaatcaagatcattcgagccgtgcagaaatatagggatgcgtccaagatcgaaattcgagtcttaaacgagctcaaaaatggagaccgtaccaacgagcagtaagtctcttctttttttcgtttctttatacctactttcatacagtccaaccaaatttgtgttggatcggtgcgtcgtccagagctaatgactgtgctcatgttctaccgatcgatagcaaatgcattcatctactcgaatcttttgactttcgaaatcatgtctgccttgtgttcgagcttcttggatcatcggtgtttgattttctcaaagaaaactcgttccaacctttcccaatgagacatatccaggattttgctcggcagttgcttgctagcgtgtcttgtacgcttttttctcttttctttgtctgcggacttgatctatggtgccagctgcaagaatcgatcctgaatccttcgctttctgtatcatagatctccacgcactgggcttggtgcatactgatttgaagccggagaatatcttactggcagattcaagttcgagaatgatcacatccaacaaggtccgtgccagcttgtcttctctctttcgaatttgttcctcactcggctttatcgttaacaatgataatgctattcgttatgtcggtcgcttctatgaattcagggcacaagaaggctgttactcaataacacggatattcgactcatagattttggctcggctacgtttgagagggaataccattccaacgtggtttcgacgagacattatcgagcaccggagatcatcttgggtttgtatcagtctctttccctcctatcacagcaaagaagaatttggctgactgcgtttttcttcatgccgaaaaaatataaaggcttgggatggtcttatccgtgcgatatgttctccatcggttgtatcctcgtcgaattttgtacaggagaggctctgtttcagacgcatggtaacttggaacatctagctatgatggagatcgtgatcggaaaaatgtcgccggactttcttaaaaaggcgatgtgcgtgatccttttttttactttggtgtacgcatgtgatcctttcctaatcaagtcagatgaactggttgatggcgttgaaccctgtttgggaaacaattcaatagacgatcaaaaccggaattttttgtgaagaatcggttagattatccaaattcttcgacagatcaatcatcaaaaaccttcatcaaaggcatgaaatcaatcgaggttcgtccaacatgactctcaactcttgccttttctttcttttcccccttcattcctatagaggctgatttcctctcatttgttcatctgggatggaaacaaacgtaaacagaggattatcgatagcagggcttcgccgagaatagcgaaaccgttctgcgatctgatcaaacggcttttacatttcgacccgaaacaacgtctggacgttcgctcggctctccatcatccattcttcagtttacaattgtcagtagtttctctcatcccttcgacatcttggttctagtgagagattgttaatctctcttcttcattttggaattgatttgatttcatcaggcctttggaatgagggaggtcgagactgaatgtcgttgttctgattccagtttttggtttccatcatgccctttttcatttccctcctccttgcaatgtatcgatcaccttcaacccttttccctctcgtttttctttgttcgcctcatcaagtccgaggttttgttccctagatattctcttcctcagtgttttcttttggtctttttcatgccttactcttcttgaatactttctttcagcgctgtttcttctctttgtgcatgtcatagtcttctcatcacttttcctgttcttcaattctccctttaccgtcctcttcattcttctttgttctattcaatttttattctgttcttgtgattctcctttattcgatcatctttccttgtctccgtttgtcttcgatggattttttttttccaatttagtcgcagggtcagataagggtctaagaggataaaatagaattttgaggaaaagtaaaggacaagagatagagtcaagaagaaagacacggaaggggacggaaagaaagcagataaggcaaatcctccatcgcgtccgtctggcttttacttgagcgacatcacaaagctctgttcgattcgaaggtgtgatgcgtttgagccatgtcaagttccatggagaggaatagaaggacgtataggatgacgagaatgagtgcgtgacatctctgatgaactcaagatctagtacgaaagtggaagggaaggtggatgaacgaacctgctccagcttctcggcggcggccttgaaatcctcaacttctctccagcagtccagaggagtcgttgggtttttgctatcgtttccaaaagtgcaaaaagcaaaagttcaggacgagaaacaacagatatctcgacggcaagtaactctggccaagggtgtcgcgaacgagaacaaagcttacaggtagcactgcttgatgttctccttagtctggttaatctctggccaatcgctcaagcttctcttcttctcgaatctctcaaccttctctctgatctcttcgatatcccgtcggagaatctcggaagacgttccggacccggaggcggatttttcggtcgatagattcgaagcctggagttcggcgtgcagttgggcgttcaaactggcttcctgagctttgagggattgaagggaagactcaagtttctgacggatgtgctcgctagtgccaaaaggaaagcaaggatcagactaagaacaaaagaaagagaggcagatagaaagaaaaaagcttatagaaggctcactcgatggatgattgccgggcttgagaaggagatgctgccgtcgagggatcagacaattgagcaatcagctctggggaaaactggacggtaccagcctgggaagccggataaaagaccttttccgagaccggagaggctggtgaagattgctgggcacccattgtgagagagaaacagagaagaaagaagagaaagggaaggaagagagagaagggaaggaggttgagcgccgttgtcgtcgtcgtcgttaagaggaaacccccaagctgctgacggaacgacgggttgaccgcatcaacaaccacccaccgttccgtctcatccgtcctttgtcttcctttctttccttcctgttcttccatctcagcttgctatccatgtcgctcagtagggaaagcaagaagatcatcatcgaatgtaagtgtcgtcagaacttgtctgctcaagcgacataccctctctcactccggatcggtcggctttatcctatatccgatcaacttggctgactcttgataatttctatcttcagcttcggtctatctgtgcacctcagtgagctacttgctactttttactatcgatctggttcaattgactaattgtttggtcatcgctgctctcatgcgtacagttactagcactatatgcgtcatacagattgatggaaaccctttcgccttctaacacggagcgccgaaagtccagcaagaaaggcaaagagacgctcgaacgactgaaggggtcgggcaaggcccgtttggagaatctaggagacctcaacgaatacgaagagactcttctggctgaggtcgtccacccggatgatatcgaagtcggcttcggcggtatgctttccgtgctttttatctcagcactaaagaaagacaactgacgacctttacatccgctcttttgctgggaccaactggatcagacgtaggaggattagaacctatagttgattcgctcagagagtcggtcatctacccacttatctaccccgagatttataattctacatccggtctattgactgctcccaagggagttcttctgtacggtcccccgggatgcgggaagacgatgcttgccaaagcgctggccaaagagagcggtgctagctttgttagtctctttcttttgttataattactactcattttcaaaaacgatgaagaggcatctgaagacttgtcctatgtttgtgtcatagatcaatgtccctctatccgctcttgccaataagtggtacggagagagcaacaagctcatcgctggtctcttcactctcgctcggaaattacaacccaccattgtaagtgttcgcgttagctcttcttatatttctttgatgcatttatagacgaaaacgattgtgatgactcatgaatgatctccccacctgttgaacgtgaaaaacaaagattttcatcgacgaaatagacgctttgcttcgaaacagaggatcagataatcacgaagtcacgtctacgattaaagcagaattcttgactctttgggacggcttgacgtcaggagaacggtcgagaattctggttctaggagcgacgaaccgacccaacgagtaagcattttacactctttgtctaaaaaattatcttgattctagtatgatgttgtctttttttggtgtacgacaaggctcatcccagttgttatgtttcgcgtggtttgggattgtgttctactcgggtttcaccaaatagtatcgatcctgctttccttaggcggatgcctaagaagttttcggttggtctgcccgatgcttctcaacggtctcgaattcttgctctggtcagtttctttctctgctcttgatctcttacccatacgctccatactgattggaatgccttaaacttgttttcgatgattttagatgttgaaagacaccgctctttccagttcactctctatctctcatctggctgaactgacggaaggccggtcggggtccgatctcagggaactctgcagggaggcagcaatgagaccgctcagggaggaaattagagggaaagggtttgatcctgtcaagttgggcgagaaggtgaggccttcctttgtgttcctctatcaactgagtcctgggttaagattcagacctgactgtaatcttgtttcgtctttatttattcttctcgtccaattgggtaattctcatccttgtttgtcccaatccaaccagggctttgaactaaggccattggagttgaaggacttctttgacgaatcatcagctctagaagatggcttagtggacggttgatccaaatccaggatttagattcagcatcttcctctatttctcttcattcccttaccactctcgccctttccttttcactctgtattgacgtgcatcattcaatgttcaggatcgaccgttcattcatctttctctcgtctaaacgtacacatgcacaaacgtacacaccctcttctccttcgctgctttctcggttcagttttatctttatatgcaatgcgcgatttaacggactacgaagtactgaatatcgaacacccacattcatttcatataccatgataaaacaccatgataaaacctcgcttgttctgtaagacctaacgatcagaacatcagactatctgtttagtcaagaagttgatcgcatccatatgtttgatagtttgttctctcaacgggttcttgccttacttttgtcgctgcctactatgtttacaaaggaaaagaaacatattattttcaggatgatgtttttccttattcaatgaaagatgagaggcgaaagggtacaagaaagcacagaggtagagagaagagatgattaggcaataggacaagatgacttatacgagataacagaaggtgtttttaaattgcgggtgagagatagtaaggaaaaagtattttacgatatctatatggacggaagcacgaaataaacacctgcacaaaaagaaagaacaatccggtagagtggaaacaacgacagacgatgatattaaggagaaaagaaagcaaaaacaatcataaaacaaaaacaaaatgaatttgaaaaccactataaccctttacgagactgattcccgattctagttcttgatgttgttgggatggttgggcgatgactcgtcgatctctcccgtcaatcgaccagaaagatcacgtccgtcgtaaacgttttgaacatctccaagcctgacgtcgtcaacgaagaagaaggcgatgatcggagggaagacggctacgaccgtggccccgatgcacaagttcctcatcacataatcgtaagcatggatagctccaactcgaatcggatcggcagcaggataagcggcgatgatggtgattgaagcgtatagctcggcgttcaaagtcgcgttatttccggggacgtatttggccaaagcggcgggcatctgagaagtccaaacggcagtggccacggcagaacccacactgtttccaacctcagtgatcaacagcacaagcgcggtcacggtggcaacatcgacatgaggaactcgagcctgggcagcaacttgaaggcagatggcggcgaaacctccgcccattccttgaaggacttgggtcataacaagctgtacatacgacaaggggaaaacacagtcaagtcggatctagaaccgaaacgaagaagaacaaaataacaggtgatggacgaacctcagcagcgctaccgttacctcctcgggagtgaatcatgataccaactccaagcagtcggatcaacagaccaccaaagagagtccacttgagatttctagtaaagaccataaggataccggccaagaatccaaagacctgaaaatatgccgaacagatattacaacagatcgtcaacgaggaatgaaagaagaggtgtggaaaaaaaggacaatcgacgtacgcaaagagcgatggactgggtgtatgcaaaatagttcaagttcactggactccaggtgggctgagacacataaacgaaggagtacactagcagtcaaaatgaaatcccattctaaagaagtcagtcacgctgatttgagagagcaattttgagaagctggatactgacggtaagtgtagctcaagtagaaagacacaaagtcgaggaaaccgatggcacaagcggccgagatgtttcggtttttgaagaatcggtaaggtgcaacaggctttttggcaatcttgacttcgtagatgacggtgacagggataagacagactccgaggacgatcatgacaatcttatttacataacacaggaaacaaagttaatcttgagtgaagcagtgatagaggtggtgtcaggtcggcgctcaccatgctgggagttttccatcctctgagggctttaggagcaagacccagaggaagaaggacgagtgcaagcgtggcggcgatcaagataagaccgataatctaaataataacagaagaagagatcagttcagaaaaggatcttgtcttttttgtttggaaagttgactagaaaaagcacaacgtacatccatctcgatgaaaagaccctttaaggtagcaccgaagttcttgaatccggtctggtagatctgtggaacaacgttaagtccggcgtccaccccgtcatctccagtggcggtggtgtggacggggacactagcggcgatgtactcgggaggagacaaagcggcggtagcgagggtgggcactctaagaagggcagctttctttgctttacgctgggcccaaaggagagtgatgataatgggcaggacgcagacagggatgataatacactatgaacataattggagacaggtgagcaatcggaccttgtcagcatttagcggagacgattgaagctgaagagaaaaggaccaaagaacatacgaaaattccgtatccccatcgccagttgggattgatagcggcggcgatattactaccaacaaaggcattgatgacgaagggcatagtgcagagtccagaggcaaatgcacgccatcgtagggttgtaatatctgcaagctgttcagaaaatagaaaaacatgagctgagctttcaaaatgaacagttcaaagtatgagaaaacgaacgatgatctgggtgaggatctgaagaccagtgtatccaaaactgtagataacatctccaccggcaacctggttgatggtgctggcagaggcgataacggcgtagcctacaatataggcaacgaccgaaatgatgtacgtctcccctcgtccaaagctgagaggagagggaaaaagtagaaaagaaaccatcaatattgccacggaaaacggatgctagcagaacagaagacatacacatcagcaaacttggcgaacgcaggctttcctaccgcgataatgatcgcagcagcagtggtgaccgttccggagagagagtggtcaagaacggttgaggtggcctggtagagaaatagataggtctagatgcacccgcaagatatgcagtaatcagtatcgaagtggggttgagttcagacagaacgtaagaccttacagtgacaccatcgagagagtacacatatgaggcgagtccaattctgaatggggaggacagagatgagggatcgaacgaatcagaacaagcggcaagaggactgcgtgtgtgcgcattcaatcaggctacaaacaagacttacgagatcagcaaggcccatttgctcagtggagtccaaacggcctgggcagcctcgacctttgccactccgggctgcatctcggtgtcgtgaacatcgtgcttctcgagtgtgtaggcggcgtattgctgaccagcctcttcagaaacgatacgcttgttcgcctcgtagtcggtgtgggtgtctgacattcttctgaatgtggtggaagaaaactagacggaaggaggggttaggctggtttgttcgtgatctttctcttctttaaaatcaaagaaagagtaaagtgtaagtttctcaaagaaagagaacagaaacagaaatgattttccctctcgtctggatctttatattctctggacgaagaaaaaaattcttgtgccgttgagtgaactttttcttaattccttccatccttggtatagcaaaaaaagggagattcaagggcagaataatcagacaaaataatcagattacttttacagagcccgtgtgctccaccaggctgctaaccgactcgtaatttcgccgatcaacgcttgaaacaccgaagacatccgatgatggtggacgctcagcaaatcagattgcgtacctgccgacaaacggcgattcagccttcgtgccttaatcccgtctattccttcaggtacgactgcgtaccagggcctttgtcttggaagacgattgactgtagaagcgccagtaacagaacggcatgtcgaatctgggcagtcggtggccaagcgaggtctgtagatcagttgaggcacataagcgagccaatcagattagaccaggcgagttatgcattaatattctctctcgagttcggccggattttcttttcttgggcatgtcttcgttctactcgattatcgtttcttctgattcagttcatccgtcttgtgcggatcgattgaaacaaagatgttctttttcccttcctcgtccgaccgatctcggccagaatgtccttttcgttctgtttatattgtttttcagtgctgtccagagactttgtcttgtctggatcgcttggaagaaatccaacgacgcaatgatattcgtcagctcttttcaagagagagagagagagagctcggcgcaccccacagaagcaccttgagtacaaggcagtctgtggccgaaaaaaaattgaaagaaaggataagaaagagaaagagaaggctagaaaagactatcgagcctaggtctagaactttgatcataagaaaaacaagaccacaagcttattgttcaccacatgtagtcgtttacattcttcgtcctcgtatccgtccctctccctgtctccgtctctcggacgcttgcgagccaacatcaaaggttgctggcatgtttaattcttttcggtagcaaataggaagaaaacatcttgagcgaccagtgaatagcccagggctgttgagagagatcagaaaggaggaggaataatgactgctgatgcacagtagagagtatcaaatcgactggccaaatcacaaatacgacgcatacacatacatgttcgcatatatgagggatctgcgttgatcatctacatacaccaaagtcgaacacgctttcatccctatgttctacactgaactctcgagcaacctcttttcttctccccaaagctattgactctattcgcgtctccccatcattttccgttgacctcgagcttgaaaatgtcgggtctacaaatttgagcccatgaaaccaaccatatcagattgaaatgcacttgagtgaaaccgtcgctttaaaatgtgagaaggaagtatagcacgaaccgagtatagtggccggcgttatcgaggtcaagctttgctcctagaatttcatccagatccaacactgcagagatcaatctgctcatttgtcatcccaaacagcacagagttagcatgtagacacacacacacacaca

SEQ ID NO: 3005 - DNA, 35880 bp, Xanthophyllomyces dendrorhous
acacacacacacacagagaaagaaaagctcagagtccagaatgaaaagacaaaaagatcgacgaaccctgctttccctctaagaggcccggcgagaacctctcccaagggcgacacgatcacacttccaccggcaatcatgataccctccgggtcaaccggtccttcgattgggtgcccttccggataatcctagagtggattttcgagcagaacacgtaagaagaccgatcgtgtttgtatccgttcaagagtcaggtgagaacgtactttttgttgagcaaactgtcacaaccaggggaaaaaaacaatcctcatcagccttgtctcccttgcttgcttgcctcgcatgcccaacggcatcctaataaaaatcaagggcagtcactcacctgacaagcgttcaacacgaaacatcttccctccatcgccagatgtttgatcgtgctctgccagttttcccttccatcgacggtaggcgtgcagtgaatctgaacgccttggttccagaagtgttgtcgaaggagaggcatcatgttttcccaacagattgcagaaccgattacgaccggtgaactctcagagttggatgcgagcgtgggcgcttgggcggcaggcccatcgacggcacccacatcgacctcggcagcagcggaaggaaaggtgtgggtgacggcagagatagtcgagccatcaccgaacctccagatgagtttctcactagccgtgggcatcaactggatcactgaaatctccacacgcccatcagctcaatttcagaccgcgtgaaagctcgagtcggaacgtttttccttacctttcgcctcttgtagaccagaccttcggtaggactgtaaaacccgacgacgcaatagagcgttcccccatccttttcgatcaaaccagtgatgatgaacacgccggaacgcctggcgatatcctcgatccgagtgtttgctggaccggggattgtgattgcggctttgtgatacgcggcgaaagtttgacgaccggccgctgatcgggtacctacgactgctccgaaagattcgaactagacggtcaagagtaaagaagcaagtaagatgaaggcaggaacgtttaggtaagtacacgcgcttgcaaatacgaatcgataagatgatctcaaagcgctattcaacccatggggtcgatagattgaagaaagaacacacacggcccgactgacttttgggtaacctccaacgctatctcgtcccacatcacagccggcagattcatcattgatagaaaagagccagggtcagatgaatttcacaccctagacccgagtttgaagaagaagaaaagaaagaaaagaaagaggcgagaacatacaaagcctcaggaaacaaaacgagttgactcccaacggccttagcttcctgaacataaccctccattcgatctaacgtcttatcaacgtcgtatcctgctgtcccgcattgagctactgataccttgattttcatccttcagatctacttgtctctcttttcttctcgttttatttaggtgttccttaagattagactgaactagactgaatgatgagtagagtgaagaagagaagaaagaaggataaggtctcgtcgaccgaggtatttgacataaatatggactacacccttggtcatctcctatttccttcctatcaaacgacatctcatcgtataaacagtaatgactcgacatctgtctttctctctttttcatgcctccattatcaatattttatcatttgatgtctctattcgtccttccttattgactcgagtcatgacattcggagagatcttgttccggattgtaaatcattattcgtgatggatcttgtcaaaacgttgagaacgaagaagatcgaaaccagatatgacaagaaaaacaatagccggtccactatcactctcagaactaaatgccacttgcagtgttctctattatccggtagccggtcaacaatcatcgtcggttcacggtgtcgagttgataaggagtaaaagccaatctatatgatgttgagtacaggagaaaatctgtcttttctttcttggttcccgaaggagaggaaattagaagggatttacatatgctagatctctggtgaacgggccccttttcggatcgttcacaagagagaagaaaagggagtattttaaggataaacgcggttatatagtatgaagggagcagataaaaaaatgcaccgtgaaatgattggtgtggaactaggtagagatgtgtaacctcgaatagatgagaagggaaccaagatagaaggttcaaaaaacgtatgtagagataaagagagattcctgggatcgaaatatcaaacagcccaaatgtgagagaaagaaagaagagaaaatcgaaagaacccgttcagatggcccttcggctgtcctgctggaaaccagggacaaacatctggacgtcctcgttggtgggactggtcttggggacgctatcatcatcctcggacgagtgcttctccctggagtcgtgctcggaagtcttctcagaggtgtacagggcctgctcccgtcgagcctctcgctcccgcagactcttggacttgtaaccaaacaaggcaaatcggccctccttccacttggcttggaacagaatgagcatgatggcgatccagtagcagcagtaggatgaaacagtggcagcggtggcggtgttgttccactggaaaaggaagaagttaagggaagaaagaagtgggaaagttagtaaactgtttagagatgagatggagaagaaaaagaaatagaagcagaaacgcactccgaagatggcgttaaagatcatccatcctccgttgctgttgatctcggggtttccgtagttgacgtgccaaacaatgttggaaccaccgacattgtacgaaccaggaccctctccggactcggccacatcacctccgaccttggaggcccacgggtagtactcgcagaagtagacacccttgctgaaaagaccggcaccgatgcagaacaagaagcaggtcgagatgatcaagaaagtgtgaagagcaaaggcagatcctcctcggtagatcaagaacccaacctgtagaacgagcgcaaggaaggtaaggggtgggctgtaggattaaaggacggcaatcaatcacgacaaacgtacaatgagaccggcaatcagaccaataacaacagggagcggggtagccttagcaggttgagagatagaaacctgagagggggcaagaatagcgaacggggtaagctaaatgtaaataggcagtgcaatcaaaaacgacaagaacacatacaccagcaacgaaaacgacggcctcgagaccctctcggaggacagtgataaaaggcaagaggaacaaagcccacttggcggatcgaccctgcttgttctgaccggcctcgacgtcgttggactttgatttcctaaagatcgagacaaaggcttcccatctggtgaccggtcgagagtcaacagcgacgttctcatattgctgttggttgaaagcagcctggagcttaattctccacttggctcgagctcggtcgagtcgcctatgacggaagaagatagaggatgtcagtaaatgtgcgcaggacaagatgaatcaaagaagagaaaattgagagtggagactgacaagaaggcgatacccatgaccatgatgacaccggaagcgacgatggagaagataccctcccagagagcctcggactgaccccagagatcggtgaccttggtgtaccagacggcgatgaaagcggcaccgatagcgagagcgatgaagagaccagagaaagcaccgaaccaaatctggatgaggggtgtagtgtaattgattgagtgagtaaaaaggttgcagatgaggacccagatgtggaaagtgaccgacctgagttctcattcgtcgaatcattcccttgacctgcctctcctcatctgcagcatcgacggcatcaaacttcgaaccgtacacaagctgttcaacgctgcgagaaagggatgacagaccggaacaagaaatgagctttggtccgaaggaacaaggcaagtgagaacgaggatataaatgaacactcacaaagagagcagcacggagataacgataccagcctcgatcgtctctcggactggatgtgcgtgtgaagaagagatatatcaagaggggaaacaaggcaagtgagaaggtgagaggaaaggaagaaaaggtatcagtagaaggtacgccaacagctgacgggtatcatacatacacaaataggaagccaggacatacagatgatgaagaagatggggacggaaaagatatcctgggtcatactgggctaatggaaggcgtttgatacacacagtatagacttgaagagaagaagaaaaagagaggcaaggagcaatgggaagaagctgctcttatatccttcgttcttagtctgatcgcagagctatccgattagtatttccgttgccagctgcccacttgccacacggaggatgcaccacggacaaccacacagaaaccggaggaatgaaacgaataaaaaaaaatctatagagggaaccaaaaaaacaacagtaaaaaaattgaaccaacgagcgacgagcgtgagcggggaagcggaagggaagaaaataaacgatgaaaggagacgaagaagagaagggaaaacaggcagtcgggcaatgttcagccatatctgattaaaaacctagaaaggtcccgggcccctgtgctttcacgaggcgcctggccacacagcggcgggcattcagcacacggcctcaggcaccatgactggatcacacattctctcttggcgcagacaatataccatcggtcatatgctctctcgacatgcctctacattttcgttcagggtcccctctttcgggctgtacggacagtagcacattatctccaaaaatagaactgctgtccaatcgagccaatccggagcgagcgaggatgcgtcggccgtggacggtacatctatgtgtgggtctggggaagacaggaacctgccgatcgaatcgagatcacacaccgacgtatctgatttactgtcaatatctgattgtcactttgtgtgggcgtgcctcatcctgcataaaatagctgtactgcatgccggagagcaatcgttcctttttccacgcttgccctttctttttcgtctctctctctctgctaatgccccgtaacgcgtgtttctgttcctttctcttgaatctgtaactataaagacatagaagatccgccaactctgttcggattggtctacttctacagccgtcattcgctcttctgtctcaatcgtccttcgttttctttgctttctttttaatagaacgaacagcgtcacatcgtcggttttcgtttccgtcccccattttttctttcgatcttgtcgtttatagttcgttttctgacgatgaatggccggccaatgacaatagtaaaaaaagaacagaagagagaaatctcggttattgtacaagaagagatcgccaactcttttttttttctctttctattattgactataaaatactgataagagagtgtactggatggggaagcaacgggaggtgagaaaggaaagagagaaagaaaaaaaaggagaaggagacagaagaaattccatccaatccaaggaatatagggccatctgacacggaaagatcctatccgccgttgacaatcattggcaggttcaccaataggaaacgaaccgtctggcgaaccacaatacaccggtcacccggattcgttgtcttgttgtatcttggagtagataaataaataaacagccttcttggcgtggagagaagaaagcgaggaagccgggtatcacatctgctattggaaagagacatacgttcttccaccgatgagtgctgattcgttgaaaaccagcaaattcacatggagtaattcaactctcctgccgcctcttcactttccagcaagggtttctccggcaagaactccggttgttgaaatgcctgatgtaaatttccgtaccgtccacatcctgtcatcttgtttgaatcggtcaatcagagaaaaggaggaacaacaaaccatgatcctcactcttcactgaaatgagagaacaagagctgatagcatattagtctcgacccgactttcttctcttgatctgctcatacttgttgaagctacgatctcctctagtctgttggttgagtctcatcgaatcgtctcgttaccattacactcaagcatgaggatctcatacagacatgctacattatgatcacacacagaaagagaaaagaaaaaacaacgaatcatcgatacacacgtacgtttacgcacaacttacatacgtcttttcaccgtctgtcgtctgtaggcctgtaagaatctccgcgcgatctcccatagtttcctctgtctctgtctctgtttctttctctgtctctgtctctagacctgcttctactcctgctccgatccctgttccgccctacccatggaccatctcttttcggcgctcgataatccctcgaatccctcgaatccctatcccaagagggtcttgaatctcttaaatctctcgggttcctctccagattcctatctctttgatctcttctactactcttgaagttttcctctcttcttcggtcggccgcggtccaaccaggtcgagagtcatgtccgttggtcgacctaccaactgtgggtctgacggtcgatccagaaggaccggtcggcacattcgcgttcagagacgggtgtgaaggaccggctcgtccggcaggacccgtcggtgggatccgaggacccgtcggcggtcgattggatgcgtttgatctgcggtcgtcgaacgaacccggtccgactgggcgcacggccgatgaaggtcggaacgcagaagggccaccacccccggcgggaggtcggaaaccgatattcggtatccctcctgttggacgtctattccccaccaagctgacatcccctgcgctcttgtactcaaacacccagtgatccgttccttgctgattcaccgacgactctttccggataatcaaattcagctttttccttcctcctcgccaggaagcctcttcctggtcgaccaatgatgggatcacacccgtagatagatattccaccttgagagccggtggatcgattgcttctggtggaaatccctcgagcgattgtaaaccttcgtaagccctcttggccgaagctgcgtccatataagaaacgaacgcgtgggactttacagggctcaaccaccaaccaccgtcgctttcgtcgtcaccgccgctgtagccggcatgatgatcgataggtccgaacgggtccagtagacttcggagcgcttcatcaggaagcggccgtcggagattagttatataaagtgaacgtgtcggtggatgaccaccttcgatgaagttcgagggttgctcggcggacggatcaatctcttgaggttgaattacttggacagcggcagtagtgacggcgatggatgtatcaggcgaatctggtcgggctcgtttgttcacgctttcgatctcttcctcttcctcttcggtatcaaggcttcgcttcttgttttcggcctcggcttcggcctttggctcaactttgctctcttcctctgcctttggttctgatccgacctcattcaaagcaattcctgcgttagatgcaccttccgccccgtttgatccagcacccaactcttcagcttctttgacagccgcttcctgttctcccgtcaaaggaacaggaatctcatctggattaggagctaccgggatatccggctgctcgtccgcaggctgctcgacagatgcttccgccagtggttcacaaccaggaacaacctcggcaggaggagggatggatagtgtagacacaggagcaatcttgccgttcacgtctagttcgagttcgaatccagtcgagggcgttggttccccgccgacgacggactcgtccacgatcggcgttgacgctgaatggctctgaagaagagcgacgagctattcatccggatagatacgtgtccgggagaaaataaaaaaagatgataagaccaagaacacgactgattgagagtacgcgagatggctgggaatacttgcatctgctttttttgatgactttgagtagctcactccggccttgtcgagttccgctttgagctctgaaagaaagcaacatatcaatcagtaacataaataactctccacaccaagccaatctgatcgacaaaaagaaagactgacctgtaactttcaaagagggtatatcaagcatgatagatggtcgttgattgagatgttgatccgatgtgtatttccctgttttccatctcttgcacgcgccgaccaaaatactcagccgattttttcccctcctttctctccttctgctcctcctgtcacaccacacaacaccacatcgactttgcttctatcttctatctgtcactccagacaacacgcatacacataccctgtatatacctgatatcttgaaccttctcctctggcaaacgttgcttgcttgctttctgggaaatctgatccctaggtagtctttcccttccttcatcaatagcccgcgtatcatcgccctttcagttcagctaagctgtttgtttatcatggctgaatccaagcggacaggtacgtgatcttcttcttttgttcttcttgtcattctctccatctgtcttgtcttggtgaagtcattcaaggcagtcggctcaccttatcatgtctctctcagcctcgaattcgtctccaaaaccatcgaatggtgcatcagccgcttccctcatcacgcaaccttccttggacgtgctgacgatcccaaggagtccgtccaatctgtccagcctgggctctctaccagccatgacggtcacaggtgttctcgagtccaatggaggagattacagccgtgctttagaagccgtcgtcagagacagaaatcattctgtggaagagaacggtgagtctggagagggtctgttgtcatgttctggcacaatcaatcgcttctgctcgggctgacaggttttatcgtgtgttcttctccttccctcgttctctccgctcttctttctctgctattccaattagccggtctatggaaaatcattcaaaaccttcagctcaaagcagacgcctcgaggaacacagagagtcgacttcgcggcgaacgagaccgggcgttgatagcgtgtagattgaatagagcagtctccccgcctgatcagggaggatacatgccgtcagcctcctacctaccaaactcgtattcatcactcggtctgggcggagattcgaatccgtctctggctggacccatgtccggccttggcgttggtgggaatgcttccggtagccttcctcccagaagctcgtcgacttctgccggcctgacgcttggccaacaacagcaacagcaactttcgttaggcaagcgtcaatggagtgaggagatcatccggagcacccgtgggaatagctctcgggacaggatggagagcaactcatcaattatcagtaccgacacttttgccagcataaacacaaatattagtaacctgtctcaatcgaccatcggtggtatcctgaccgacgaacaatggactggtggagctagattggctagagattggggtgatcttgacgtcggggcgatcagcagtccaaaattgcaggcagattcgacaggccgagcagacaccggtcgactggcacctataccctcgtcaaccgagcaaccgtcctcctctgcttttaacaactctagcttacacgacgatcaatcctcctcttcctcctcttcttctcccgctcccccactcatcactccaacaactcctcaaacttcttctggccaacactcgctctcgtctccaatcatactttcgaaaggtaggccaatcgaacagttgtctttgcccggaaatcccgaacaacagtctgagggttcctctcagagggaccatgtaggaagaagcctgctcgattctgagagacccgattcaagcaagcctaactcattgggcgtaccattagcttctctgcccgaaggatccaggcctgacagtctttccactcaagcacctacctacgtgctatccgtgtcttcgcccgaaaacgatcgcagccaaagatctcgctcatattctgcttctagtaattccgctgttcaacccgcccaggatccctcgaactttctcgcgtctcccctattgcctccaatgacctatcagacgacatttgatcaggaaaagaacggaagtctggaggaatcgttgatggactcagaagcatttccactgggtccggaaaaggagcttcagaggcagcaacacctggcgttcagagaacatatctctccaaactctcttacagaccatgatctggcaagaaagtttcacctggaagaaatccgactagcccaacaccactatcgtggctcgtccgggcccctcgcagggaactatacctcctccacaaacgatcccaatctccatagactaccttcctactcgtcaagttcatcgttggccaatcataccccgcgccagatctctcctcggcaatttcagtcctcatcttcaacacacccgtcttcttcgactcctcaaatccggccgccgccttcgcctttttcttcaaactcatcgttcatccgatctggtagtacacccgttggattctcaacgtctgttcctatgtacttccagcaagagtcggaagaaaccatttcttcggatccaaaccatgatcaagctctcagctcctcgccttcgggtttccaggtcaggctgagttttccaatgttgccgtatacaaagatcatgattccctcctgcggagtgatgacgaatgaatatgggaaggacgtcgttcgattcagaattaccatttcggtttctcttccctcaccatcatcatcgtctttgacatcgtccattgctgagaaaacgtcatcatcagggttaagccaaccaaaagtctggaaggtcgacaagttgttctccgactttctggctctcgataatagtttaagaaagaggactggacggaaagagacgaaagctctagggatcccatcgttgcctgaggccaaagcctggagagaattttcgatgagtaaggtcgatcaaagaaaggtaagcaagtcttcgtttgtggcatgtgtacaatgtctatcattttgctgaaaaagattgttcctccaatcatgtttaatttcaaaccataaattgaagggtttgttggaggcctatctgatttccgtcttgcaagcaagaatgtcggacaaagaggacttttgctacttcctcagtactgacgtgatccctctcgagaaggattcgatcccggtcaccaaagaaggatatctcacacgtcgaggtcagagattaggagggatgaagagacggtatttcatattaggcgcgctcggtcgtccagtaatggactactttgagaccgtaagtacatatatccttgttggctcgttatcatggggtagaactgatccaaacgaaatccatggttgttcgatacgcgtgtgtctgtgtgtgtttggctatctttatatgtcgactcggatttgagtagaagggaggcccttacgtcggctcgatacccatagcaggcgctcagatcggtcgcagtaaagaaagcaccgaaggaaacgacccacatcaacgtcacgcgttcttgatcatcgagagctcgatctctggctcaaaaggaacgcgacatgttctctgtgcagagaccgatgaggatcgagacgaagtgagtgatcactgttctcaagctacggagaaagatcaggcgaaaagcagacgtctctgatcatttgtaccttttcttttcatactatgatctgcatcaccatcagtgggtcaaaatgctcgtccggttcactacaggagacttccctcgagcgaccaattcaactcctcaggaccaacaggcagctgagaagtcgcctacaatagggattcctcggtcttcaacgaataacagtctgaagggtgttcaacgcaagccttcggttcgaaagctctcaaaggatgatatcatcgttggtccagccaagcctctctcccaggtcaaccagagcacactgtccagaacaaacttgacgactggtccgcctgcgtcaacagtagcagcagcggctgagataccattggaagctcctcctcgaatgtttgactccggtcgaagaggtagcacgtcgtctgtccgaagcgacgctggtctcttgtcggtcatcacagagaggccgtttgggctctctccaaacggcaatggtccatttgcaagtaattcaggcgcccaacctgattcgaggtctcagcgacaaagcaacttgcctccaccaagagtggtttctagattaccgcctccttctcggtcgcctcctatcactcaaggaagccttcaagaagagaaggactcatttcggtcgaggcacaagatctcaggacctcagggaggagcgcccattccggccggcttcaagtttggagccaaagatgacttgccggatagagagcgaaagtcaaagtccggaagatggggctttggctttggaaagattagtacgttctctctcttccttatctttctctaccatgtatattcagttgattctatttattcggcgctttgaaaaggcgggtcatcttctcatagcaatttggtggctgctcgacctgtttttgcggtcccgttggcagaatcagttctggttgctgaaatagcgggccttcccgcggttgtctttcgatggtccgtcccttagctatctgttacagtataagactctttcgtgagaatggctttgctgagattagtgtgtttgacatcttcttggcctttagtatcaagtacctcgaagcaaagaacgcagagctagaggaagggatctatcgtctcagcggatctaccgctttgatcaaaagtctacgagagcggttcaatactggttcgtctttgaaagcattgatcaaaacgagtctaatagcagttcttgaccagaattatatttttcgcttggcgctgcttcagatggagactttgatctgcttcagcacggtgaaccggtagacccacatgccatcgcaggtcttctcaaggtgtgtttatcttcctttcgagttgctcatcaacatgagaccagactgatcataccctttctcaaatcgcagctcttccttcgcgagcttactactagtctgttgactcgagagcttcacatgcagtttctagctgtaatcggttcgtcacttctagatgctcctcgaagatataatgtctcaagagctgaccgaaaacgaacacacgtatagatttggccgagtcaaaagataggatccgagagcttcggcaccttgtggggcagcttcctgtccataactactgcctcttgagagcattgactgctcatctaatcttgatcgtggagaatgctgctgtgaacaagatgactctgcgaaacgtgagtcattagcttgccccctctattgagttcgctccacttatcttggacaactttgtataggtcgggattgttttctcgccaactctaggtattcctgctggagtgttctctgaactggtttctcagtgggtctaatttgtcaagtctgctggaatctgatttggtatatgtgggctgatatgtcacttgcgtttttttccaatctccagattccaagatatcttcgaagaccccccagaagctgtctctggaaccaccgctagcccggaagctttatccatagacccggtagatcaagaaccaactcaatcatctaggctcggtatggatcctgatcaggacaaaacaaagagaaactcagctagctttttgtcgtcctctggtgcagaacagatgttggggctctacggaaggaaactgaccagtaagttctgtctttttgaggacacatctttggccctgaaactgattgtttttccattcttgtacttgtaatcagacagtgatcagctagaagaagagagtagcaacgatggaacgaccgaggatgaagatgtctcaggtgaattcaacccgtctgtggtagatatggatagcactatccgatcccctgtatatcaacctccccctgctatcccagagcaattcaccaatcctgcttcagcaagcgatcggcgttgttcgttccattcccctctttattcttctctcgctccttgttgttgaacaaattcgctgacgtgaataccgatatatgcgttcaatagaacaatccatctgtctttctctagacggctcaaactgaccgactaattgcattatatagttttaatcggttcgtcctttcgttccatgtttacgtcggtctttgagttggcgctaaaaaaaaacagcttgactgtgctcacctattttgtacactttctcttatttaggtcaacttcatatacgtccttatacatattctcgccatcgccatatattctcttctgctttaaatcgctgtttattccttctcatgcatctctaccggatttttttctcttcctttcggtattctctttgactaaatgactggatatgggctttcttcgtcttttcttcttctcttcctgttttcctattcgttttcttctggcttcttaaaagcttcttgcacgttcctcatcgacggccgatttgacccgccgttgtctttcttattctccctgtaaaaagattctcccccttttacccttcgttcagatactcaaacgaatctttctatctttccttatctctttcaaaagctctcttgagagtttgtatacccaccccttgacctcaattcttagtatttctctggatgagtttttctctattctctcattcttcttacgcccatcgacactttgctcactgggctattaccgattagaaaaatcttcgttctgggaagtatctgcagagaaacacatcttcgaccaaagatcaaagttggaggctcttctcaacttccttctctaaacgctttccagaaatcggattgatgcaacttggctaggttcttagttttacctttaattctctttctctttctatcgttccgacggtacggaatattgaatatgagtgcccttgaaccaatgaggagagttgaatggtcatttttatttatttataatcggcctttctccacgaacaggacgtgtcggttgactatgatgaaagacatggttgaattccaggagtttcacgcgtattgacgagacacgagcatagttagagacaagaagatgtaatgattagtcaaatgtttgatagtcaagatgcagatcagagagaaataggcgaatatgatcttttatcagagaaggatgcttctcctactgtcatgaacagctctcacgcctttctcattatcatgatttggccggctatacccccgcccacagctgttcgttcgacattagagttttgaccaaccagacccagagccaatccaaggccagcccaaagaggagggaaaataaaaggaggagggacaaagatacgaaacaacgaaaaaaactcaccagctttatcatacttcatcatcgccatcttcggtgacaacctgggtctcgcaactccgtaaaacgtacccgtcaacgctgtgctgacaagcttgacaaggatcgttctaatcatttcagagcaccattgaggaagagtttattcgaacgatgtagtgattcagagtaaagttcaaacagaacgatgacaatgagaaaggaaaggaagaggaggaattgaataaaaagtcgatccgatccgaaccaaggacaggtaaggagtgagaggtagaaaggaggttcaaaagatcagaaacaagctgctcgatatctttcaaacctcacaattatgagattgctggtagcagccagagagtgatatacgaacctggcttttttgctgctactccttccggccatgatgtgaatgagtatgttgagtgttggtgggtagacggaagagggagcgtgaaggcgttcagggccgaaatggggcgattggtcacgtgtcaattctggctgttcaatcaactgattgatcgacagatagcccccactcgtcactctgcaaacttcctccatggatgtcacttcaaagaaatgtttctccagggtttctgccaaacgctatatagccataagatattcataagaaatataagaaatacatctaacaaggttcgtgatagttcgaatcagataaacgatgatgtggaaggagtagattgcgaggaaatgtgattgtttgaattcgagagacagaggtaggtctaatgggatcaagcagagatgatcttgcttgctctttctaccagacattacttctcacaacttttggttcgagccttctttatctgcagcgctcatcttttgttcaagtttcgataaagaggtgtcgacaagcattgacggacttgtttcgtcaacccatggtgactccaataaatcttttccggcgaacgtatttatctggtattccatcagtttctgaacgggatcaaaggatgatgctcgggatgattccaattgattagatatatggataaccggcgcagaggatcgagtggagcgagaggaaaccccagtaggcgggggacctgcataggaacctgttttaaacgtacaatggccatgaaccttcattgagtaccgtcacttgttcggatatagagataaccaaagacacaacaagaacattcggggcgcaccggagtgtcttggagaccagcctggcgtattgggagtctcaaaagattcatcctgactaaaagaggactcagcggtacccggtcgagcaggtgagatcgatgagagagacaggggtaagttagttgggatagaatccagggaagaaaagcggaagtcatcgaacatcccaaaagagggttggaacgagtcgtgtaggggagagacctgattgaatgctgagattgggcaaggttcctaaaatttccgagatacagtgagcagatacacgtcaagaaagggtagatagatatgtttggatgtacaagttcatcgacagttgcgtccgtagcagaagccgcagaatctctcctccaggctctgtaccccaactacatatggtaaggtatcaacagcaactcactatcagcttgtagaccgaccgactatcgaccacattgacacaaacctcaaccgttcttgaaagatagaaacaagtacaaaccatagcactttttggtccagatccactctccacggcttctcccaaaccgtcgaagatgtgagatccatctgagtcatcctcttcaggcacgttgtccaaaaccgaaatttgctatcgaagtcaggaaaactgtattttagtatcgcgtacacgaagtctgactgaacgaagacaagaaatgagtagacagacggtataggaaactcttcgaccggtctggttggcaaaggtcaagcttggccgacaggatcctgaatgatcaccgtcttttccgggagtagcaagcgggtttgagtaccttgagggttcctctgtgagagctgactcgagcccaacatcctcggtggttttttcggttcggtctaaagtactggcgaaagcggccatattagtgatagggatgatgttactcgagattatgagttcagtaagatgaataagagtctttctcgaatgttgaagttcgaataagaatggtagacagaaagaacaaacacttcattgaaacattgttgtcgaccaagaagagaagagaggggaaaaaggaactgaccaggcaagagatgtgacgaataaggaccctgagagtgcgacaaccaggtcgagatcaagatggtcaagatcaagacggtcgggatcgaggaagagaggtccagcgcgagagaggataggcgctctagagtaagtcgagcggttcctttgttgttctgttcaggtgggtttgatacgtcaccctgtgaatacagatcagaagggtcacatcaatccaggaacatgctctacgctgatcagtgaaaacatttctaggtgatgcgtaagccttcgtcatcacatgtttatcctgtgcatttagtcaggagtgtcagtcaacagacatgcgcttatggaggttctatccaacgcttggagatagacgcggtcagtggtgaactcgtcggtgagtgcgatgaatgctgtagtccggagtgatgctcggggaaccaaagaaatccctggcagaaaccacaagtgcgagtatcgtttttttacgtattgttatccagaaattggctctagcctgataagataaccacgattatcaatgatcccgaatctgaagtcggtttgacggcccaattagataaaaattgacaaaaagccaagaacagaagtaatactacaaaaacaacaaattcggaaacaaacggatggacgagggaagggctgccgcagcgtcggaatgggaataaagtaaagaagcaacagagttgtgtccaacgcggctccggatccgaggaaaagatgggggagaaaacagaattgaacagattgatcattcatttcttcttcacaactatcccacctaacaatcctccgatcttcttcttcttggccactcctcctacgcctgcgccaaatccaaagccaccccctacgcccgtgcccttccgtgcaaccccagcttcgaccgcactaggacccggccgaccagccaaacccttcttctccagcagactggccaacgatggtgagtcatcctcggtcatagaaggatcgtattttcgctttactgtgatcgtcgattgtattggtttggattcttcgccgtcggctttctccggaacatcttcatcagacgatccatattctccgccaagagctacaggcttagtggagctcgatgggatctgcgcaaacaccgaccggaccagcttttcgtcctcctcttcctctgccagtcggaccaagtcttccgccgttagtgcccccttggatgtcgaaggatgaggctcggatagcgagatgccgactcgttcgtttcgagcgttccgcgatctttgattaacagtcgaaaacataaatatgcgcgcatctgatcagcctatattgtaacaccgtggtactccgagatcatagcccatccgacagaaagacattcgggagacggacagaggcagttgaaaagacaaagaagaacttacctaatatcctgcaatgcatccagaatgtccatctcccgcttcgcgctctcggtcgaactttccaacattttcatcgcgtcttccctctctttatccgccgcagactcttcctcatcgtcctcccctgcgtcaggcatataggtcgccttgttgtgttcatctgcatcatctcgccaggactgggagccacgagagtggacaaacacgtgttgaaatacaaacacagacgtattagctatgacagtcggtagagcatgaaaggcgcacagaacgagcagaagacgaagcaaagcatacctcgaagtttcgagacgctccatgttcggctagataatccgcattctgaggatctctgaagaattataaacatgaagaaagatcagtctctccattttgtgcagatcttgtctcggcagagagaaaagaaggaagtttgacatgatcaatcacgcgaactcacgtcttgaaggctgcatacacatgaacgcgtggattaagtgaattgtcagtatttggctcagtaccgaacaaagacacataagtcaagaaagaatgatacttactaatttctgacgaacaaagcgtgcatttgatgtagaatcgaaagatctataagcaagcaaggaaggaagcgaatgaacgaacgagtagaaagacacggtcagtggacgattcttgtctagctatgataccgtctccacgcaagccataagaagtcaaagtggctcagacagaccttgataccgtggtaatcttcaccaaggacagtttccttcctggcgttgaacttcttgcccttgtagatatattcgccacatgagttgcacctcatcgagaacggggccatcagacgaacaacttgctggtcattcttgtcctttagctttcgccgaggaattctagagattgccaaagagtcacgaaacaaaaagaatgagagactggttccatatcaagacagacaggagagataactgagcaacatactttgccgggtcgaaatctggagggaagtactagataaagagaaagaacgagtggaacaatcaggtccatacactcgaatctcagaaagatgaccgaggcgaagaacaaggaaggaggtacttactttgttgaggacctttcgctcagacatgatgaagcgactgtatggatctgtctaggtgcgggtagagggatgtgaaagagggatgtgcgtagatacgcaaagagaccagcgtccaagtcgaatgaggaagagaggcaaactacgagtgagagaagatattgtcgacctggggtagaaaggataacaccaggcggaacggtctagggttatgaaagcccagacggtcacccagatggacccccaacggccccaaacagcacccccgataggtcacggctactgcgcatcagtttgacccagatgacaccctgacaagccccagatgtcacccagatgaccccaaaagaccaatgatgtcaccgctctacggaatgtctgttctcgctgatgacgccgtttgattttgttccaggtaaaaacgtacaagaacgaatcgtttttccacattcttcctttcttcttttctctccttctctatcttgtatccatctcaatcttacatccgtctctatctctatctgtattgctgtattccatctccatctccatcctaaacacacatatatattaaattcatattcatcaacatgtccttcgctcgagtcgccctccgaactgctgccgttcccacttcggccaggcagttcgctaccatctcttcccgaccggttcgtttcgttttcttgctctttctgttcccattcgtcttctccttttcctcaatgacgaaatcttaaccataccaaactctcttttcgatatcttagtccgctttccgaactattccccgagcggttccctcatcggtgtcgcagcgagtagcctttgctcctaagcgatttgcttcaaccggggctgcctctcctgtccacagtcacactcctgtaagagcctcttcttctctactcgtttcttgtggcttcaagttgattcgctaacatcatatatctatcattcggaatctttagatgtggatcgttttgggtgtccttgttgccggaggatctgccttgtttgtctacgttaagcccatcaggttggccaaagttcccttctttttctcccatctcgcgtctttcagcctagcttattgtcttccaacgtactcttaattatatcagagagcttgctgccaaggcccacactatgattgacaccaccaaacagggtgccgaccaggcctccagcttgtcataccaggccgcttccttagccggactcggacctgcgctcgccatctcccagaccgtctacaagaagatccaggagcacggtggactttctgaattcttgaacggtatctcaaacgatcttaaagagcaggatattggaggtgccctcgctaagctcaaaaaggttggaggaaaggaggtcgagcctttcgttgatgctgctgagaacgctctgaaggaagccaagggtatgttgctctcctatgctttcatatagacaaggctacccactgaagcatgtctgtatcctcctaccgtttataggcaagatcggagacgttgactggaagtctttccttgagaaggctcaggatatggtcggcgacgagtggaagggcatcatcaaggttggttgaacgtttcttgtcatttttctatattattcgagtatgtggcctgacttttttcttttcgacctatgtagtacgtctcccagtctatccctgccactggtcctttggccatcgctttcgctaccggcgatttctcctctatcaccgacaagatcaaggagcagggtggtgaccaattgaaggagcttgaggctacggcccagaagctttacaagaaggcccaggagtacaaggatggaaagggcggtcttgaggagctgttccagaagcttcaggatggttcgttccattcttttcaaccttgttcatctgactatgcatcttattttgaaaatggtattcacgatttgttccgatttaatctctacagctgataaggaggatctcgagaaggtattgacccaggccaaggctgttgccaagaaggctggcatccctgccgataccatcgaatcttggttggccgacaagtctggcaaggtcgataccgagaacctggtaaggcatctaattttcagcgatgtctggtacatgatctcaaacttactgactcttatttgactcttcaaatctctgtctatacagattaagcaggccaagtcctacgctgagtctggagctgagaagatctctgacaaggttgacaccgagaaggtcgtccagaccgtccaggtcgtttctcccgcgttcgcctcgcttattgcccttgccctctccagggctggagtcaagcttggatcctccggacagaaggctgccaaggagggagaggatcagttcagctccagcaagaagcagttggaggccgtcgtcagcggattgaagagtgagcatcttgtctattcacgcacaacaaagaatcaagctgatggtcgctttaatcaaattcaacagccgcctccgggtccctctctggcgatgttcagaagcgagtctctgctctccaggctgatcttcagaagaccctcgataaggctccctctgcctctgccaccgccgacgccgtgaaggagtctgctaagtctggggagaagacctctgatgccgagtccaaacagaaggagtgggagtccgctctcaagaaggctaaggctgatttcaagaagcagttggacggcttggttggcgaccttgagaaggctggaggaaaggacgagaatgtcaaaaaggctttagagctcgccaagagctactttgcctaatgaggaagagctagacataaaaaaggaagacctttaccatcgtcttttcttacgtacgactcaaccttttactttactgtagtgtacgattaagctgtattttgtagtggatatcattttatctttatatctctttctggtgcccgtcgagctgggccaaatccgttagattgtatcctttgttgatacatctcaaaaaaccatcgatacatgtggccttctgatttccgaaatgtgtctcagaccgtctgttgaagagagcaacagagacgattaagaacgttagcgaaaagaaggttgcttcattatgatgatgacgcaagcggtctcataaacgcgtcgtgatattatacacttgcacacacatacatcagacgatcattctttcctgagacacttatcaatccgatccagcctcaaatctagtccctatactgtatcagaccacgacggggtcttctatcaaggtttatgatccaggatgcctcgcaacttgccttttctcacgtccatcattagagagattgctcctccagaaacggacgatctattaattgtcgctaagggactcggactgagaaagattgtttgtaccctgttaaaaatatacgacggagagaagaacttggtccttcttgtttgtctcctctttctctgctttcatgcatcgtgacttacctggaggaaagagagaggataactcatgttcattctcattgggatatatgatggcaccgatcgtgaatattgggttgagtcgggtcagattaatgctagtccagacgaagagaatggcatcggagagcttttagggatcatgggtgttcggaagcctgggctgagaaaaatcactcatgagatgccatcaaaagaacggtctgtcttctccttcatttttgcaattggatctgctggcagctcttaaatgtgtcttggatttggccgataacccaattcagaaacgaattatacctacagggaggaatcttttcaatcacctctagaatcttgatcgtcgacttgttgacaaaaaatgttccgacagagatgatcactggtctgatggttcttcatgctgaaaagtttgtgcttccgtcttcattgagtacttgaagtgtagtatcacaatgcctaacatccgggtctcttctcatcagggtgaatcaaacgagtcaggaggcgtttattgtccgactctatagacaatctaatcatgtatgtctcttgggcagacactcctttcgattgagacatcaaactttcacctagatgctcaccttttacattctatcttttcgatccaacagcaagggttcctcaaggctttctcggatgaaccggaacatttcaacgcgactatgactccgcttcagacgtgtatgaagatgctttcccttcgaagggtcactctttggccaaggtaagctatacaatcaagaagaagagagaaggaacagagcgtatgtgcttgataaacaagaataacatagactgatcaaagccactctccagatttcacgcagaagttcacacgtcactaggccagagaaaagcagacgtcattgaactctaccaacccttaacgaaaggaatgcaagagattcaaggcgccatcgtcgagtgtatggatgctactctggcggaatttcgaaaatctgcatctggggttcgtcttctactttcgatcattgttttgattgcgaaacaattcgatcacggtgtctcatgttcatttctggctacttttcttccaatacaggtggatatggacgaaatgacggtagataatgctttgttcagaaatttcgacaagattgtcagaggtcaactggatcctgtttggcatcgagtgggtccgagaaccaagcgtctcgtttcggatctcactactctccggttattactcaagtgagttttgttcgctggattctttctttaaagattatgaactgttaccaaccaaccaacccttatccatcctcaatgttcttcccatagttatcttcttacatacgattccatctcattcaattcccacctagaaaccatcttgacgtcagcaacgatcgccaatgccgcgccttctgttgctctaggaatgaaatctaaagcaaacaatcaatctccatggctttacctcgatgcagccaacacgttgtttcacgtcgccaagcgaagagcttacattccggctcctcctaagaagaagagagcgccatcagccatcttggctggaggtcagagagaagcagatgagttccaggatgcagaggaagctctaagagatattgaaagacaggagagagaagacagagaggcagccgaacagacgggtggtgagggaggggtctggccacctggggttcaaccgatattggaggaactgcctaaatggggacttttagctggcgtgttggaagagatcgaggaggagatcgcagccttaaaaaccacaggtcaaggtgaagggcactcctgatagttcgtcctgctactcatctgaatctggctgacgtatcttttcatttactgcatatactgtttcctattacaggccaacctggaacgaacaccatcctcatcatggcttcttcagatagaacatgctctcaactccgagaatatctgacctctagagaaccaaccccacctgcgccgactaattccagtgggcctcaacctacatcgaacgttgccggtagagagatgatggaacgaatgttacgaacttatttctggtggaaaggtggtctaggggatatgagccgcaatctacgagggaccaatctggctacaatcaagtcatccaacaatgaagcggaccggttgagcgcaggcgcttcgagagaggacgtaggaagagggagaggttctattccaggtcagcctgcgttcaagaggagaagagtccgagcgggaagtgtagctgccagtgtgagtgggagaagtaagaacaaaggggatgatggaaaggtcaaagaagaagaggatgagagcacagagctcttagatgtcgaaaacatggagattgccgatttgtgagtcagaaattctacccagtcctgctctatacatatattctcaaacagaccaaccctctcgcttttctcagcctccacatgtcttctcagcagtttcaagacgaaggctttcgtgatggcactccagcacctccatcctcctcttttgctagacaaaggtctatgacccctgctcctgccttccaccgacagccatctatgactccttcgagagaaccatctgtccctcctagtcaagagagatcaatggctccccttgaaacgactcaccgaccgaccaaagtaccattgttccgtgacccttccgagggtccttcagattgggaaggtgaaggaaatatcgaatcgttagacatttattctagaccctttccagaatacccgtacgagtcatcggacgcccctctacgatcaatcactccaggaataaatcgacagtcttccccctcgcaaacccttcttcggccatcggctcaggataccatgactgaagtttttgacccagaggctttcgatgagtatttcggactcctccagcctgaagacttaattgtagttcggccctacaagggggacgatgatgatcaggtgttggaggaacttcgaccgagatttgtggtcatgtatgatcctgatcccggattcattcgaaggattgaggttcgttcaacgtctcatctggtcgaagcaacacatgatacagctatggcggtgtttacagatctgctgatttgtgatttcaatcgatttgaacaggtctatcgaagctcaaatcctggcttggcggtcagagtctacttcatgatgtatgtagactctgtagaggaacagagatatctcagtggtttgcgaaaggaaaaggaggctttccaacggctgatccgagagaaaggggtgagtttcctcctgcctatttatgatctcacatcatcgctcatccctggcattttttgtcgcatcttagtcgatgcttcttccaataacgggagatcctcgaggagcacctacagaatcgacatccaacgtcgaaacgcttgccaaaatgatcagtactcgaatggctggaggagcatctgctgctgaagctgaacctgcgactgtaagactttctttttgcttgtccattcttttcttacttaaagacctttcaccaaccaagcgcgttaataactttcccatgtgcgtgtacacaggtcatagtggatatgcgagagtttagatcaacacttcccaatatgttgcatgaagccggcatgctcattgtgcccgtcacgctctacgtaggagattacatcctgaatccagagatgtgtgtagagagaaagagtcttccagatctgattcagagtcttgcctctggtcgattgtgagtccctgtcctctcttctttttgacgatctctatgatttgcatatctcaaactggcaatctttgggggttgttgatgttgatgaacaggtacacacaatgtgagatgatgagcgtccattacaagatccccatcttgttaatagagttcgaagagaaaaaatcgttctctcttcaggtacgtctcatgccaacatctcaatcgttctcccactaacatcacgctctcttttctattgcattcttctgcttgatcaacaagtcgattgcggattcgaaacgacctacgactttcaagaaggacccgaagactgagtcggtagtgaccaggataaacgaccatgagattcaatcgaaactcgttctgctgaccctaacattccctcgactccgagtgatctggtcgtcatctccgatcacgacggctgatatattcaaggacctcaagatgaactttgcagagccggacgcaaagacggcaattttagttggcgcacctgatggagaggaggatgatggcggtggcaacgtgggggccttggacctcttgagaaacctaccaggtgttgtgagtgatgttacttccctttctttccttctcatcatcctcgtgctattggatccgtttataagagaaatacgagacttaacaaaactcaacttcttcttctccctatgcacctgtgaatccaaacagacgggaaaaaactttagacaactgattaataaggtagcttccattgagcatctgtgcgagatgtcattactcgaactagaatacgtatgttcattctttcatttactcacctcttgtaaatcgacaacgagctcatcattgtagccctccttccatcgttctgggttgttgcacttgattcagataattgggtcgacaaatgctagaacgttacataagttcttacagtacgtaacccgaattcgttctattgactgactaagaatcaatctctagaaaatggcgctcatcctgtcgattctcatgcttggtttcgttgtgcttgattcgaaaagccgagacgttcgaactcgatgaggtgctcaagtgtatattctgtatttatcataatgatcatgcaatcatcctatttgtgtaagagaatatagagaaggagataaagaagaaaatcgggatatttctatcttgatcttgaggagatctacaagatatcaaagcaagagcggtcccctctgtttcttacctgtaaggtaagaaacgaggaaagagattgacactcgttcatttacattttttcgtgctccaagaacctagtgagcatctctaggctttccgccggtttgtcatacggaaccatatggcctgctcctttgatcgagacgtatgttaacccaccgtacgttctccattcacctactgatcgatcctcgtcgatcgagtcggattgattcatataccatggcacgatcggctgctcattgaacccaacggaatgcgtccattctaaccgagacgtccattggatctgatggataaagttgcactggaaatcgtatttcccagcgtagatcaaaaactttataccgtgttctaagagggaagcgacatagaaccaggtctttccggtgtgatcgccagattgggcaaaatccattcctactttcgagtcgcatcctgtaaagtttccgacgtggggatctattccgaggaatgatctgtgggccgggttgtctaggtacgagcttatagcatctttaatagggcctataaatttggggtagtagaaacagtctttttcagctggtggacggagaggaacaagagtttatcgagaattaaatgacgaagaggggaagaaccataacagccgctgccaatgcaaggcttactcatatctgggagttaagagaaaagaaccatatcaaaactgctctaccatcggtggcatgtggtaagagatataacaaaaagacatatacgaaccatacgggttcaatccggtggcggcgaacggattcttgatccacttgtagcaaaaagagatggcattctgacaacccaacgggtctgatacgtcctcacagtattctttcatcatctctttgcatctcggcagcgtggcctgcatctgggcgcactcggagacggacaatactggggatagaccggagagagaggtgcatgtctttggttgtgtatgagagcatatgagagaaatggagccggggaggacgaaaggcaggcaggtagacaaggaaagaaccggaagagtatcaatctcatcgagtcttctgaaagaaagagagggaataaggcgcgaaccatgttgtagtgagtcaacgtcaggtcaaatcgatcctggagaaagaaaaattcgtcaatcaaatgtgtaggcaagaacacacattcagagagtttgatgaagaaacagagagagaatctggatagacgtacagtcactccattaccaatgatgacactctgtaagttgatcgggtgtttgagattcttgtttccgtctactaccgccgctccaaagagagggagatacttgatgtgcgagtacgtcgtacaagagagaagacgccgtcaggttcactgcgctcactgagaaacaaacatgatagccggtttgacctacccgtcctccataagattcccctgagagatggaatcttcgacctctgaattctttgaaggtatcgaaaaagatagcgatgaatgcttggacgtcaattgcagcctgctctgtgttggataccacctgaccgtttgatccatacgataagccgactccgatgggcttagaggggaatttcatcatgagcagaagagaggtgagcaagatgtaaaaaccatgtcgcagatcaacagaagaatgtcttacctgatcaagaaggaagacattaagattcgagttccaagcgtacggattgacttccgtcccgttcaagcttgacgagtcgacgattttgcaaggccctgttatgagaatcatgaaggaattgaccatgttctggtttcagcagcaatccgacagaaagatatatatcaagatcccacctagctcttggaacagtccagtctcactaccacatcctgggcctccctgtattgttgtggcaggagatgacgataaaaggaaaccaaagttgatcaattcagtgatctgatgatactaaacatgctatagagcaggtcagagccatcgccggatatggccgaacatacgttgatccacatcagcacatcgtctttttctggatttgatttcgagaggaagaaatagaagaaaaggtttcgaccgtgcgagtcgacgtccagatagccagtgtacgatctagaagaggaagagaaaaaacggttagatgtaagttgagcgataacgtgtctagccgcacgaaagactcgatgtatctttgttgttttgagcacagaaaagactgagcaatcagatagagaaggagaacagcgaccgacttgacgtatggatcacaccaaccggtggtctctttaattctgattctatgatcggcaaatgattcatgagtgaactgtgagccagaagattcgaccataatttgtgagatatttcagtacatgaattggccaaggccaggtggaaagagctatgaggacgaacgaccatgtgtgtttgaccctgaacgtctgtcaatctgaagtcgtcctgagcatcgtgacttgaggatcccggagaataggctgcgttggtgctggagaacaaagcaactagggcgaatgagctagaaagtagcgcacgtagattgaccatgtcaaaggaatggatccagaatgcgaggagacagagagcacgagatcaaggagaaagagaatagagaaacagttggaagcacaaggtgatggagaagtagtagagaatttgtcggacatggccggaaaggtaccatgcacgtgttgtggcaagctgtcacagcttgaatccgataagatgtggcccgaacggaactttataaacatgaaagtctggaacacaaataaagttctgttaccgggtttagagtgaggatggaggacgaggtttcagggtgatggtggcaagtgtagagtaagcggagagagcactggagggagcatggacgagatcacaggataacgcggaggaagtagatagcatgctgtagagagcgagcgcaaaaggagagcagagtggctcaatggagagacatccggtagaatgaaggaagagagagatcagcacgttttatcatcctagtacactcctaactctgcaggatggcttctccgtaccgaccctcttttgggtgtctcactcgataagtgtaggaagacgtcttctcctccttcttgcgctctatcagagagttatatatctaaaccctttctggtacccgagatcgatatccaccctgtttgcttttgtctgatttctgtggtacacacattcattttgcaatatcacccgagcttgaccgaataggaatagagctcttcataaccttcctcttaaccgcttcctctgttgggctggtcgctcgagtttcagttcttttgccaagtcgaatttttctttcgacttaaaacatcagatcttccttccggtcttatcactcaagagagttcccatcgtccgtcctgttcgtacgttatcgacctttcttactggtatcgcttcccattgtttcttctcttccttctcttcttcttctcatccttggagcctctcccacatcttgtctcttcccgatctctagtatagattgcaaggcaatttttctgcccgagatgcttgtcgaccttctgctcatcgcccttctttcgagcatatgtctggccagcccgccagcgacatcagccacgttctcgtccacctctctcatcatcatcaacaatatcctcgactacccaaccggtctggtcggcgcggccagacatggaaggctcagcgagtacctgcccgacgtttgcagaagcccgtgctcaaattataccgactgggaagctgttcgttcattatcttcttgcaacgctttttcgccgatttgtgcgcgaattccgaatatgccttgtctactggaattgaaggcctgaccaggttctctccttactctacctgcgcttgactactcccagtcctgtttagtagatatgtcacataggtatatatccatcattcttttaagcacatcaatctgactgaccgaagccattgggttctaccattcttattgatctcagtgaatgtggcctcaaattttgcacgaggcctatggcgctaagctattatagctgtgtcaattgcatgctctatgtgcgttatcttcagagcgttttcctacctaattcgcacgtgcgacaagatgcgccaaagtatctgacatcgccctccgcctttctcttctatcattccttcattaactcccaaccgcgctcgacataggttaaagacccaacgctattctctcccagacgttatgtttccctcgagacccagtccaacagtaaggtcctcttcttgctgtcgtgctttctcatgtttatacttctttgactcaattctgacgttcacttcctcctcgttgatagttattcaaatgtcctgtaggggctttggacgatcgaccgggccattgatagaattagcgtcctaccttcaaataggaatgaacaccaataatgtcacagatttcaaaccaccggacgtcagagccatcgctgtgaccgtttcctctgctagatccgagtggggatcgaggtcaaggtcgaggctgggcatggtaggtatcgggatcggggtcttgggatggagcttgctctaatctggatatcattctctctatccttcttgtgctctgtcttttggtttcttccttcctgtcctctcctttgtattgctttagatcttgcagaccttttcatcttgtacggtttgatatgtcgtcttctcgtctactatctcctattcttctcagaagaacacatataatacaaatagaactgtatccatattcatatgcttcctctacttacctccatttatcttgatctgaagtctctcctccgaagaaagagttttttttcttttctttttttccagcgttccttccttctctacttctatgttctgtcttctttgcctcttgcatcttggccctgttctgtgtagagttcgttttacgaatgatatggtgtttccttgattttcaagtggcctccacgctattgaatgcccggacagaaggcaacggaagaggaggaaggaaagagaaaaagtcgcctaaattcatttccatagtttctccccttcccatccgaaggggatctttttacacctaatgatacaaaagtttctctctaaagaaggtagaaggaagaacgaaaaatcgagaaaagggaagaagatgaaaaggacgtagggacgatcgaccatgagtctcagctttgaacgaaatcacataacttgagcgatcgacagcccagaggaacccagagtttgagaccaacgtctggattccacaaagagcctcttccttcctcttctggttgatgtcctgttttcaatccattcgagacttgagatacctcgtcgtcacgtccttctgagtactgtatcccaccccaggtcaatcagataagaatcaatcaaagcaggaaaaagaaaagtcagaccatgatcagtatcatagaacacgaagagacattgacgctcagaaacatacatgatgtgaacgacagctccatttccggagagagcatctcggtcaagagagttcaacaggacctgcgagattgtctcaaacagatcttcaggctcctataaaacaggcattcgcaaacatatgatgaacagtctttgtgagtctgccaggcgacaacagagaaacgatcacaacgaggaaaagatgccacagatgacgacatacaagatcaggctcccacagtccttcggccacaccgaagagcttctcggacgcagtcccagagaccacaaagtccttgggcgtggtgatacaaccgatcctgtagattgaccgaggcttggatcagtccaagattggacagtaaggatttttgctgagagtagtgatgtgcatgtacttacaaatcggtacaggcaatgaacggtttagggttcgggttgagcttcgtaggagccggaagtccggcaacgactggctcgatgaagtaaggaccgaatctgattcaaccaaaatcaatttccgtgttagtggaaataacttaagacaaagatagaaggatcaatcgtgtcacaaagactactcaccgcttctcgtacagagtagacgagaccagatgacagaacgtctcgggctggatctctcgctcctctttcattcggtacatgtttactcggaatcgaagggattcatgtctggcggttgaatagaaatcaagttcttagtctacttgtctcggcgcggtgtatgagagggcaaggattggagcatacagcgtgtgaacatccgaggctagaccgggaagaccgacgtaaagtcgatcatgaatggggaacacctaacaaaaatccaagtcaccgatacatcaagccggtcagtcctaacatctctgtacaatgagggttgaaaagaaaagcagaggacagaccttttcaaagttcatagcgacaagcatggcctggtttcctagccttagatctgaggcgatggccacacagtccttgccgaccatagcgatgaccgaacctgatgcgtcgacccggaagaaaagatcatcaccgatgagtacactgttatgcaattcagacaaacagaagaaccttccactcacctccgttgatttgcattgcagacatgttaggcgaatattctctatgagtgtgatgataggaatgagtgtagacagagtgaaagaaaagatgaggtagatggcagaacaaaactcacggtctgcatgtcgcgctggaataaatcacagttatttgaatacttacgtaaaccaacgtgggatacctgaataccttctccaccttccctccagacacatagataacactgatcgacacctttaaccgagtccgtctcgagaaactcgtgctgatcgataaatgcctaaaacatgaatcatcatcgtcaacatcaacatcaacatcaacaacgtatgatgcgctgatggtcggttgaacgtgtctttgagagaaaacgaccagccggtcttttgcatcgtatcaatcctttcgcctccattctgtttacccttccaccccaaagagatagcggggagtattggaaaaaaaagcagagaggttgactcggctgccttagcctaggaagaaaccgtcatcaggcggacagagccgagttataa

SEQ ID NO: 3006 - DNA, 36885 bp, Xanthophyllomyces dendrorhous
ttataaaccctgttttttttttctccacaggatgtccttcctgtttcttctttctaccttcaacctagtcaaaggaaaagacacaacatctaatacacactccaactacttcactcacacgcacacatacactcacacaacatgaccgccactgacaagcagctttcctccgaacagatcatggctctggagcatgcgtacgttccttctttccatccaagctcgtctatgttcaccgcttacattgccctgactgtttatcttgtttgattccaacagcaagtccgctcacaactaccacccccttcctatgtaagatctcatgtcgtttgtttattccatagcttttcgtgtcgtctgacatgtacctgttcacatctttgaatgtcaacctatccaacagctgcttcgaccgagccgagggttccaagtaagtagctccttcagtctcaccggcaatccaccatgcgtctggaagcttaccattcttctgttccgtctgttgctatcgtatagggtttgggatcctgaaggtcgagagtacattgatatgctctccgcctacaggtttgtggttcctccttgtacacgttgcacatagctttgctgcgaacacaccccgactgatcacatgccttttcttgtcttactcctcacgatcagtgctgtcaaccaggttcgttgtcttggaattttgccctgtgtattcacttataacgaagaaagactaacatacaacaaaccatcacgaacatcatctgtagggacattgccaccccaagatcgtcaaagctttgaccgatcaggctggcaagctttcgttgtcttctcgagcattctacaactctctcttgggacctttctccaagaagatcaccgatttgttcggatacggtatgtatttttctttcgtgcgctcgcgttgatgtatgatgtatcataattgcttatctgtcttcctcgtttgtctagacatggttctcccaatgaacaccggagccgaggctgttgagaccgctctcaaggtttgttcttattgaacgcgcatcttctgcttccctcatcatacttaccatcacgaaaccaatgtcttttatttgttcatcagctttctcgaaagtggggttacaccgttaagaagattcctgaggatcaggccctcatcttttccgtctctggaaacttccacggtcgaacactcggtatcatctcgatgtccactgacccagagtctcgagtcggcttcggtcccttcctcgagggtgttggacccatctgccccgctggaaagggcgaaaacgaaaaggcctttgagattccgtacaacgatgtcgaggccgtccgagttgctttcgagagattcggtgatcgaatcgctgctttcctcattgagcccattcagggagaagctggtatttacgtccctgatgagggatacctcgccaagatctctgagctttgcaagaagcacaacattcttctgatctgtgatgagatccagaccggtctctgccgaactggaaagatgcttgcttgccagtgggataacatccgacccgatatcgtcactcttggaaaggctctctctggtggtctttaccgtaagtatatcaagtattctctcatcatcaaaccacaagttctgacagaccaattatattacatctttttcaacttgatagctgtgagtgccgtgctggccgacaaggagatcatgctctgcatcaagcccggagagcacggatccacctacggagggtgagtgccttttgattctcatcgcacatctttgcacaagtcatgctcatatattatctgttgaaacacattcagaaaccccttgggatgcgccgtcgccatcgcttctcttgatgtactcattgatgagaagcttgcggatcgagccgagcgactgggtcagatcttccgatccgaaattgcctcgcttaaccaccctcttgtccgacaggttcgaggacgaggtttgctgaacgccgtggtgttcgaggagggcaagagtgtgaagggtcgatctgcctggcagttctgtctgctattgaagagcaagggattgctggccaagcctattcatgtaagtatcatcaccaataacccatgcccacttgattagaccatatgtagctgatcactcaaccgctcttttccttactctaggtcaacatcatccgattcgctcccccgttggtcatcgctgaggaggatctccgaaaggccatccagatcatcaaggagagcttgcaagagattgatgaggttcgttaatcagaccattatctccactttttggctcagcccttcctgaactatctgctgacatgttcgttctttgtcctacagatcgatgaggtccctggagagactgctgacgagcagggctacgaggctttcttggacgaataagttaccacatagaagaccggagtaatgtccagttagatcgacatcccaaaagctcccaagggaacataacgaccgaatactataatcttatatatatatgactgctgaaagaagccgttctccatcatctgaacactgaaacttgacgttgaaagatcagagaaatcgtatcaatatgacatgacgcgtggaagaaaaacgttatcgaatataaaaaacactgtcgatcgcgtctaaacagcgttaacgctcaaatccgaaaaaacagagcccacaaaatcaactcacgttaacccttcgccctttgactctaaccccttactcttttcgtctgtttgaagtcgtttcctttcttgacaaatgccagataaaccactagcttcatcgacaaacacgacgtattcggtcaccttgcctagtcgaggtcctaccgttcatgtgctgcctaagaagtctgatgagttggacctggaacctaacaatgcctgggatgataggcatgggatgggtagggggctcgaagaaacaagacaatacgtgagtttcctatgttccgccggacctgatcttgatcacctgtgggctggtcgggaactttctgtcgcgatcaaattgactgtgagagagagttccgactagatgtcttcccgtcgtcttgaacacgtcatgatggtctgtatctggtgtggttgactatcgagaagctctgggctgacagtcgatcttgatggtagtataacctagactcacaatccaccgaccactctcgacggtctctgtcgtctcatcccctctctacgtcccctcctccggtgacgacgactaccacggctttcacaaatggtattcttcccccaagaggtttcttcgcacctcagaaaccgggtgtgagcacctcttccaacggccttcacattccttcgacctcgtccccttcgactttccatccagacccgtcgacatcaaattatacatactcttcgcctcaatcgtctcttgaatacacatctgactcgatatttcggcctcaacagatacatcgatttcagcataaaacagagttggagaacgaagtcacgaacaggtacggtgaccctgatgggatgcacggctcagaccatctgccatcaggagtctcgagcagtccctctaaaggagagagcttgtacgttgcgtctactccgtcgaaagtatacggtcccgagggacgttggcgggaggtatcagaagacactcagtttggctcgagtagcacaggaaggcgagacgatgtctctggtatggatggccgatttgggagaagcattgagcttggaggaagaggagttggggttggagcctcaccaacggcttccagggagcctctaatctggaaccaaccaccgtcagactttgaaccaagtgtgatggatctttatccgtaccaacttggtgttagtagtagtaatgataaaacgactcgacctgatccagccgctcggacgacgtcctcgagacaaaagttgttcaatatcaagcggcattcagtcatgtctactatttcaagccgaccttcctctcagccgccccagccaatagatgcaaacaatttttcttctagtcatccttcgacaccactcggagccacgacgacagcgttcactgcaccaacagtcctgccgccgggtgtcgcgcgcaagcgaattcgaaagcacaaactgcatcagggtcataattcatttgcacttggcggaaggttgatcactggtggaggttctacgccgtttgcgcttcttatctcggtcatagtcgaagtagggctcggggcgctctgggtgggtacgaccggggtatatgtttggaggaaaggtgtcggaggccgaggaggtggatcgggtatcgctgtcgtaatggtgtttctgtggatgtggggagtcagtttcggagcaatgatggggacagtgagtcgatcgaacaatctggctgagagtataggtttggtacactgacatatgagacctgcttgaacgctttcttgtggcaggcatttcgagatccaggcatcatccctcgaaatttggatccatccccgatggttgcccctacggtgtctaccgggtcgctcgttcctcttcctaaggagctccgggttcgctcgggaaggtgagggttgtcttgcactttggtttcgatacaaatagtacacggggtatgtttgtctgatgtatagaaattttctacttggcagagtgactgtgaagtattgtgaaacatgttgtatctatagaccgcctaggtcaagtcattgtcgcttagtgagttgtcgtgctgttcaactggtggcaaccctaagctcaacttggcctttcatttcttcatttgatttttcagtgcggtaattgtgtagaaagcgtatgttcttgtttcgtataatccaaaacaagctctctccatatcagtacatttgaccggctaacaatccgggtttctctatcctacagatcgatcatcactgtacctacttgcatacttgcgttggtcgtcgaaattacacctcgttcatcggttttgtcgtgttttcatttctgtgcctggtctacgcaatcgtttggtcggcaatccatttatacttgcttaccaaacaggacggtggacggtcgtttcgacgagcgttgagtaaggatccgggaagcgctgttgcgttctcactgtcgatcctgttgatcgggccagttggcacattgatgagttatcatatcagggtgagtaagctctgggttggaagtaaataacgtagaagaaatcatccgggtttgatcaggaagactgatttaaacaaccttttcgacagcttatgttcaaaaactcgaccacgatcgaagaggtctgtggattttattcgtttgacgtctgactctttcttcctgaataaattctcatgtttttttcgaccttctcactcgtcatccttcatgtcagatccgtcgttcggcgatacgttcgaccgaaggatccaaaaagaccaacgtgtttttattttggcgacatcgcggacattcccgtcgaagagaccgctcagacgagaacctttatgcaagccccttcagattcgcccattggtacacgaatgtttcccggatgctctgcagaccaaacacacctagttggatgggttttagtgattgggtcgaggatacgatgtcagatggtcagaaagaatacaaagggtgatggtggaggaagaataagaaattcatattcatgttttttcctgagtcagacttgctgatgacgctgggattcgactatccggtcaagtagaatcctcgcctaatgaaatagccggcggcggaaaaaatattccacggagttttcggccgggatcattaattgccggttacaacacttttttttaatattccttctgtcgtctccgaagcgtcagcaaatagttgagcgaataggcagaagagagaagagaaagaatgacggagagaataaatttaaaagaacttgttgtttctttctctcgcaaactcttttttttcttctttcttgccacttcttcatttaacatttaagacttctgagtaactcgctgattgagatctcttaccataaagcatccccttccttcaggaatgaccaccaccgataccactcccattaccttagctgaggccatcagccgtgcgccttctccatcacccacaccgacagttcacgggcaatcgaaccagcactatgatgagaagaccagttcgtcagaaacacctgcggctttagataatcagaaagttttggttgaatcgccctaccctggaagtggaacggagcaggatccgttcgtagtagggtggttacctggtgaaaaggaggatccctacaactggtcaaacgtaagactcttgcttgttcctctctcatctgtcaatacttcttgctgaatttacttgaggatcaatttcattggaatatacagtcttacaagttcgtatctggctgaacgcaaaaatcgtctttcagttgtcgcgtgttgttcataaggacttttactccccgcttttttttcttcacgcagatggttccagacggcgttgaccgcgatcaacactctttgcatcggtaagtatcttctcccttccgatctgtactcaccctttttaatcgaatgttttcgaatctaacatctagttccaacctttctctcgtttttctgataccctgttttgatcttttcatccagcatttgcctcgtccgcttactcgtcagtcgcgcagcccgtattgtgtcctctctactcatttcgatcttaaccaagcgtggtatttccttgatttcctcatacaggggagcgacccgacagatctatgctcgatttcttgttagcgaagaagtcatcatcctcggtatatctctgtgagtgtgctatcgattcattcgcatcaacgcctcttctcaaactcaacatctattaatttcgactattttcattcagttgcgtcttgggtttcggtgtagggcctttattatgggctcctctgtctgagatgtacggtcgacgacccatctttgtgagcatgctctattttatctcctcatagtatttctcaagatgatagagtatactgatattcgtgtcgaccttcttagcttgtctcatacctgcctttcgccttgtttcacatcggaggagcttgcgcacaaaacatcgaaacaatcctcgtcactcgattctttgccggtacctttggttccgcccccttgacgaacagtggaggaacgatcgctgatagtaagttttcaccacgcggcctagatcatatgtactgtatcgacttatcgctcacggatgttgttttcaaacggtacagtgtggagcattcacgagcgaggtacggccagtgctctctttgcattggctcctttccttggacccgtgcttggccccatcgttggagggttcaccgccgaaagcggctggcgaaacgtgttctgggtggtacgtttattcacgtccctgttcattttctgataacatcacgagcatccgtggtcttaatcgttgctgtcctttcaaccacagatgttcggattcgccatggtcacctacatagtctcggcaatttgtgttcccgagacgtatgctccgacattgctccgagcaaaagcccgaaaacttcagaaagagtcgaacaacacaatcttctacatttctaaattcgacaaaatcaataccaagacaaagaaagaaatcttcaagatcaacgtcagtcttctttttttctcccatctggttgacgtcttgagttcgttcggaagttctgacctcacagcgtctctttatttgtttctgacaaatcgttcacagatgacccgaccgtttgtgctcctgttcaaggagccgatcgtgctctgtctctccatgtacaccgccatagtctacggaaccctctaccttttcttcaccgccttccccattgtcttccaaactactcgaggatggagttctggtgtcgggggtcttgccttcctcggtgttggacttggcatgcttatcggaaccgctctcgcccctgtcaacaataagatttatctccgagctacccggaaaagccccactggacgagctcctccggaagccagattgccgatggccatgctgggtggcgccttgcttccgtctgctattttctggttcgctttcacctcaacgccttccgttcattggatcgttcctatcctggctggtgttcctttcggatgtggaatgctccttgtgttttcatccatcataaattacttgatcgactgctatcgtaggttctcccttcttcaattctattacctttctatatgtacctaaattgacgcaggtcgttgccatctgttgttcacaaccagttatgtacgccgcctccgctctggccgccaataccgtattgcgatctctcttaggagccgttttccctcttttcagtacctacatggtgcgtcactattgggcctgtaacaaaagttcaaggggttaaactgacaggccaatctctgtttttttttgccctttgcagtatcaaaatctcggaaacgcctgggcttcggctcttgtcgctttcttgtctcttgcctgtgcacccatgccgttcctgttctatcgctatggagcgaagtgagtcctttccccctgttctttcttgccctcctttgtaaagaaaaaatattgacttccttgtttaaccgtttttgtgtgtattcttctgggcctacaggattcgagctaggtcgaaattttcacccaacatgcctcctgcccctcctgctcctgtcgccgctacggcttccacatctacagaaaatgcttctaaagttgctcaacccgactcagattccgcgctcgagccagagtatgcggctgatgctggactggaagaggaaaaggctagacaggcagagttagctaagaggaaagctggagaccagatcgtttgatcggcccctctatcctcatctctttgcccttcgtttttcttttcttttcttgttcatattcttcttttggtccctctcttttagacgaagcacccccaagcattttctcctttttacctcattccaatcctaatcgtcttagataaccctcgaagagttttcttcgttccacatggcgatatattagactttcttagaaaaaaaaaacaataatagcgtaaacaaattctttataattatattaatgcagtgcttcttaatatactagcgtcgttaatcatgttcttgagatcttcctgaggccactcaaagaatcgttgacttcccctgttctgttcaaaaacttaagagaagaaataatcgagtgtacgctatccaatcgttcacttctggtaagaaaaaggatcgatgatttgtgagctcttacacacttgattatcgagagacacgatatacaactacattatcgattggaatatggtatgatacaagtagagatataaaaaacaaaacaaagaggcagagagatcgaaacaagaggtatcaacggcactaagatagagcacccaaaaggtgccagaatcttctcaccatttcctcccattttctcgaatccccgccctactagacccaccaagagcagcttctgggaagaatctttgctcctcatatgctctctctctaggtgtaccccaatcagactctgtcccctgaagactaagagccggagtgcttccaccagaaaccgatccccctccattcattctcatcaattctctttcccgttttcgttttgaggcttccaccaaagctagcgctcgagctcgctcagctgtctccctttgaagacgtttctcggtagcgctcgaaacggacgaatgcggtggacgggaggtttggtttgagtgagtggtgctgacggtgttagtaccggacggagtcttgggtttgaccggtgggtgagaagagctggagaggagggtgttcatcaaggtgagcggatctctggatgtctttgagcgttcttctttttttctgggtgaggatatgaaatagatcaaaaaagaagatactgtcaaacgataattctcatagagagtgaatgacacaagacaagaaagcatcatacacttacctgtctctgtctcttctgtacttttccttttcgtcctttgcttcacctcgctgttcaggtcgtttcatctctggatgaacataccagggctcaagttcggaaatcgggcgagaaaggtacatcgtgtaaggatcctcggcttgaacctcgtccgctgtcttcttacgaggtgtttctgcttgtctaggaggctgattagaccatagcaaccgatgggtggaacagaaaacaattagcaatacgagcgaagaatcgatcaccgacagttcaattagatggaagacttaccccagctctctcttctgatgcccaaaagttgagatgacctcgttgatcccggtatgtctcctcccacgtctcgtccttcctccgaccgtgctctctcgtcctaccaccttccttgtcgattcttgtggatacagtacctgataactgtctgtctaaatctcgcatgtcatctcgcgctcttgccttgcctttgcctttagaaacggaggacgaagacggttcgggtgcatagaacggatcagaagcaggaacagaaggataatcgatttctttacgaggccgagaagatgaggaggatgaagattcggccaaaggaggatttgatccatgagcctcctgattccgatctcgaagaagggctagacgggcctcagagtcctgttaatggtgatctcgtcgataagaagagacgatcaggaccagctcagagtgatacaaccaaagtgaagcgtagatagacttacagcgagcaagacacgctcctcttcccttcttatcctttcctcctccttccgctcatcgtctctgacccgttgtttattcttctcaagataaggatggtaagacttgtggacgaggatttgtagtcgaggcattgtcgatggttgtcgcttgcgtggtggaaataaaggtgggacgctgtcttgtccggcggccgttcggtcacgtgttctggctgacattatcaaccggtccgacttgactcatacacagccacaaagcgacgtaatctgctgcggaattatgtcatcggctgtgcgagaccctgactgccgaacacagcaccatcgctcttcgccttcatataaactcaagctaagaagaacatctttagcaacgacaacaactcatacatcacccacctcttgaacattttagaaaaccatggccaactctgaatcatcctcgatttccacaaagatcggttctttgttcaacaaagccaaagattcggcttcacaggcagctggctccattccgttcgtacacttaactctgtctttgtatccttgaccaaaggtaagacaaatctgattggacactactctgtgcttttcttcttctagcagctctagtcaatatccggcgatagattcgattcaacaccagctgcgttcctttcaacagcactacattcctcttccaacaaagtcggccgatccgagctcagccgagaacaccaaagcgcttcagtgggcgatcacctctcagaagggggttgcgcttgacttcttgagcgttaaaagagatggcacgcttgctagcaaagagattcttgaatggggaaagggtctaggtgaagaagatctagtagatggtatgggtctctccactgatacgcgctgatcataaacatttgcttgcagtcctgaccgatacatgtcttctgttccttataaatcagctaccgatagaatggcgtacctctcctttatggcagcccaattatcaggcgaactcgctcgagaattagatatagccagagctcctctcaaagagcttcgaaatctccaacagagcattgaattaaaaggctaccggttggttctttttgtcgtctcctagctaataaatagtttgtgtacgagaaggctgatgtttcttcaccgttgtatcagtctgaaagaagccgctaccaagaagaaagttaacgaagacgaggttgctattttgacccgagatctgaccagactccaggaaactttgccgttaaagagacgacaagcaatcgtcaagtcgaacgagttgagctggaaagcgtataccgaagtaggccccagacttttgagattctatctctttattttgcagcaaactcactcgtatgtcattttgtccctaccagtattcttccaagcttctgctcttgtcgcatgcctcctcttcgcttattcctactcttgcatcaaacgaatgggacaaagattttgcttctcacgtccgaagttcggcccaggcagctctggacaattataaacctggaaaatatatcaacatcataaattggccggaaggtgagcaatctctttgtagaatgttgcaagctaaacctcatcatactgacctggtctccacgaatttgtttcaaaagctggcttgactccctcattcggcgagactcactcagaggagttgtctttaatctccagagatcctcactcaggaattgcgacaaccacccggtcggactccctgccttccgatgtttctcgtcagcaggctcctgctcaaatcccgtcgtccatcaactcggccgcgcagagcgagaatccgtttgaatcccctctcgatgctcctcggttacggactcccagtcctcctcttggcaccggtcaactcaacttgaatctggttcagcttcccgtagattctgcaagatcgtcctcagctagctcgtcttttgacgtgaaggggagtcagcatgaggttggaacccaggaaggactatcgataggaaaaggggttgcgcccacagtggccgagactggggtgccactcatcggaggcggcagtcagtcagggtcagcttcagggagattcgagaagagagcctcctcgggacatgctagagaagagctggaagcagcgagagcagctttaaatattcctacttcatgtgtaggtattactgtctattttcttgcgcttgtgatggtattcatcgatctgacaccatgtattgttccattggtctctttctaggatgaacatcactcttcgttcacctttacagattcatccgcgctgtccacctcaaacataccgacgacggtacccggttcatttcctgctggcgcggtgacagatcagacggattctatcgagactcgcgctcgagaggagagaatcagacgaggaagtgagactgaagacgaagccgcagcgaggaagcgagaaagcgatgcggaaaacaagcttcctgaatactctgtatgagcttgctgttggtagacgatctctgtttctctatgacccattccagtttttcaatcttcattttattgttgatgcaatcacgaacaaaggacttttctttcttgcgataactctactttagtttacctctcttttgttttttcttcttcattgcgatgcattctgtatagctttctgagtatattgataggatgatgaatgcatgagaaaccgaggtagcggtctcccgcgccttcgggccgagagtgatcggtgtgctcgcgatcatggccgccctccacatctccaggtgcagcccaagcgtctttaaatatacactccagctgacatatatcagttattcatcgattgctcagtatattttacctacacccatccatccatccatccatccatccatccattcatccatcatcaaatcaatcgttctttttggtttttgttcttggatagacatcaccggatactctaactcatcatccgttagtcgatttgttcaaacatcatcaaaacaaaagagcaactttcgctgatcgggctccaccgatctaactcttcaaactcaactcggccttaaccaatagttcacctcaactcacattgatgcagtacacaattgtgccagatcctagaactaccgtcccacccaatcccactcatcgggcagtgcttgagaacgcagtgattgggagagccttgggatcgcctcagacaacttcaacttcgtcatcatctccaacatttggaaacagcggtaccggtgtgggatatggcggacccagtgtcacactattttcactcgtttgtcttcattttctttctcaccccggaatctaccatttctctttctaatctttcaacagaaattacagagatctgaacaacttttaatgtttttctatttttgcataacttattttcgattgtgaccttggggttactattggtgtcaaattattgacctgggatcggtggttgcactgattggatatcataatgggtctcataggtattcgtgatcgtaggattattagtggtagcagcttcagggttcgccacctcttcaacaccctgaatgtatctcctagaactcgatcgagagctcacctttttttatgtttctatttatatccaccaatttgatcggcgattcctaccttgattcttttctcctcacagcactttccgattttactatgttcgtcggtcaagatcccgaatggcagcttttcttcgctcagaagacgaaatccgattgcaacgtcggcaagattttctcgctcgaggaggaggtcgtcatttatggggctcgatgaagggagatgattatccaaaagtgaaaccggtgatgtgggaggcagaattaggatcaggggaaaaatcagagtttgaagggttgagtgtggttcgtcccgagtctttggtcgtcaaatgccaactactgctgcagatcggtacatgcgaaagtacgagaacactaaaaaaactgacttatatttgttgattttctttagccgctttcgttatcgacatcagcttcatcgtctacatcggccaacaaagacgtctcctctctatcggtgacagaaagaatatctccacccaatcagctcactttttccgtatttatcttacctccccgacctccgcttgatgaatcgaatccacctcctattactcagactggagaggaggaattgccagagcttgaagtgggcgtcacccggatctatatttcttaagaattatcttttggttccacgcgcatcgttccatcaccgacatccgaccctgcttttgtacccttggcacttttgatacctgcggttatctttttttctctcgaggtctgtctctaagccttactgcttgtttctatgccctatctttcattttgaaacgctagcattcgatccgtctgtatctcatctttcgcgttcacttcacgcgcatgtgggctttgcttctgttcttcttcgtctttgttcgggtcgagaaccctttccatactgtattttgaattctttacggctttcccacgtcctctttctttctttcttcttggtataccaggagatctctatttatacgttatattctccagtcttaatatatttgtaccgataagcccttttcatttttttaatcttaaaaacgttgacaggcgtgaaaaagaagagtcttttgtgcaaaggtataatcttgaaagactattgggtgagattatttgacgacttaaacagtaccgcttgttgatgacattacatttctatctatacaaacaagacctggaagtgacctttttctaatttaagttttggattagcaaagacaaatatttatggagagatgtgcaaatcatagtggagagcatcgaaggaagagagatcaaaacagagaacggaaagtagtttaaacctttgtagcggtagcagtggcggcgctagtaaagctgctgatcttgacagtagaagtagaagcagagacagaagccggaacagaagcagcagatgcaacggcagaagccgaagaagtagccgaaggagggtaccaggtgacaggaacggtgatcgtagcaggcgatcgaacggcggtcgtagggttggcagtgcacttgggcgcggtagcggattgaccaccggtaatcaaagcctgggtcgcgttcttgtgtctatactcggcaaaacagtcaagcaaaaatatgagaatcatgagtgatagcctcgggttgaggaaatagtcaaagtagttgcagtacgaacccgacggctttgataaccacaggaacaacacctccggtctgaacatggaacgcttggtggttgatggcagtgaagaaggcactgaatgaggagcggaaatgagacaataataacaagaaaatgaattttttttagcttttgaaagataaaatcagatttaagggagtgatcgtcagaagcagagagaaacccacgtgatgacaccggagtgggcggtgatggagatgtaagtagaatcatccgtagcaaagatgttgttgagcatctgctgaattcgcaaagcctggatcacccgggtctcttcgtaaactgggttccatagctgatcttgctcggtgaaggacggctcgatgtcccatccagggtgtctagcggcaatcgcagtcttgttgcttcgcttgtcgcaggtgtgaaggccttttgaatgacacaacacaaaggtcagtcaaggaattgtcagcgacgcatgaacagacttcaaaaatatggaccaaccaatagtctctcgctacaatacgaaaaggtacgagtcaatgttagcgcggagatcaagacaagaaacgagaaaagcgcaacatagatgtcgcgtacccagttctccttgacctgcgggacgtaacctttgttcaacaggatatcatgcctgcaataggtagatcggcatatacggttgtcagcgacagaggatcttttgtagtatgagatggagctcatcagatccaattgcgtggaataacgaaccaggtgatgttgagagtgtccatcgatcgggtcataggactcgagtagagaacctggggaagagggatgtcccacttggactcattcttccaagcggcattgaccgcctcagcttgaaggataccggcgggagtgaggtgagcgtcgggacctgaaggtatatacatcgatttaaagaaagagattgattaagaacaacgtgatttatacatgggaattggacgaagtaaacagaatggactgatcagcctcaccccaggtctggtttccatcggtattcaattgactgaagactgaaatgtgaagcatcccgacaggtgatgaatgattagatgcggtgtagaagacttcaattgagagattgaccgccgagacaagaacttacagcaatcccaagcagcatcaccataaaaagcctgggcctggttgtggtacccctctccgtgacgagccatgtagatgactttgtaggaagttaaatcatcagactcctgattgagctgatgaatctttctggtttgttcgaaaaacagataccaggttagcttaagatttcaatagctaagtgcttggatccgatggaaaacacttgcttttggaagtttctccatctgtccttagattggtcgatgagtccgaaggaagcattgagcgcattgtaatcggtcgcattgaaagtaggtgaatcctatcgtgacgatcaccaagacagtatgaaaaattgatctttagtatttgttcttcgatgtgaccagattcatcattgttagtacctggatgaaaatatccgatacaaccgagtagttggtggctgaagggaagacagacaatatgtcatcaattcttctgcccaggtcgaataatcaagaaaaaggaaaaggaaaggtaagacgtacgcgcaaacaagctggtcttgagatcaagtttcctatccacaagagctgcggcatggacagttgaaaacgcagtagaagccacaagagccgcagagatgatggtgttggaggagatcatcggatagagagagattgagacaagtaggtgttcaattgagcgagtgagtaatgcagacggtaactttcagccttctgctttctttttaaacatctgtgtgctcatctttttcctctctccgatttgttcatgacatttgctcattggtctttcccaactcttgaatcacagtctgatcagaacgtgcgaacggagatcggactaaagatgcggaggaaagatgttgaatagccagtcaatagagagaaaacacgtgggttgcaccgctgacaacacgttcatatttgtcttggcaacaccgggccgaagggaacgttatcggaccggaatcgtccgtcttatgatatttttagaacatcacgcgatggtcgtttggtctatcaagaaactagctcaatatatagtacaaacacagaagatatgtccattactccaaccttgtgtggatacggatattgtacagaagtagtttttttttcgagacagtatgaaacaatgtcattcagaaataaggaaataagattgaagagggagaacaacgtatatatctgggcaaacaaagatccttagaagacaaggaaggtcattccgagtgcaaacgctcccgaacctaccacccacaaaagaccaagagcctttttgtccgctccgctctgattgctattattgccacttgatgaagtcgtgctgctattaccacctgagctgccgctcactgtcccgacggaaggtgtcaaagaggaagagttagatgaagcccagatttgagtagcgatgtaggcgtgcgctttgaacggattgttgtacgtctctacagtatgagcgaaggtatagttcgcggggcgagagatatattctattttcgaaacaggaaagagagcaccatcagcctgacaactacacaagcaagagatgaagaatattcgtacgtaagaactgttcaggcacaaatggagagagatgacccctcagtgcaattcctacagtactttgaacgagaagtggaggcggagaatcggtgtcatttgttaaaagagtgttgttcaactccagatagatcgcactacttgttgttgcttgacctgcttcaaaagattgaaactcgatggaagaatctgtggtgatcataagtaggaataatgaggtcagaatcaagaccacatgcagaagcagaagtagggcacgagtgatggaaatggctcactaggtgtaccggtttgcaccactgtggtataattcaagtattgagtgataaactgatactcaacaaaggcatcaaatacttttcgaacagtctaccgccagagagagtttgtaagataggaagacagatacacatacagatgtgaaactcgcgcaagcacttccacacgttccatctccatatatagcgacgtctgcaggagagtagactgggctggacgaccgtgacagataattttggtatagaacatcacgtagtctggacacacgacgagcatatcgcacaacttcagacgaactgcatctgagaggcaactatcaaagcaaacggcatagttactcacggctgagatgtctttagtgtttgaccattttcaacgatgttaccctgaacagaaaagtagttaaaattgctcaacagatcatttccatttgccgccctgaagttcaaagggccatatactttgtacatgtaaggattagctccgagatagaaactcatcatgggtagacatgagttatatagaatgctcacatccggcatcggcttgagggttttgaatatgataattcaaaaacttctctgctaagggagcagctctcaagacgccctcgaagttgagatactcctgatacggtgttccagagaatattgattgccaaactatgttcaatgtgacagatcctcctccctattttgcgccgaatcaggtttgatatcaaaggagacatggccaaggagtggttactatgacggatgatcaagagtttgaaggaaatgaacatagacgtacgttctgcgtagtatcaatgatgacttttgtcacgccagcttcagtgaaattctacgatgggtcgcaggtttacaagatggtcagcgatatcgatatgtcattctatcaaacggaagaaggcgcaatcgagtacctgaaatcccaaactggtatcctcgagaaactgcgaagtacaaccttcgtctggttcgaaggtagccaactgtgcaattgcatcaagttcacagaggaacaaatgtttttctttgtcagatcataaccttatagtcaattgtttctccagcaagcctggcgtcgtgaataacttacgaagatgacccccacaatttcgttctcaacactggatttagacaatacgaagaactggacattccttccccctagatactgtgcggaatctgaagagtcgatcaacaatggcaaataagggctgctgggtgcctcacaggccgatgacgtctgacgtttgatcggtccgttgatggaatgtggaaagatagacgtagggtttcgggcgtgtgcgacgtcttctttcgagtctgatgcagttgaaccagtagaaagacaattttcttggaagaaagttgaggtggatgcgtaagatttatcagaaatggctcgagcgaaatacggaacctatcttggtgacatgacgaagatgcgcaaaaggcagagaatgtcatcaaagatgtcagatatcaagttggcgaattcaaatctagatcaagactgacgaccacctgcttggagccagactctgttgagatctgaaacgtgatattatctcgctctggaaacgtttgctgtgccactgaccccaaggtccgagttctgagaagctcagccagttgagactcatatcagcgctgtggatgatgtatgtccaacatacgtttcacataacgtaacagcaaaaggtttgagagtcaaggcttacattgttgagccgacaagagtatacgaagccatggcagcattccgccgtacctggatatctggataagttccagtttcgttgttggcaatgtagtcgatactatccaaagcagaatcataccgtgatttcaatccaaaacatgttttgtcagtcctcgaaggataaaaaacatcattttagaaagattatgagaacctccttgcagaagaacgtacaatgccataggctccatcccgtcgatcatctgtacttctgcgcccgacagctcggtgatgtttatcccctgagtttcgtagagatccaagatattttcgaagtaaatgttatactgagccgcaatattattggatccaggagctatgtagatttttgtatcgttcgctcccaagctcgaggcgagcgcaaccagcgggaatggtgtgaacgagatgaaagcgttagaataacatgaacctacaaggagtgggaaaccaatcgacaggtgaactttgtcagcgagagatttttgaagcggaaataatgagaaaaatagaagatagtgatgagaggttcactgtagtagtgatggccgtcgttcaacgagttgaacacagagtaaagatccctattgaaatcataatcgcatgagtacgttgcgtttccgatccggcttagctcggctctaaatattgagtcgaagtaagatagcgaacatataaagagtcagtagcggccatgtgtatatgagtatgatatacgtgaactagaagaaacggagaagtaggacgaaccgaatattggtggattgattgagtggcaacgattgattgagctgctcatactcaaagatctaacaaacatgtgcacggcatatttcgaagtgtatgaaaatcaggatggtcgatcttctgcaggatgtccacatggtaaaggcttacatccagattatatatctaagattttggtatttcaagtgagagaaaaacgagcaagtgctcttgatcagcagatgagttctgttgcagtgaccatgatcatcattcaagattctgatggcttgaaagttgcatttttcaccttctgaaccacatcaagaacattctgacggacgacatcgtcgaaggggacagacctaggatgagatggcaagttgaggcaatcaatgtttgcgcagagggttcgagagcccaaagaaattctcacttcagacaagctctagcctgggccacggtgaacagagtgttgttggtgcttgccaatgttgcgcatggatcggatgagacctgccgtttctgaacgtctggcagggactccagcacctgcagtgatggacctcctagtccggaatcgggatagagaactcccgggccgtgacgaaagggatgtcgagcctcggacgttgaagcgagtacttcaagccacaagagggtcagatacatcaacatgttggttgctgacaatgccgagtatcttcacaattcgagagatgatagtttgttcgtttgaggagatcaaggaagagaatcgataccaaccgatcgtatgaactgtgtcaggtcatacatatatagtcggaatagatcatgcctgaaaccttttacttaacctgtgacttggaaggccgagggcttatgccaattataagtccttctgctttctttggttccatcccggaccatctttcttcctccttgttcagttcaaatcagatcaaatcatattatactaagaggaggactgatctatctacggccgacagagaagtgtatcacctcctcagtgtctttcttggacatggccacagacgttctcaaactctggcccgcttcggtcctcatattggctgtgtttaatcctgcaacctctggggtgaccacatgtatgtgtacaggctgttcaggttggtacttatgcgcacatcatagactgcctgacactctctgaagcgcctcacgtatggttctattaccgacatctataatctctctgttgtacaatatcgatagacgtcctccatccacattggtcttttttggcttcccctttctaccaaagtctttttgtggcaggtgcgcgatcagcgactcttactttccaacatgtctttatattcgtcttttgcatcttcttgtctatttctctcatcttctatctagacactttcgcactttttcgaatagtcattacagcgccgtctccaagatcgacatcacttgtggttcttcgaaggtatgcatatatggaccagactcaatgtgcacctgccagtcctcgatatcgtggttgcgatgacgtgtgagaagtgtaaacaaatggttacatcgcttacggcttcctcataaagtcatcattcagttctttgggtccctcttactaacatctcatcaactgtcagaaaatcaagatcaatacaaccatgccatatattgagatcaaggagcttcaacgtatggacatttggtttgaactggccattttaaaacaacggacgctcgttgcaactgataccttgttctccgtctgaccaaaatagaattcaatcgagtcttgagcgaaacctcggccgagaaacttgtagtgattgactttcatgcaacatggcgagtctcaattgctacatagagtgatccgaccccgagactgatgaacctcttttggtttgatacaggtgtggaccatgtcgtgcaatcgcccctgtatacgaacgattgtccaattcggttttgcatgcaacgttcctcaaggtacaccgacacctgcctatgcctgagcagacatgaacgtctgatggacacagatgggctgactttttgagcctttcctggacggtcccttttgattgattgttcaaacaggtagacaccgacaaagtacctgccatcgctcaaaagtacaacattagagcgatgcctacatttgtttttctcaagggcggaaacaagattgatgaggttggtccgtttctgtttcgcaaacttggagttatagatctgaaagtctgatgaaagactactatctgtatctttctttctcaacttatctccctggttctttaacacacaattcaataccctatgatcgaattggaatcatccagctcaaaggcgctgaccctactggattgacagaaaaagtcaaccggctggctggtcctccgccttcctctttcgcttctggatccaaatcatccagtaaatctctcaccgaaggactcgtacgttctttgagattatacatatgtgtcaatctcaagtcgcacggcactaacccacatatcctctgatttctaacagacctctttgaagccggtgatcgacagcagagaacttcagtgtctgaacgaagtcgatgatcacacactgaaaggaatattaggttcggatgccaaagaagggaactttctcgaatcggatgctgacgaggtgggtcattccgtttctttccgcaattatgagcgtcgtccgacttaccacaatgctattctttcatctttctgcagcaacttttgattaccattcctttccttcaacccactcgacttcgcgctcttgtcattcgaaccgatccatccaagcttgaacttgccccaaaacgcctcaaacttttcatcaatcacccttctctcgggttccctgaagctgaaacgtttgctccaacccaggagtttgagctcacatcgaagcaggtcgaggaggccgaagggactgttcgactcgatctcagactcgttagattccaaggtgtaggaagtttgtcgatctttgtggttagcaacatgggaggggatgaggtgacgaggatcgatgggatcgacttgtttggagaggtcatggagggtggcagcaaggggccattgcagaaagtagaggactagatcagagagatctcgagcaaagtatcagttaatcaatgtctatgtttttctgacactgctatgaatcaagatcctttgtactcggcgatttacggccactatgtgatggaactcagtttgtcgaacattgacatcatcagcgcaagtgatcggaagaacaggaagaagactatgaatttgttgtattagaaacactacaaatttaaatttgatcattaggattttcacctgacaatattcccgatctgtccgggcctttttttccgtccagtcatttctcacttttttacttttctttccactctttcttcttcttctcatcatcaaacaccaacaccaacacccacacgccatgtcacctcaacactttcttcccctgctcactccgtcgagtgatgactcctctattcttgagccgctttctcttttaggtccgatcttgactccaatagcagaactcggtcaacttccagcaaacgcatccgcatacgtgcttgctactgccaaggataccgttgaccagctgattgaagttctcaacaacggtgcccacaaagtcgtcgtctctgccgagcaggccatcgagctcgccaagtccgtgtcaaaggagagactggtttctgttgtggctttcacggatgttgaggccttgaccgaagatgtcaagaagagtgtcggaggtttcctcgtcaccggggttgctcatgtatgtgctcttacatcttctacatttctttggcgtgcttcatggatctttatatgagcttcaagcttacaagtcatctgctccttactcctcacttctgatctctgttctttcgttcatcacgccgacttggtcatcgctacaaaataggccaatgacatcctcgacacccttgctccattcaaaaacactcacactctcttccttcacctcacgtcggctcctgttccttccgagatccgattgcttgtgcagaagtcgattacccctgtccttcctacaaccgtgctatcagtctcgacaaactctgtccaatccaaaatctctattgcctccgccttccttgcgcctctcacgagcgaccgaccggatggtttgttccccacgttcgtcacctcctacgctcactcgaggaaaccgctcgggcttgtctactcatcgatcgagagtatcaccgagtctattctgaccggtcgcggcgtgtaccagtctcgaaagcacggactttggcgaaaaggagagtcttccggggcaacccagcaggtggtctccattagagccgactgtgactctgacgcggttgagtttgaggttgtccagaccggaaccggtttctgccacttgggaacttccacatgtttcggcgagggctctttcggtggaattgctgcgttggaggatacattgatcggccgaaaacaagacgcacctgccggctcatacaccgccagactgttctccgactcaaagcttctccgagcaaagatcatggaggaggccgaggagttgtgcgaagcaaccgagaagtctgacgtcgctttcgaggcagccgacttggtgtacttcgccatgaccaagtgcgtccagtccggagtcagctggcgagatgtcgaggccgcgttggagaagaaggctctcaaagtgaagaggcgacagggggatgccaagcccaaatggacgggagagaagaccgatgagactcctagggagcctcaggagaagccggtgctacctgctgctgcgccccctcctcgaacaaccgttgatgatccggacgcacccatcaagatgcgaacggttcctgctctctcgtcgctttcagccgaggagtccgccgctttgcttgtccgaccggtgctggattctcaggccatgatggccaaggttcagccgatcatcgattctgtccgaaacggaggcgatgccgctttgctcgaccttactcgaaagttcgaccgactttccgccgatgcacctgcctcgaacgtcatcctccctcctttcgctgaggagctcatgcaaatcccggaggacctcaagcaggcgatcgatgttgcttatgagaacgttcgcaagttccaccaagctcaggccgaggacgaacctctggtggtcgagacgatgcccggtgtggtttgcactagattcgccagggccatcactagagtcggtgtctacgttcctggaggaacggccgtgctgccttcgtccgctatcatgttgggtgttcccgcccaggtcgctggatgctcgaccatcgttctggccactcccccgcgaccggacggaacaatttccccggaggtcatgtacgcggccaagttggtgggcgcgacctgcgtcgtcaaggctggaggtgctcaagccgtcgcggctatggcttacggaaccgagagtgtgcccaaggtggacaagattgctggaccgggtaaccagtgggtgacggctgccaagatggttgtccagaatgacgtcaaagctttggtcagcattgatatgcccgctggaccaagtgaggttttggtgagtgtttctctcattggtcttgtgttttagtattcgtgttcattaaagtccatttctaactatccgctcttcatctttattcgttttctcttcacctcaaaggttgtggcggactcgcaagcgaaccctatctttgtcgcgtccgacctgctgtcccaggctgagcacggtgttgactcgcaggtcgtcctcgtcggtatctccctctcaaagacggagcttgctgctatcgagcatgaagtcgacatccaagcccgagctcttcctcgatgtgagatcgctcgaaaagcgattgctcaatcgattatcgtgaacgtcgacaccagagaagaggctatggcgttcagtaacgagtatgctcctgagcacttgatcctccaagtcgccaacccggcggacttggtggcagacgtcgtcaacgcaggaagtgtgtttgtcggtgcctggtctcccgaatcgtgtggtgatttgggcgcaggaccgaaccacaccttgcctacctatggtttcgccagacagtactctggtgtgaacacattgactttccagaagcacatcacttctcagcagttgtctgaagatggaattagactcctgggaccgtcagtcgttcgaatggccgaggctgagggtctggaaggacatgcgtcagttgtttcaacctttattcaattgttgaactctgttggttcaattgctgaactaaacacatatcttgctccttcctccttgtgaccaaaacagtaatgccgtccgagtccgacttgcgcacctcaagaaccagagttaattgaccaatctctcctcctcttcggttgctgttttatctcaccccgttcttacccctacatctaatcttggtcatcactttcgtctttcctgcttatcataactttatagaaatgcttttcaaaccctatatcctttgtcctatccacgtatctttctacgttctcttctctttccattttacccccacatggtccttaaagttagggaaggtggatcacacgattgatacgccacaggcaacggaggaatgggcaacaaaagacacataacgaaacgaaagtgggagcaagaaaacaagagtttttcgagacaaatgacaacttcagaacggaattcattgaggcaaaccaccaaggtttggaagtaaaatgtccgggtgatatgtatatagtgatgtacgaggatgatacagcaggagaagactatcaagaatatctaaggcaaggaaaaattggggctaggctgtctacgagcatctcaaaacggaacgcttcccatctctcctgtagcaaacaggtcctcatcgaaatccacctgatcctcgacatggtcgtctctttcctcatcctcatcatcgtcctcttcattctcttcctcttcattctcttcctcttcatcctgctcccctccttcgcccgcttctccctccccgtctaactcaccttcatcctcctttccctccctaccttctcttttgaccttggccggcctatcacctgtgcctctgaatcgctgagaactgtaaaagtaactttcttcctcatatgagtttggtagactgcccggcatgctgtctctcctcgtcctgtacgttcctgctctctggccttcatcctcgctgtattcatcatccgatgaccatcccggacccgttaaaggtgagacaggcctagaaatgttcgttccgtggtctccatccggtttcttatgaccagtgttggtaggggacgtgggcgggttgacaggcgtagctgaacgcgaacctcggagagagcctgtcaagtttcggaggacactaagtcgaccggatgtatccgaacgagcggatagagctggagaaggtggggaaaggtcaggaagatcaatgtcgcaggggggtgctcgccaaaagttgaagtcggtgaattctggagtccacttggcgtgcacggacgggaacatttgatcgaccaggtcgttcatgaagatgtatctatagaaccaagatagaaggatgagcttctttgaatcaacagcttgtattgcacttgaagaaactcatgaagatttgtgtccagccaattccaacaattctgtctttacctccccattcgaatcgatcgtgaatattctcgaactagggatgttgatacttctatacgaaagcgcatcattgatccggtttccaaaaccggcatagaacgcgttcttgtgactatttccgaagagacgttgaagatctcgaagacaggccattttgaatacttccggcttacgaaggatgacctctctgtgataagttggataaggacaaagtcagtttgtcaggttgtgaaagaagcagaaatatatcaagcagatcatggctgaccgatgaagggaagtcattagtcgatcagggctcatgatgaccggtccttcaggaagctgataagacccttgactgatgttcttcaagtaatctctggtggagtcggcttgtccgatagcccgagatgtaaggtacataattttgtatccattgttgctgaattttaaattattgataatcgagagcgaccagaagatttagccaattcagcttggtcatgttcaatcacaatcaacgagggttattcaggccaataggaggtcacttacactatgtctgtgtagagcttggcgactccagtatgagtccaatccctgcctacagcagcaaatagatgacctagcgcgtctgacctgtgaggaaacaaacatggttagacgacaacccgtattcagatcgagagctctcccctgaagattatgaagagacatactttgtgattgtaccatcgatgtccgagataacgatatgatcactcacgtcccagaggaagatccgagctgcgcaggtggcgactccggagtaagacgatgtaaccgaaaatgtgatggtgtttgctcccttcttcagattgagtaatttctaccaaaagaccacaagtagagcaccaacagcaaaagtagcgtatcagtaaacaattgatgcgtatagcgtgatgcagcaattcttctcaaaagtcgtcagaacgaacaagttggtctgatgataacctgagggtcttgacgaaatgctttgtgctctcctgctccgccgacacgggtggcactgttgatgcagttaatgacgcagccgaggagggggtcacatccggcggtggttcctaattatcaggtaacccacagtaatttgattaaaattgagatggtcaaaacacgggagtgcaaaaacaaattggacgcacggtcgaagctctgctacttctcgaaggcgttaaaggtgccaagttcgattgtgttgctgtatcttggctcaagcctgatggctcgtcctcatctccgttctccgtatggcctttgtaaccctccatatcgattacgacatctgcagttacaaaagagttaggtttgacgtatccatcggtcttgagaactcttctgcgaacgcgaagagtaaggagagaaggacttaccatctccatataccacatcaggcggttttccctggccactcttaatctcaggtaaaagatcgtctccaccttcattttggccatctccttctcctcctatagaactttttgcttctctgttcatctctcgattcaccccaaaaggatgacggatactatcgtatgcctcttcgagttgctgctcagccttgatttctgaaacatatgacgtaaggtcctgactgtgcgtgttgactgcctgagcaatcgaatgagccgtggtggatgctttggaaagcagagatgacggcgaaacggacaagccggtaagctttgtaggggatgtcgaagacggtgaggaagccgagaggaaatcagaagaggaagggttggttggcttggactcttggtaggaaaaagaagatgtagatgggttggaataactactctgaggaacagatggttgggatgtacttcgggtaggtgagaggggtttttggggggataattcggcgaaaggcgcgcgaggagttctctgggtcggactgagaggtggcgagggaggtggagacgggtagagggctggagacgttggatctgaaaccgttcctaaggagaagcataaacccgccaagatcaaggatataccgacgcataaagattaatactgatttcagtggttgtggaccgcggcgagataatcttaccatttattgtccaagcgttcagatctaaaaagtccggctcttccacgacatcttcgttgtgagcgtttgccacatcctccattgtagtctggtcgtctaatactccaaagcgttcgctattcgatgtatcctcagtactatttgttatgtccaatgacacaatagagtctgttttagagtgcttggggacgccctcgacgatagtttcaaggtctgtggtgttggttggttttttgttgaccttgaaaagaaaaggccgttcaagtcattagtcagatagaatatagtatagagttacaagcgatataaatccagccatacctctgttgctccaagcagcgggctggtgagtaagtcgtctgggacggcttcatccgtttcgaccacgaaaaacgcctctccagcttcaccaactttcatgaagaagggtacagggtgagagttgactgtaagagtcaccttcttctcacctgcgcggaggacctgaagtttgccgaaccgaacatgaaacggagaacatgctagaacggtgctggatgacgacggagtcgactaaaggagaacgagagaacgaataatctcatcagtttcttttcaagctcttgatgcaaaagatttgatgacgacgcgtttgatgtttcgagtgctaaactttcggctatcaagtcttcatcttctccactatcagcagcggtctactacacctcaacacgtttattggacgatcatcccacgttgtctacgttgatctatcgataaatcgcgttcccgttagagaaatcaggccggattgatggattaagtttattgaaagaccgaacagacacatctaaacaaacatcgcaagctgttgtcgcctgtgaatgggttggaaagagtgtgtcgaattggttgaagaacaatcacacttatttgtgaggatttggtccgaaacatattcaccccaaaactcatgacgaagccttaagatctgagggaaaaaacggaaaaggagcggatgtattccctgaaggaggagaaaggaacctatcgtctcacctcatcttccctctcgacaacgattacatcaatagctccgctcaacgtagccgggttgatcccagagtagtattggtacgccctggagaggtactataataagcgagtgcaaggattgagaaacatagcatacgtaatgagtatagatcagccaacggatcggacaatggtatgtgccaagcaacaacagagctctctacctgcatagctgccttagggagctcttcagtaaggtgactgtctgatcagagtatgcgagtttgatagttgatgtgggtgatggaagatgagcgggagaggcaagaaggaataacacgtcggatcgattagttggggtcagagaaccgtcggtctacaccggttactcgagcagaggttacgcttacgacacaggtccgaatgtgaagggatcgttatcttatcagtgatgtcacgtgcagtcacgttccttagctttattgtaacccaaacgtaatctatgggttgtcgttcttttcaccttctccttctcacctcaaatccagtcctttccagaccttacctatttgcaaacagacaagcacgatgagtgaacctaccgcatcaaagattgaggacatagcctctgatgcagagtcagatagggtggatgatgctgccgccgacaccccgtcttctgcggctgatggcgagaaaaagaagagaaagaagaagagcaaaggaaagaaggtcgccgacaagatcaagtatgtgataatatgtcgcgctatgttttgttcttgaaagtctatgccaaagctagtattcactgttttccttcaacttttgttcatgatccttctacagatccgccctccctggaggagaaaaagagattcctggagctatcctgaacagggtgatggaggacgtgaacaaacttcctgaggctgaacgagagcattgtgagtttctctttgactctgcttgtttctctcgtctggttatgtccatcgatcagtgagaacatcattttctgatcaggtgttcttttcttcttacagtgaacgaggacgaagtccgaaaggcacttcaggccatgaagctgatggacatgcttaaaaacgagtctcagggactctccgtgaccggaaagaacaagaaagacctgggcgagcataaggtaccttcaccagaacatttcacaaccctcacattgtccggattcttcttcaaaactgacaatattttttaatagttctggaaaacccaacctgtgcctcagtaccttgagaatgggcaagaacctttgaaggacggccctattgatcgtaggtgttcattctgccttaagcttctatgatcggttcatacttatccttgtgtcgatcacgtcttctctttctagctcctaagcaagtttctgaactcagacaaaccccataccctctacccaaagactttgagtggtccaccgtggacgtggatgatcaaaatcaggtgtgcaaagatgctagttatttgttgagatgtttgttgaaactcaccctacggcttcctgcgactcgacaaaactcagctcaaggaggtatacgatctgttgtctgccaactatgttgaggatgaggacgcgacaatgaggttcaactacagcgccgaattcttagactggttcgtctacacttctgttatactcggcaggttcagctttctcaaataattgcatatttaacgtctcataatcgatgattcaatgtataacctacagggcactcaagcctccaggttgggttgcttcatggcacgttggagttcgagtcagctccaccaagaagttggtcgccttcatctctggaattcctatcaagcttgatgtccggggaaagtcagtagcacgatgagtttctttcttctatcattcttcttgacgccaaagcattccaagagtgttgataccagctcacatttcttcactaatctagccagttcaactcttctgagatcaatttcctttgtgtacacaaaaagctccgatccaaacggctcgcgcccgtgcttatcaaagaggttactaggcgatgcaaccttgaacaggtctggcaggctatctacaccgccggtgttgttttgcctactcccataggaactagtcggttcgtgtctgaccccatataaatgcccgtctcgcaatgattttcttgctgacgtatggttgtacctatgggggaatactcagatacttccatcgaaacctgaatcctcaaaagttgattgccatcaacttcgcaatccttcctcgaaacatgacgatggccagatgtatcaagcactattctgttcctactcagccccagattcccggttggagagagatggaagagaaagatttaagtcaggttggagctttgcttaggagatatttggcgagattccaggtcgcacctgtttatgacgacgatgagttgagacattggttgttaagtggaaagggagtgggcgagaaagtgggagggaagagagacaagcaggtcacctgggcttatgttgttgaggtcagttgccttatccaatttattaccttgcagaagatgttaacctaatccaaacaatcatctgtgaattcttctcaaccaaacaaacctaaacagaaccccgagacgcaccagatcacggatgtgatgtccttctattctctcccctcaaccgtcatcaaatcaactcaatatcccatcctcaatgcggcctacactttctattatgccaccgatgtcgctttcgcttctgcctcttcaccggccgaaggaagctcctctagtgccatcgttagtaggtctgatagaagggacgtactggcggacagactgaaggctctcatgggtgatttgttgacggaggccaagaacgtgggttctccaactgtttacctcttcagtagttacgatcataaaactgacattagttgatgcgcttgattttacccttcctgttcttctcatcaaggccgatttcgatgtggtgaactcgttaaccggtctagataacaactccttcctcgcccaccacaaggtaatccttttctaaccctcttcaagattctctacctctgtttccgtaccatcaagatctgcatatgctgacaatcggagaactggttttttttttctggcttgggcgtggatgataagttcgggccgggtgacggatacctcaactactatctcgtgagtgttctctattcgtttgtactttggttgatgaataaaagggaacgaacaaatctaatctcttcattgacacatatatccttcgccaaatagtacaactggcgaactcccacggtgaccggtggataccctgatgatcgatccggaacgagcgagatcggtgtcgtcatgctttaaacggaactggggcttattttacatcgagatgtgttagaatagaactagcgctagctattttgatcatgttggctatcttacagtcgtaaatcttggatatcttgatgaattgtttatacccttctaaaccaccaaattttcataaccgaaaataatcagagattgattcactcgcgaatacaaagacttattctttgtctttcatgcccccatcttcgcctagatatacaccgcgaccgttgatgccaatccgtctcatatcatacctgatccttgatttacttagacgactgacaacgtgtatctaaataggacgatgctctttgggttaatagtcattgatcattaaccctaactttatctgaagatcccaagcgcgattatgattaccgatgcttggaagtttcgtctacccatccagtatgataactcatctcaacctcccctacaatcaatcgtctccctcctcatcaaaccctcctcatccgcgacatattgtcgacgtctaccttcctgatgatcatgatgttaagccacctcaaggactgatagttttcatccatggtggagcttggcgaacgtcttcttctcaggacccaacgctggatgatcttcctcgagggattctgcctcaacagttcgctttggcgctacctaactatagactaagtgaccaaccggaagataaaatcgaaggaaagaggaaagtacttcatccggatcatgtgttggattgcaggatggcggtagagtggttggtgagaacaggcgcaggggggttgataaatgagaagactaaagaaaacgtctggttgatgggccattctgctggtgctgtgagtgttcattcttgcttggttcctcctgtgcgtcatcctcttgatatcgaatcatattgagagagctgatccttcatcttgaaatttacatagcacatcattgctcatttcttgttagagacaccatcgatagcacccatccccgctgacatccgatctacaatcaagggttttttcttctctgagaccatcacagatgtttgtctctttctccttcctcttttttcgcactcgttcttctcatcactgaagcagtcgtggtttgatcgtccaatggacttttgaaaatgtagatagacgcacttgttgaagaatacccagattatcaagaatggttcataacctccgcctttggaccacctccctacttgacatcatccccttcccacccctcatctccatatgc

SEQ ID NO: 3007 - DNA, 4517 bp, Xanthophyllomyces dendrorhous
atgcgctccccccttcctcctcgctccaagaatacagaataatgatatctcattcgaaagccgacacacttgtctcgacttcacagccaatagccctggcgagcaggttggcagcattgggattgaaagtagaagtattcactgatgaggatataggagaacatgatgaagttttgaaggacgctaggtttgggcaaagggttagacaatgggtcggagtggatgtctgaagagtttccttccttccaattcattggatacagcataccgctacggccatctttatcttgtcatgctagaattcttatcctcttcgaacgggaatgtttttgtagaagcgagattacgaggtactttcttggatttttatttaataccgtggggtttcagtcgcgaagatttcctttcatcctgtccgatttctctgaatactctcttatcctagaagaagctgtacttgaatgaaatggtatcactatcttttcagtcctccaaaaacagcaccaccaccaccacccatcgttggctgattcgggtatccatattgtccttgctggggttgttgttggtacgattgatatccttgtttttgttgattatattggttgtgcccgccaccgcctccgctgtatcctgggtttgaggacgacaaagatggcggctggggtttggtgatgtgacctgcttctctagctttccaagcttttttgatgtggggcgcgaatttgaagagctaatatgtttccaacacaagaacacaaatgaccggagacgtcaagtatggagataagacttgttgtgagagatcgggacaacagagaggtttcttcttttgatgatagaagaagacagggaacgaacctcttcagcctcaaccccgtccatgatagaaactagaaccttctgaacgatagacgcatggtttccatgaatcttatcatcccgaactctcatgatcgaccaagtttgacgatcttctagccaagtgacttcgacgacggcatcgtcgtattgaatcttgctttctttcatcctgttgtcatatcaaaaaggaggatcagaaacgtatcgtgcgcgacggttgattcgatcaaggcaagaagagaaagactcacctctcccactcgtcaggctcaacaaccataccgtcgaagaattcataccggtcatctcccaaccattgatacagcttaaatataggcatggcctcaaagtctggttgacttggattcgcatctagtgctggaaatcgaagctctagtttgaagtctatcgaattttcagacgctggtttccacttcaagctaatgtgaagaaacgagaagatgggagaagggaggacggatatcagagtgtgcaaaaacgtgcgaagtgcgaggacaaagaacgaaagagaacaaacatattcggatcagtccccacagtgtatccactatcacaagctgtgaagatcaagccgtcatgaccgtgttggagtttgggtatatccaccttgaagacatcttccacaccatatgctctgttcattttcttacacacaatctcaaatggtttgttcgatgaaggcggaagtttgtccaatggacctattacccatttttggagacgctttgatttatagcacagatgaagacgaacatatgaacagaaagagttcgggtcaggatttgagttgataaacaatgacggatagcgaaaacgcacaccgtaacgggacataagactcttctttagaagacttattccagagaaaaccaagcagtcgaatgcatatagtcgaagagtttcctagagaaggttccgagtcggtagacaaccggagaagacaaggcaaaaagcgaagacacggaacaattgactgtcagatacgttctcggaaattaaaagaaaacaagaggataaggcagtaaatcatgcacaaacctttccagtttgagcatcaacatccaacacaagctctccgtccagcaaggtcttctccagagggcgtcgagcaggatcctccccgttgggaaagacaagaccttccacttgacgaaattcctcttttcggtcaatctgttatagcacaggagaaataaaaacgcaaggcgtacgatgcaaggtgatttcggggttaatctgacagtaagtgacttgtcaaggtgagccggaagaactatactcacaagaaacacatcctgagctccttttattttgttccacgcaattaacactagcacccgaactccatccgatttttcgcagacccagaagctgcagatgtcaaataaattctcaggataagacaacaaatggggaatgcagtaggtgagaggactaaacgtactcttcttgttcaagcaggcttaacgatgcttgagtaaaactgacgggttgactaccaggaaatctggtcgtttgagaaaacaacatatcaaggtagtaagctcttctctactttcaatagattatcctgctatcacgatcgaaagaaggaaagaaccataatcaaagatagtgcaaccactcactttggaattttgaggccacaaaggtccatgacatgttcgttgagaaacgcggtttgttccggtgtgaccagtttaccaggaatttctggaatcctggttgtacttgctggcatggaaaactagtgatgactttatatatctgtataaatatttcttctctattctgtctgagaatgtattgcgaaccaagagcgataggaaggaaacaaaggtgaaagtctaaaggagaacgacttgaataaagtattagcggttccagtcacagccggccatgtccgctgtgtgaagaatcattacgaaaggttgtaattcaaaactcaagatataatagagataattgtagttcaagtatgaattccggttagtcaccaatcaacaatcaccttaccttctgttctcgttttacattccaacatcaagcaaactacaggccatcagatagatgtctggggatacactcgaacaggccgtcctttcgtaagaagtccatggtttactagaagcttatcaattgctttcttacaatctcgcattcttcatctctatcattctagaggagctctctttcgagatccttcggcagctctagacgagtacagagtagaagatcgagaaacgccctctcccgaacccaataccgatgacgagcttggttccgacctggacgatgatgtcggtggtgtcccgtctttagatactccctcctactccgtaggtggtggctcatccaaaaagaccggtccaaagggcgtcatcagagatcagcgcgaagctatgcaacggaataggttcattcagcttcggaaccgtctagaagtaaatgagcgaatggaacgaaaggcgctcttgggtccaacatgggaagaagaagtcagatcgagggaggaggatcaggctgctatggaggatggggatcaagacggagatgtcgttgcgagatggagggatcgcaggctggcagagttgagaaacaagccgaacgaacggcagagaggatttcttagagaggtcggaatggatggatatctgagtgctgtagaaagtggatctagttgggttatcgtccttgtatacgagaaggtgagttccctatcagttgtgatgtctcttccatatcctcgctttctgcatatgtgcttaattcttgtgacgcctctcgaatctaccctatgtatcgtaattagaatcaaacaaacacgcctccatacctcattccaaccttgcagaagcttgcttcagccaactctccaccgacacatcacttccttctagcctcagcccgaaacctatccttctcgcttctctcgaacggcgaacccgaccgagatgtattaccaaccatgctcgtatataggccttccttagacggcaatcaggatgcggagctagctcatagttggatacgggtcgatctcatgttgaacaaggacaatggtggagagggagttgaaagacttttgctaaagtaagtttataaactgctccactgccttgtgatcaggtcgagtatggagacattgacatctcatgaatcacgcgacgctcttctttgatgcctttgtagcaatggaatcattcctcgtcagacatcagaagataatgaggacgaagacgacgacgagctttcagacgacagcaaatagtgatagaaactaagaagaacaacataccatgttcctgcctcatacattcgaagcctactttggtacctctctaaggattacaaacgttgttgacctctcgctgctgctttccacttctcgtgcagaccacagatctctgaattcatactaatccagcctctcgaaggggtttgaaaatcagcctcacagacaacagctactgtttcaacagagcttttagtactcttattgctggtcccggttgtttgttgttcctgaaaagaattctctccgtgctttgagttcctggtagccgattgactcacttgtgttcaagtttgttttctctgatgctcgtcttgttgctgctcaatactcatac

SEQ ID NO: 3008 - DNA, 9822 bp, Xanthophyllomyces dendrorhous
catatacacttattcacaatcattatcgccactgtccttgtccttaactcatcgttgttccgatacagaatcaactcacatgaaccaagatgaggctcgcaaaggtgctcgacaacgcctcgctcgtcgtctgctcgttaagggcgtctcctccccttcggattcaccttcggattctcaaaacaaccgaggggcccgtcgagcttcagtagtaatcgtcgatgagaataggagtcgaaaatcaaccgacttagaagggatcgataggaccttcaaagatctttgtacaccagagagaaagagtgcagaaggccgattggagagagaaagggtgcaagtgggagaattggttgttgtgttgacgccgcctgaaggtcggttcctgtccctatcacaagttttgacttgaatagacgcaaagctatcctttcctcctcagatcagaggtataactgatcaacgtgcaatccgaaatcaacagaaactcgacagccgtcatcaacgctttttccatctgtttccggtccttcacccacattctcatttcgaccaaggaaacgttcgaccctacggtcatcctttactcgatctgactcatccttctccgtctctagtcgaactcgaacgtccggttcagactcatcccggtcgattcagcgctcggcttcatatcatcagcaacatcaaacaggtcaccaggctgacgacgaagacgcagactacaacttcccagccgatgatgctcgagacgatctgtggaacgcttcgccgacaccgttttcgacacccagtcaagaactgccgtctaacccattcggcttcgattcgacttgggtacacacgtcagatgaggcaccgcgcctggaaaacctcgaacctgctctgaatgtatccggtgttgaagtagctttgcattctcaaactgagattcactcagacgaagggcacgaacagcagcaggtaagatcacagtttgtgaccactccgccacccgatgcccctcttccaactcttccgacctctgctatttcaacggatgttggatgctcacctgaagcttccttgagcgggaaaaaaagcgagaagtttgagtttgcgtcagcagataaacttactatgccagcctccataccggaagaggatggtcctaaccacgaaacatctgttgaatctcccgaaaagccatcttcatccgttcaaatcttggacgattcgtcatccctggtggacacgaacttgatggagaacgatgtatgtataatctcgattgagaattccgatctctctccaccaaagatgaaagacgataagaaggagaagggaagcatgggaaaaacgttgaagacctttcggtcattcaccaagcttttgaagcttgtcgggtctgatggaaagaagaatacagttgccaggcaggatgcaccggctcatcctattcaggcatcatctacttcaagtgatcatacaattcctttagaaggagaccttccagtaaccgatccaggtgctcatgctttgtcttgcgcatcagatcacgagctgcttcctcccgtcatgtcacgactatcccgatccgactcaattgattttgtggaggacgacaatgatccaaatcagaccccaatcaagaaatcagtagtccgaaagctcagtctcgcatcactatctaacgtattgcgatcgtcaaatcgaaaaaagagcctagaatctatgcgcggcacgcggtcttcgttttcttccgatgtgccaaagtcttctttgatcgaaaaagttcctgctgttcctccgattccaacttgggttcgaccctcagaaggagtcgatagcccaggaaaatcttcctcctctcaagtacaaacacaaccatcctcccaacatccgacatcgacatcaacaacaacgccgatacagaacatgacgaccactgaaacatccgcgccaacatcggtctcttacgagcaccaagcgttggaacggccttctttcgctgtggaagctgcttgctgggctcttgcaatggtgtacaccgagactccttcagcatgtcctacgaaggccacatttcctgatatcaacattcaggacaaggtggagatagagttggagcagaacgaaaagaacgaagtcgggaaagatgtcgacaatacagatcagcagctgtttgagtcgaacagagctcgggctgaactagacgaagagagtgaactttcattgaagcaagagggggcgcaagatacggaaagggaaagggaaatctcaatcgataccgcaaacagtacgccagatatagataccgatactgatactgatacgggggatgaaggatttttcgacgctgaagagggagaacttgaccaggatgtgaatgagattggtaatggacaagaagaggaacgcagcgaagacgatccatcccatgtgatcattgaagtaagtgtttttcgtttctaacatcaagaacaattgcctgacttgaatttatgttcgcctcgttctacaactgttaggtattgcgagctcattctggctcatccgtatcggcgtccgtctctaccgtctcgtcggtttcatctgctctgtctaccacgtctagatcgacctcattatcgacaccctccccaacgccatacataacagacaccatcatctttagctcgctgtcagaatcaattcgaaactcatcggaagctcatgtcactgccagtggactcaagaatcttgagacaggagaaaaagcgggcgacaaatcaatcgcagagaatggagctttgtcacatgctgagaagtggggcgtaaggtttgaatctctgaattttgaagatttagagctggacttgagcttctagagcgagtacaggagcagcttccagactcacatcgcggacatttcaccacactcctcttctcatttcttcttcagtgtgattctatctgttatatattccaggagaggagatgtttgcgctgcctcatagtcttgatttcattctgcttgtccttctgtctacttcctattcccacaagttagcgactgtcctctttggttggtacaatttctcttggagtctcgaatccgtcttcctcttcttcgtgtcttcatcaaataccgttttggctagcttatccgagatcaatcttgtgacacgtctcctttccttgttcttatgcggtaccaatacattcacatactccttaattctctgacttttacccaatctatccaccgttcgccgtgtctgtttctttgtttttattgatacttgtagtaaaccatacagcgtttgataccctcgtatatattctctcacagtccgattttggaaagaaaatgcaatataatattctcaaagaaaaccccatcgacaagacctgatcagtcattcccgaatcttaacccatcctaacactctctaggtctcccaatctcctgtctacttctctctttaattcttcagccaacgatttgacctgttcagatttgcttgtggatgattcacgaagcacgacgttaaggatgttgtaagggacataagtagcgtttgcttgtttaggaaggacgtcgattgatggagcctgaatatacgaacgtggtgtgcttgggtcagcaacaggatcaaagaaaagaacatgatgaagagaaagtataaatatatcctatctaaaaagacgactgactcttctgatgagagcgatggaatgctcgagggcttccttgagcaagtcatatgtcagatacgactggatcaagcgctcagggtcgttcacctagttaagaaaagccagaatttggaggaaagatgaagatgggtcagacgatcgatcatacggaggacaagcgaaaaagagcgcagactcaccgaaaagaattcaaccaagaaactcggaatagggaagaatctatcacaatccaatagcttttcgagcacagcctgtctatacttgaagaatgtggcaggaccatcgtgtcgttcaagcatgattcgaaggtactgggatgctcgaccagagatcggtccatctagcgaggttaccgttggtgagtcgataagccaatccagatggtcaagagattcactgaggatgacagacaattatatcgttagaaatagtccgaaatgagataatgaccaaaagagagtgaagaatggactgacggaatgcccaaaactcgcgcgtgagcagccgaatgagcggcctcgaccgtcttgatagccagccgttcgaaaactgtgtaacgaaaaagtaaagaatagctcagcatacacgtcagatacctagaaaaagtctactgcgaaagttcacttactaccagtcaggtctacttgcaactggcgcgcgtgcaagaaagctgtatcaaacattccagcctgaacgaacaatgcgatcgcatcttccgcagccaaggtatctacaccagcttttcgcgtgagttcatgtctcaaggagtggatcaaagcaaataggatagaaacgacacctactcgattggaatgaatcagggaaacgctcggccaaaagcaaagttgacagcaccaagttgtactctcgtcgaatatcctccagttccacaatctcaacgtctttcgttcgagcagacggagagaatgtttcttccggaatataagaagtgagcttccttcttttacgtctctgtgtttttttttgtgaagaaaaacaacccacacaacacataagtctggcaaaacgagtggcgtatcaaagacaatgaggaataggcatactttgttaccagaatcagccgacagaggaacagctagccaagcctgcttctggtcaactaacgatagcgcattgatagcgagaagataagatttggcccgtcttggtccgatgtcaacgaatcgaccgttgatctctccaaatcgacgtccctgttggtacatagcagaagcagctgtttgggataagcagggagaagggaaatcaattttggtctgcgcaacaacgagtgggatcgaaaaagaagcaacttacctgctcgataatcgcctctgcggatatgccaagagtataacactaacagataatttgggaacaccaacgggtctgaatgtctagctttgaaagccaatgttctctctacgatatcctctagtccgacaaaggtaaagtgagtgagacgatcgacctcattggcgtgacacatgaccgtcaccaagtggctgacagcatcactgatcctgttacgagcagggaaaggaggaagtctgagtatgattcgctacaaacacacgcaaaagatcagaatgctcggatatgttacttacgattctcgataaggcgtggtcgtcaagatcatatgagcatcctcaaacctacccaaagcgactgtgctcttgaaaagctttgaccagaagtccagagtgtttttcggacgtgacgaggagggtttcactgagtcagaatgagtagcttcgatggcgagattggcgaatttaacgatagaagcatcgagagaggtagcttcgtaaaacaagataacgagcctatagaattcgacgaggtcgacaggctggctgattttggagggaagcaaagcggaaagggtcggggagacagagattgccggacggccatctgtcgagacagaacgtacacacacatatagaagtgaacggtgcacataaacaaatcaatatcacgatcgtcgaagagtgcgccatctagatagattttggtccacgaaagaactcaccaaaagcgcccgaaagttgttcaaacaaggcttcagattcttcaacctgacccagtactaatctcgccttcgcctccacgaaagccaaaccttcgtccttcatgaacctctctccaaattcgaccgcatgttcaggatgaccagcctccaacaacgccaatgccaactttccgtcttgcggctgaaccgcccacatgttctctcgttcggcgggacagaaaggcaaagaagtggtctggaggaaggaagccgtacatgatgagatggatgtcaaggtcgatgttgaaggcagagcgatcgacgtcgggacggatcgcagtaatgccaacaagagtgaagggagaggcagagtgtttgatgaagagtgagaagctaggcttgacgaaggatggttgacgtgtaatgaatcgaatctttcgagtagaccaagatctccgccgaaactgtcgtttgcccccgagttatcaagggagatcgttcgtgataaccatcggagagccgacagcttttggtaaactcctaatgtcgaaaggatcgccaaaggaagcgagtctctcagctgatcttcaccttccttctcgacctctcgatcagatgtgacctggtcgagaaccaaaatgagccctatcaacaagttgaataccaaactgaacctccattccaaggacactcgaagactttcgtctaagaaagcaatacccagtggagatagtgctagtccggactcgaccccgttttccagctctcttacttgattaagagcgagagtcaccagtgttgtgatatctctgttttctcctaaacctgaatctaaaaagagtgaggaaatctctctagatgtgctagacgacatatcgtctgaaatataagaagcgagcttggcctcgaatatgtctaaacaagtatcctcgatgggacagtttacaccagtcgcgaccagttgatcaaactcgccttccaacccgatcttagctgaaggaggcaatcgttcgaccacagaccatccgatctttgagaacgcgacgacatcatcctcgtctgtggccccatttaggtgacctcctccattaacgatcctcaacgccaagctctctccctttccaccttctacaggcaagaccaacccatcccgctcgatgacgacgacgccttcttcttctgccgtgtttccggattcgtctcctcctgaagctcccatcttgacgatcccgaccccccatctggcatctctctctccttctacgactcgggccaagaagccaagccattcgatctttagttttcgaatgtaatccgcgtgcatgatctcccccgtttgaggagacacaagaggagcaagatgagaaccgacgatggaatctactctggaagagagggagggataactctgagaaagcgcggcgttgtgagtggttgatggaagagactggatcgtctggatgtacgactcgagcgcgctttgtagagacgttggggcgaatcgggaaggagcaaatagatggttgataaagatctccgcgacggactctctagtaagcgctctgtcggaggaaccataagcaccgacagaagagaggagatcttcaaagtagtccaccgtgaagccagtgttgggttcgaccacgtccctgagagtttcccatcctccattcgaaccctcaatatcctcccagtctgactcggacgaacctgtggatgaagagagtaaaccatcgagggacgaggattggatgacggttctgcctttgagatcccaaacggcccagatagtgtcctttcgagatcgcgcgccggacttgccaccaagcaagacttcaaagtccctcaactcaacaccaccaccggcgacggcgcttcctaatgagcctccctcaaaagaagacggcggggaggctattcgaacacctgagaatgaaggttccgagatggttcccttatgcgtgtcgacaacgacccgataagtgacaaaccggccgggcgatatgaacgcgttaccagcggccgagctgggtgaggaggatgaagaaatggtggtgcttgagggaggaaggtagaccactagatagaaggttgacttccaagtgtttgaggagacgatttccatctcgttgttgtgttggaaggatgaagatacaggcgaagaagaggaagacgtaggttttcgagagacgactttgatgaacgatctaggaccttcggtaccgtttccgccttctgtgatcaatcccccgctttcggctccaacaccattggcgaccgagaggtctactgttcgtgcgcaaaccccggtaagaacattccagattctgagctttcggtcacgagatagcgagaaggtaaggttgagagtgtcctcctgagaataagacgagagcgcgatgatctcgtttggctggaggtgggaggcgccggacggccgagaagagaaggaaggaagaagcgatgtgatgctggacaggtacgacgttggtttcaactcagtcgatgtccattcgtctgttcaagtaaaggttactccatgttggacatcagcacgagccaggtctgaaaaggccgacaggttgatcagaccaatgccatcaagcaagaaagaagaacaaaccatcgtctctctcaattttgagtattgccccctcgctcagaccaaccatgcctacattctcatcgactgcccagaatacgcctggctgccttcccctaagccagtcggttagatcgatctcttcaaccgcgccatcccttctcaaagcctcatcccatttgagtccggacgaggggagggccaacctgatgagaacgcctcttttcgttagcgccagcacccagagaaccgaacccgctggatgagagaacaagacaggagagctgtgaagaggttccgggaaatgcaatcggatcggctgcttcagacggacatgggacggagacgagattgaaagagagagggacgaaagggagagtgtgagtccgttgttgattgttcggagaaggatattggaagagggagaggaggtggtatagatcgcatgagacggatgatgagggcttgggaatgtttcttgtgggtatgtcaaccttgtaggaacaggataagaaagaggtggtgatgtcggaggggtgggaatatgaatcggaaagtgcgacatcttgccgggctggaaagtagagagaaagagggcgagagattgagttgagtttgagaacagcgggcaaacaaaacacaggtcagcagatgctttctcagagccagttaccactacatctagccaagttctggcttctccctctcactctcactctcgctttctcacctgaatcgttccggaatggaagccgtttgggaaaagagagcattccattttgtaggtgtgttgaacgaagggcgaggaaacgaaaaccgctgatggttacaagattacgtaagtgaaatcgttacatgtcaggtgtcaggaatacgggttgggtatcacgtgatctgatacgtgggttacccctacaggctattcgttccctccatcccttatgcctcttcgcccattttccatcatgctctagtttgcatggttcatgcttcatctttttagttctcgtgatctcgagcctctctaggctcgtcatatgtatatctttagtggcagaccaaatgcgcgaggggtcctgatataaaacggggacgccctcgcgccttctcggataagagttttcctcaagctgagattcttgttgaaacctcttatccaaagtatattgttaacagtttggtctgcttcagatatattaatcgccagagcctaagtgtcaccccgcgaaccaagtgattacacttggttaccttcttaacaaccgagccttacatcagggatgtgacctgagtgctacacctcggtaaccttcttttggttctgccgcttctcctacttcggtattccttatgctctctcattacatcaacatgcaggtatatgaccttccagcgcaggtgcttctagcaccttctatgatctgttctcttatgcataatcgttggagtctaaggatgatatataagacgggtcccctttgccacccatagcatagtctaccaagtctgaatcctttgtcattcc

SEQ ID NO: 3009 - DNA, 6680 bp, Xanthophyllomyces dendrorhous
atatataggtggagggttcggaggtggagggttcggaggtggaggattcggaggtgattttggaggaggtggcttcgggggaggatgttaaagctacatctgcttttccagatgtcttatgttcttttccgccttcgtttttagccctctttgattgcacttcatatctcgttttgttgaacgtatccactgtacagagttactcttgtcttcggcttcttcttttcggcacaaaccacgggttgactttgtcactgcctcttatgacaatctatgttctttttctgtaattctgaaatatcttctaaacaggcggatgtcatgatcgccaaagtcgggatgacgtcgacccggatattttactgaaccgcaaatgttatatatatgtacgaaaaagcttgattcctctgttattcatccaactctggcacgcacacatacacactttctttcactctttaacacattccttcacttggaagattttaagctttcagattgacaatgactatttctaacgaatcgacagttgcgcctctcaagatcgccatcatcggtggcggtaagctcgtcgctttcttgttgttgcttcaacttgaagccgaccatccgcgtttgatcaggtcacttgcgcatactctcctttctgccttgtcctttggttgacttgggcttgagttttgacctatcactttcaggaatcgctggtttagccgcggcgatgggtgttctcaaacatcagaaagagggagccaacgtcgaagttgttatttatgaagctgccgttagaaatctccttcccgctttctttctgataatctctcccgcaaagaggatgttgtgttaattgagctaacaattcattctctttgccttgtatgtagcacgagttcaaggagattggtgctggtgttcgtgacaatttctcttcttcctccaaatatgtgctcctatgagcctcggctaaagaccggtcagttgatttcaaacaggtatcctttggacctaacgcccaaagagcgcttcacatgatcggtcttggaaacgaactagattcgatctctggaggagatcctggcgggagcgaatctgacgatgtatggttcgacgtctatgtcggagaaaagcagacggtcaagtccgaacgcgagatgatctgcaaggttgaagggaaagattctgctaaaggatcggttcatcggtttgtcttcaatcttgttggtttctctttcactcggcttgtatgcgctgggtatgaaagaaagctggatgggcactgaacgagaatgtgctggttctgacttaatctagggctgacttcctcaataagatggccaacttggttccagaaccggtcaaacatctcaatcaccgttgttcgtcttacgaaactatcctttccgaagaaggagaaaatgccggtgggaaggtcctacttcgattcgcagagacgaccgaccagaacggcaataaattcactccagaggacgtcaaggtggatgttgtgttggcttctgatggaatcaagagtttgatgagaaagtgtctttacaaacgtatgtgctctcaataatccgccgtcttctatctctgtatttggcaacagaaactgattcgtttgtcgtcgactctgttggattctcaggaagaggtttggatggagcgctggaaaaatactctggatggatcgcctggaggggacttatcgaccaggccgagtatcatgatatcatgggtaaagatgctagtaccaagctcttgcttctcggtcaggacaaacacatactagttcgttctctatcctcaatatcaaatttctctcgcttatcagactgacgatctcgaatcggttatatataaatgttttcataaagactttccccataaaacatggaaaggtcgtcaacctagtcgtaagtcttctctcgacctgtacgtcttgtgactttcaggtgtcgaaaatgaccttccgttatgtatctatagggatttgttcaagatcatgataatcaaaggctcggagatcacactggaccgtagtccgaggatagacccaaatccgtgaggctccatgttcagagacacacaaatcatcatattgtgaaatactgactagtgtgatttgattgatatataggaacttttggaggactaagcctcattcgatgagaaatacttggctatttttaaggtatgtttctctcgacaacctgtcaaatgaacagaaattcaacctctgtattgcactttttcttaaggcgatcgaagatccatccatctggggaattgtaagatctttttatcctcctttcgattccgattctcaaatctgacatatgtccttgtacacagttcgaccttcccgttttggagcacaccatcgatcaccatctcgctcttataggagactcggctcatgcaacaactcctcaccagggtgcaggagccggtcaagctgttgtctgttcttttctccagctagcctacattgatctgcggtgctttgctgacccactgctgtcttttctcttaattggatcaactaggaagactctctctttatcacagctatcttgtgctccccagtagtgtgctcagctccactcactgagagatcagcaaaggttcaaaaagcccttgaattgtatgccaaagtgaggcatacaagaggaggaaaagttcaaacgacctcggctgaagctgggaaactctgttcgtcaactgtgctcgtatcttgatttgtgtaacgtttcaggaactaacgttctatcctactttcgtgcgctggttgtggtctttagatgaattcaacgaggttaatggtgaaggcaaagatcttgagaagatcaaacaaaacctgatacaccggatgggttggatttgggattgggatgtcgaagcagagttaaaaacagccctcaaagagctagaggagctctgttagagcaagggtagacttgttagaaatcgttcgttgactttagctccctcaatatattctatcattcccaaacatcacgctcaaatgtaatttacaagaaagggaaagacctaaggagaaatacagaagttcgaactgtcaagagacggcataaagagattcatcgagaacagtgtatggaattgaagtatcgctagaaaactatcgatgagaggatcagaggatataggtagagatgtgtgtaagtagatgaacctgaaagtcaaatagatcaacgttgatatgcctcctatctttattgactctcggtgatgaagggaagttgaacaagataacatgcttggtcagtatccaacacaaagagtagggagtgaattatcctagacaaaagagatgagcaaaaactgcatgtactattcggcagctgctgttgcacatattagcgaaaggtcagcgctatggtcgttgctaacatgaccgatattgatgactgatagactgatgatgttttatcagacagctagattccgccgggtctggatcaattcttgttgatcttcggtttggttttgttctcgcttccgcccctctcatcctaccgaatgtcctacgtttttgtgaataccccggttcttcacgacctttgggcttatctcagactggtgaatatatatctgggacatgcgcggtgtgacagagatatctttccgggctggctcgaacacttggtggaggcgatctttctatatcgccaaggtcgagacccaaaagcgctgtttcaaactctcgctcagtacagatgccattggagtatctgccggagtttccaggcccatgtaacctccgactgacattgaccactacaggtggagacggcagggcgagggtgaagttcgacgctgagcggaatgcgtaatcgtcgtggtttatggtctgaggatacccaagtctaaaagggccacgtatcgatcgtcatcggttgtggttactctcaccaagcctgaggcttacagcttatggcttttcaccaggaagaagcatttcatcaaggtacagttatagattgatcgatcgaaatgaatgatgaaacatgagaggtgatatgaaggtaggtgagcagagcacatacggagtatcataggatgcgagataatagtcatggtgagaatatataaggtaaatgcgtatggatgaagatgagttttgaagggtgaaatggaagaagagaaatgtatagatggtataagttcgtttgtgcatacgaagaaaatgacccttgagaacatgaaaaataaaggtttccaagaagagtagagaaagaagatagagagtctatcatggagtgggaacatgttggcaggagcagaggctcaaactatcgatcagcaactgatcccttcttcgagagctaaccagaaatcccagaagagtcgggatcacatcgatcgattctcagttatgaatttggacagtataatgagacaaagcatcacggaactcaccccgtgtagattcaaaccgcgcgagctgacgctagtcgtcatagaactagattgtccggtaaggacccggcgatgggaagtggctgacgacatagaagtcgacccgggtgttccaagatgggaaggcgcgtaagctgtcgtagaatgaggaacgcgaactcgagcggttagagctgtgggggcactgatgttgagggtctgtaaccggaaaaagaacgtcaaaagtatatataaggtcacgtcaatgatattaaaatcgaagcatcatttttcggcctggatactgactttcttgggtgcttcagagaccttgggcttcacactcgaactagtcagtgtaggattcgacaccttactagtagtcggctgcaacgtaggcaacggtcgtggaccagtcatccgtttagacatccaaggatgcctcaacgccggctgaggcttcaatcgacgatccgggtcccaagtaagacatttagagatgaaatcgacaaaaagatcgtcgtctgactttaatacttgagctagcgtcttcgttcctggccgtcgacgtttccccttagaattgactacaggccgggctgttccttgggtatctatgttcactcagaaggggatgccatcagttacgaacagaaagaaaatcgaacaaaattatgtataaatacataccgaaaaagagattctttctggagctcttgtcaataatgtatttgtctggcatgccaagcacttccatgatgcaagatagctgctcctgctcattttctccagggaagatagggaatcctgtatataactcggcgagaatgcaacccaaactccacatgtcgatggcctgacgcagtgattgtataaggtgagcacggatgcgtagtctcatcgttagaacatcagacgagggctagagcttaccatgtgatagttcataccaaggatgacttctggagatcgatagaaacgactttggatgtatgtatagactatatagccaaatgttccggcttgatcagcctagagatcagaacaaaactcagattggcgctgaagagacaaacctttttcatgctcgaagcaactacttccaaagtcgataaccttgatgacactttttgccggatgaccaaggagaacgttctaccaaatcggccaacacgagacaataagctttatatccagacgatgatacatacagagaaagtgacaaacctcaggtttgagatcacaatgcacaatccgatgctgcctcatcaagatgagcgagctcagaagctgggttgtgaatctacgaatcaacgatgtcgtgaagccagcaaaactgttggccttgatgagttcgtaaaggttgatactcagaagctcagtggcgatacaaagatgattccggaagtagaagtgctcggtcatcttgattacatagtgcttctcatcaggatcctacagaaatagaaaaaggggaaaattgatgaagatattcatgattccaaatttagtttctcgggaagaagctataagagaaactagcaaactcgaagaggaagaccatacccattttcgtaaattttctaagatctttacttcaactagtgcttgatgatgaaacctctttttgtttcggataactttgacagccacacattgcccagtttgatgatctcggcactgccagacctgtccaaacgatcccttgccaaggagacacatgatttcgtaccgataggccagatggtcgccaggcaccatgagaaagtcccctcgctcgtcatcatagccgtgattttgattgttgtctgacaaagtggcctgccgtttcttgctgtgtagaccgatatagtaaattgagctgtactcggtgatctctcgacgttcgaaatccgaaaggtcgttgaaatacgacttgatggttgctattcatcaattcataagaagaaagaagacagtcaatataagtctgtataaaaggttcgataccatctcggagaaaaccttgtgagggaatggaaccaaagagacaaaccaagcggtgttgaggccgggctagcttcagtcggttccgggaaattcatcagcgcttcgatctctgaactcgtggcccccgttgattgtttctttgccttttgcctcttcaggaactgcctcatctcttcatcgccgacagcttcatcatcctctatgagagacggagaaattgaggatgatcgagacgaaggaccaggagctgaaagtgaggtggatgatga

SEQ ID NO: 3010 - DNA, 33210 bp, Xanthophyllomyces dendrorhous
gaaagtgaggtggatgatgacgaactcgggagtctcaaggagagtgaggggagtttcgagttgaccactcgggtggaagcagaggatgtgtttccgtagcctgtcaagtcagtcgtactagccgaaggcgtgtgctgagatttcttgataaccaaggaagacatgtcttttgaggtctttcgaagattcgccgccgacgaagcatttgctttcaaggaagcgtttcctgcggtaggtggaacagggagttgcctagggactcgagttgggaacgagctcatggatgcagaggcggaaactccattcaagcgtccagccgatgactccatctcgccatcgccagatttagtatcaagagctgtagctttcgggcctgaactgatggtttttaactcttcatttggagatgctccaactccaaaatcagacaagttcgagtcacttcgagtataactcgaatctgaagacgttgtggccatttcgccagcctttttagagccactgaatgcactaggggcagaggaggttgtcgtcaccggtgtggtcgtctgtcggctctgtcggctcgcaattcgagggatcttagtgggcgtagcatcaatcatccgagtgaacgatgcgctcgacggaattgttcctgaggccgcgacagatgagatcccgttcattggtacgaccgatggtgatccggcaataattggaagatttgctcggctaactcggttgaccgtgttcgcgtgggatgagacagatggttgtcgacgagtggaggctagacctccattggcggatatggaagacgtagaaagacttggagataccttgtgtctagcacccgagctggactttcggtcgatcattgggtgagacatgctgtccattagcggagggggaatagagatggattcactcttctctctgtcatggctcgagatggtctgtttaccaaaaagaatcatacgagtcagtgtagactcggggtctattgccctaagggaaatcactcacttttccgcgcttccttcccagcaggccaatactgctcaatcgaccaggagaaggacgttccttctctgctgaatctgattgctcttttcctcctcttcctgcataaggtcccaactcactccggcctaatgaacctcccgtcgtgatcggtccatcaggtgtctccttcagtgcagcagtagcaagatttctcctagacgaactacttttgagcatgtttgagagtcccattccacccaacattgattttctgacactggacgtggttgaagacggcgacgacaaagttgctgactcgttgattgaggtcgaggattgtattcgacgagaacttgagatcgacgcccgaggagtcgaagacgggtgtacagattctgcgggtacattgagcgcgcctcctttagcagcaagtgctttcactgaagaagacgaggatctcctgaagaaagggatggatgaaggggtcaatcgcttgttacttccactgctgctggatgagtaacctttggagtcgcccgccagagccggagctgatagtttggacgatgatgacattgtcgaggcatgtctcgagacggctgccagatttgagcccttatccagaggagttcgatcagataacgcaaacgagtcgatcgagttggaatgcttcaaatttgaccaaggcatacccgcatttttgggataatcagcagatgactgggaaaatgagcctggtggaagcgacggcgacatggaaagctgttgatcttcaggagcagacagtgaagtcgaattcttatgcgaactcgaccggccaagatgcaacgcattagtaaagctccatttcttacttggcacccttgaactagcagcagaggaaccactagcttgagaagttgtcgaaagttccgatcgggtttggcggtcgatcggtgggcgaggtagggatcgattgggtgtcaaatcgtttcttttcgaacctgtcaaaggagaagctgacagggtggcttgggttgaagatgtacgaaacgtcgagttaggggcagaaactgaggtgggaagtgcttcagaacacatgcggtcgccttggtcatatttctgtgtttgatccgactccaacgagggtgtcgcttgatttgactgagctggagatgggacgctatattgcttgggcaaaggtggcacaggcggaatctccttacctccaatagtacctgataaagatcccctccttgttccctctccgtcgctatgggatgaagcggcgtcacttcctatactggtcctggttgcacttctcgcagaaccggttgcattggatgaaggggccgtagaatatacagcgctcgtggagatggaagatccatgtttagaggaagtacttgaagaagctccgatacttgctcgagctgggccaaaagatatcgacctcggggataggacctctgagtcctcctgttttggtgatgaggtctgacttacaagcattgcaggcatggaggctcggattcgaccagaacgaccttggttgctctttttgtcgtcagaagagggtggaggaggagttcttgaccgattagctgaatcgcccttggacataataccatcagatgacttgggtttgaccagacgggtggactgcctctttccagcagagggagaccgcccgattccgtccaactttcgaagggcttctagggtctccggatcaactaccttggatgggttttgctgagaaagccctgatgaactatgagcggagtccattcggaaatgatcctgtttttttggagaagggagagaatttgggagagggggtagtgggggttgatccgacgagtcgttgtgtatgttggagtttgaaccttgccgaagaagctttttgatggaagatgtggacggagatggagggagatgagaaaaatcgtttggatgggagaattgtcgaacgatctcgtgagctggcgaagatgggttactgattggtcgtccagagttagaggagccggtaccagaccgctctcgttctcggaatctcctgctgtctgtactgccgaaggggtgaggtgaaggatgaagttgaaacccttctgacgttcttcttgattctctcttgagtatggagttcccgcccggagaaggttgcgcggaggacagcggcgatggcgaaagcgattcgatgctatgcttagtagaaaggccaatcgacagtgcagaatcggagacgccctgattttccttctctgccaactcttccaaatgagactctccttccgatccccatctgtcttctgcaaattgatcggatagctcgcgtttgtgcccacccgtcgtaaatctcttcggactgaaggagccttggccgatatttggagaggtaccttgtttgttgtgaaggagacgatgatgagaaggagacgaaacagacaaggttacctgaggcgaggaagaaggcggggttctgggtggttgctcagacgtatagtgagaagatccaggtgtcgtttggctagactcagtctcaaagatatcacatatgggcaacacatgctggccctgatcgtcctcgaaccgtctagtcttcctctcagcccgcgcttctcgggattctaccccggatggctctcctttcgatgatctgctttcgcggtcagtcgatatctgctccatctcttgatcgggattatgttcccagccatgggtttcttccagtttcgatgacgctgcccgcagtctagggttcggcgaccagtcgatagttgacccgaccttgttggcccatcggggggttgtcagctctcctacaccgacgaggcctcgacgatctatcgtggatgggctaggtggatccggggtcatcgggaaagcactcggaggggtcaacctgtgtgacatcagagataaatgcatatgtcaggtgggtattctgcgaacgcgtttcctgaattcattaaggaaaccgtgggctcacatccgcgacttttctcctcgcatggcggaagaacgttctgggagaactcctagagcactagatagaggagtttgaagcgaagagctaaattgatgacttgaagaacgagggagaccctcggacttcttcgccgccgaaacaggggctgtcgaagcaaccgctttagacgttgagacgagcgaaggtaacgaaggagatggcttaaacaccggatttgctcctcgtatggactcgctggtctataaagatgaacaagataaagagctgttagtataagttcctcattagccaagtgattaactcggtagacgtacttgatcctcggcccttattgaaaccatgtcccgggtccgcctatcaggacttgtgagctccagagcagtaggagctggtttcctcctgttaacgctactgctcaaccctccactacgatcgactctcgagctctgggcatattcggtcaatcctgacaagggagcttggtcgagtaacggggaaaatatcggaccagtattcactttgtctttgtcggaagcgaaagatgtgttgttgggcccaaaggagatccgatggcttgcattctgctctctggatgagcgagatgaaggagagggaatcatgattgatgaccccctgtgttcttaggggggcttaatctgcatcgtatggccaattagctgtcgtcagaaagatgcatctgactgatgaacgaacagtggccctgacttaccacagatcaaccagagggcgagacaagtgatggatcagaacaaatcagacagaagaaattggctagaggggtatcaaaaggctacctgaacagaaatgttgttaggagaaagatgaaaagatgggaaagagatgggaagccaaaagaaggcaggaagaatggaaggatggttaacgaaaggaataggaaagttgaaagagatgaaagaatccaaacaaaccacatctttttccgttgattgtgactgttgcgagtttctaatatttccttgtattcccccggatcgtttgtattggttcgtgtcccattaggatattcgtgctactcttctacaagttaaccttcctttctccgttatctactctctcttcgatgatcactttgtgctgtacagctcatcgagtgtcttctaagtcttttcatatgacgatgagaacggaattatctcaggatcccggctggtaataatatgtggcttttctctccttctctatatctttcgcgtttcgctgttctctcctgaattgggccatccgtttccggctctgcttgagtgcctcatccctgcgcttctcctcggccgtccgaggagggttactatggaagaaggaccgaagagtctggaagataggcataggccagtctgtgttcatacaaagtcccatatgtttgtgatctaactcccatcagaggcacgagcttctgaacagcgtctcaggccatcaaggattatatcaaagcttactgtggttaagacggaacggggtgcacgctgagatggtcactagtagacagatgattaagaacacatttcttgagtttctctctcagtcaactcatgttcttccccaacatagtcctgcttgcgtttgccaagcggatgcaaacttagtgccttggtcttggcgttcataaagattagtgtgattgtccactagacttaatccctgaacacagcgacgggctgacagccagcgcagataccgtctagccgagaagataagtcttgtcaggccggacttttgaccatatcaaagaagtctctctgaaactagtagaacacgtcttcctcgactccggagggtttcttccgttgtgtatgatactgacgcgagaagcaccggtagtaaggttctttgagctcagaaccgacagataagcaagttagtttcttcaatttattcaggtttcagttcatggtggcttcttgagcaaagacggattgtgcacgtttcaaaattggccgtcttcctctcgtttcaccaacgttctctattcgtattgacttttgacaagaactgaacgttgacgcgttctctgatatcggccgacatggaaatgtgttgtagagatgacagatgtagtgaaggagaatgtgcggagaaggggatggcagcaaaggccgctgctgaggagaacagatgtacaaaccctatagcaattctatcaaatgcctgactctctcttctcctcaagctgctctcaatgttttcttttgtctagactgttgttatatttgattgtgcttcgtccgtgaaaggctgaacgacaggtggaaggcgcagatttagacatctccatcgagcttagagtcgttgttttcttcctctgtttgcatatctgccgaaactccagctgcacctgcgtatcggtcctcaccgacagcctctctcatcattctctccagccgatcctataagacaaaagataacatgttacctatgtgagtaaatatcctgaaaagaggggtaacaaatcaaagagggaaaaacatacaggtgaaatactcctgcttcgacttcgccaactttcacctccgtcactacccacactaccacttctactcctgcttctacttctactcctactcctactcctactcctatctgatccggcactcctactaggactcctactgacaaacctctccctgtcttcgtcctccctatcacttccatcacttctgctcgccctgcctctttcctcgtcatcttcttcatcgtcaccgaacatcttatctcctaaagctgattttcgaggaagtagtccctcagtctcctcgagaacagatcgtttggtcagacgagggaggatgatgtcgcaaactctatcctctgttagaagttgatcgacaaactcatcaaacggtacgatcgaatagccacctgggatgcaaatgagacaacaggaagaaaagacatcagttcagtcagaggtttacagaacgtaatataacgagcgctgaagtccgaaggagcagaaagacgaactttcatctctgtatcgaagttttcgatagtctttcaggagtggttctaggatctcgtagacttcaacagactggaatgtcaatctcacgtaaaatactgccaccgcacgaagatacctatacacgagtatatatgtacgtgttcatgacgcgcaattggtcaatgatgtgttctttcgagagaagatgatagattgaatactgacttgaattcttcggccaataggtattcaatcagaatttccttatctggttgaagttgaagtagcttgaggacgagacaaagaaactctgttggcttctggttgccgtatgttccgccaatattctgtatagcaatcgctttatctatcagggtctccgctgatgattatttggatgaggagaaaacgaatagttcgtgacatcagcttcgattgagggttgttccgaatcaagcgaaaggatggataacacgacgaaccagtcaaggcaaaacagtgctccttccagtaaatggaatcataaattcttgctctgataactttctcaacaagactctacccaaagacgttaagacaaaaggcgtgacttcaatcagtgtcatcgaacacgtcaagtctattgcgagggtaagcatgaggctgtaaaaagcttacttgagggttgactccgtggatgtttttatatcctttttgagtgacgttagccattttggttacttgtgtgtgtgtgtgtgtgtgtgtcttaagagctcgaatcgaacgtatgagtgatagctaaacccagaagatagactacacgttggctgggatggatgggtgatgagagaatgatgtatcgttctctgctcgctcttgttttcaaggtaaccgtgcgaagcagtctaagacacgctcgaattcttagcacgtaaaacgcgtctacatttttcagaagcgagaccttgaggaagataatctgactctgttgtgcccttccttttaggaaagatgctgtacttgttctctgtttctctctttcgttgttcctctgctcctgtctgaatcgaaaccgatgacatatatttatgttacatgaagagctagcagtctacttgatggtcattcagcgttgaggaacaaattgtcagttgcgaagcgctaacagctaaagctaatttatctagaggcgaagcagattatgatgatgatctcacatttgccctctctacagactttctctctattgcttctcatcctgcaagctctctaccaatctgcccaataatgaactctccatctctccttttccaccgttctctcttgatcgagcttggaatccggcgaggaatgcggccagatgagcgtgggtatcctcagcaggaatagggatcgttgagagcgtattgagaataagcggaggagtaagctgagtgtccattgttcaagtgtctgttcggatgatacgtatgagggtatgtgagtgtgtatgggtttgtagacgtgtgaccgagtgtgaagaatgtgtttgctttgaaaagctgaatgagaggtattagggttaaattcgatacaagtcttacatcagcctcagcaccttatcggttgatctctgacgtcttccctttccttcagcattctcctttacacagacatccgaactatcaatcatatcagtcaacatgacaagagcagcagcagcatccatcttggatacagatctatataaggtatatatacgtcgctcagtgtacgagctctgatctctggaagcaagcgtaccaccaactgacagccgttctccgcacgcgaccacacatcgttattttccacaagctgacgatgcagcaagcagtcgttcaatgtttccccaacgagacggtcgagtacaaattctataaccgacggccagacacaaagttttcgcgattatcctttgactggttttcgactaaagttcaaggtacgcatagatggtatttgaatgtagcctcttccgcccgtcgcgctaatttcactcgatccctcgtccttcgaattttagaactctccaaggtcaagctttctaaggacgagcggacatggcttgagacgaaatgcccatactttcaagcgacctacctcgactttctacagaatctgaggctctctcctgaagatcaggtgactgctcattttgttccggtctctgcggatgaagtagatgttggagacgtcgagatcacggtcaaaggcctttggaaagaagtcatcctgtacgaggtccgtgtcttattcgcaatgtccatcacatttgaaagtctagtcagacatccctttctgatattcaaatctcgttaactgttcaacaggttcctctgatggcgctcctttcggaagctttcttcctacacaccgatacggactggacaatcgattctgcaaaaggtgagactttcatcctctgtgtaatcacttcgtttatgttctgaaatggcttacgttcttcttctgaatcaaactttacgactgaccgtgacatctcacagataatgctaagagcaaagcggctagccttctagcacacggtatcgcgttttcagagttcggaacccgccgacgtcgatcttatgaggttcacgacctcgtacttcgcggtctcttggagggacaatcagatgctaaatcaaatggatattccggagctggaaggctcgccggaacatctaatgtcagaattctcagcgtttctctttctcgaaggcgaattatattcactgaaaaccacctcatcttgaacatacatgaacaggttcactttgcacataaatatgatctaaacccagtagggacgatagcacacgaatggacgatgggcattgcggcactaaaaggatacacagatgccaatcccatcgcgttagatctatgggagtctggtgagaaatctttgtcgagaaatgtatatgcgcgacgttcagtatatggcttcttaacaagtggtctgatatctttttctcatataaagtttacccaccctctcccacatcacctttacataccgctctcaccgatacgttctcaactcccatcttcttttcgacatttactgccgaccgagctcgagcgtggcgtggactccggcaagactcaggagacccgattgagtatgcaaatctggcaaaagagacgtatgatagattgggagtcgatatgaaggacaaattcatagtcttctcggatggtttggatgtcaagacgtgtgttgatatccagaaggtccgtcactgtctcttcctcttatttggttccacccactcttcttcgagtgtagcttcccgtctatttctctgaatcaagcgggcaagaggtttaacgggcataacactcggttcaaaggcttgcaaagagattcagataggagcgacattcggaataggaacgttccttacgaatgatttccatcgtgcaagtgattcaaaggcagactcgaaagcactcaacattgtgcgtcccccctttctttcgctttccactttctctccctctcttcaacttcctggtcgaagagtacgttctgaaaatttcattgtttctggggatcatactactcaatgggaggtacttaggtgatcaaattatcgatcatcgatggaacagactgtgttaagatctctgatgacttgaacaaagtctgtccttctctctcccttaacaatttatttttttagaattaatactcactcctggtcttttgtgtatgtttttgatgttcgctatctcgtagaacacgggcaaagcagaagttgtagccgctgctaaaaagacgcttcaaatttagtttagactcccgttgactccgaatcaacaagaaaatggaaatacgaacgaggaggcgctaagaacgagaaacgagggttgtggctttctgaggattttgatttgctatcatatagattggactgatttcttagactggagaaaccagtcaccgataagagacaaatatataaaaaatacttctcgtggaacacgttgtaaaggaaagaaataatatcgttccatctcatccaattatacaatccaatgtctaggtctccattggtgctccccctgtaatcgatgacgagccagcagcagcttctcttgtagcttgttccgctcgttcccttgcgagcgcccacttaacttccttgacatcctggtactcgtaccaaagcgccgagagatcgtagttgtcgataaactcccaaccagtctccttgacgtgatacagattgattgtgtttccagagtaggcatcccgctagatgtgagaggagaggtcaagatatcaaacgttaaaggccaagaacgagggatgtaaatgaagatgttaaatatcaaacttacgtgaccagcagcgcagatcgaccttcgtcctaactccttagcatcatcatctgataaatcccagttgtatccctaccgacccggcccggttcaagagaagcgagaaatgaatggtcatacaattgcacgcgtcagtattgaaatagaaccgatcctctccatgattcatcatttcttttctcttgcgtacttttcacacaaggataaccaaagcaagtccaaagctgcacaagagtacgcacctgatctaatactccataagcaaaggtcgatccagaaccgactgaaaagacgtcaccttttaatctcgaaccgtccgaatccacgtaatacaatgctggtccctatgtttcgatcgattcataagacaaaacgaatgccagaagcaatgatgagtctgtgtagtccaaaaaggcgtgttgacgtacagacgtaccgtcttatcccatccacagatcattgttcccatactaagtcccatacccttgtacgaatacaccaagttagaaagatacttgctggcagctgcgaccgagatcctctccttctctcgaagctcatgcagcctgcattgcattccaaggtaggtttcccagtattgacaatcggctaagggggaacatggcagcaaaatggagggaaaagaagacacagagtttatcagaaatcatacaggagggacgagaacatacagagtagaaaagaatgtaccagctcctccggccatggttcccaaaagatacttgttgatctcgattaccttcttgaccgttcccgaggctgaatgaagcgtatcaggataatcatagatcagtcagcgctaaggattctaccacaacaaaatgagggaggagtcgataggagtctttcataccaatatagctccctgcggtcgctcgactatcgactgcaacgatgatacctcctttgtaccggaacgcgagcgtggtggttccatggttgagcttgatcttgcatgatggatctgagtgatcatctgtatgaagtctaaggaaagctgagggctgtatcggagtgagtaggccaaagtgtcaggatctttcatgaacaagagaaagggaaggagaatagagagaacagctgcaagccaaatcgttcatccaagtccctctcaagtctggtttgttcatctctattcaaaccgaggtgatttggcgacgatctcttcctgctcttcagccagaccggttttgctcaaaaccatagcaagagagaactttgtcttgaattggttccggaatgaatgctctagaaaggcgatgcgaacataaaaagatggatagaaagtcattcaaacagtatgacttacatcaggaacagcagggactccgaatcgaacacccttgtcggtctcgatgtttccaaacaagttttctgtttggtcttgttctggacgaggtgagaactgggagaggagtttgttcatgtcgtatgtatgtaagtaaggacgagagtgatgggtgatgaggtgatgaggaagagatggatgtgagcagaaaggtaggagaggaaagtgatgtggatgagattgacagacaaggcggcgtggaggtctggtctgtcgatggttacggtgaatggttacaacgcctatcgtgccagtcagagcgcaaggcaagtctctacagggttgcgagtgcatctgatggtctcgagaagagaaagactgtgtccgtacaagattcgtcagcccgattagctatatgctcaaggtacaacgagtcgaaagtaggatcagatggtgggaaagagcgcgatgggtcatggtacaaaaacgatattcgactacagagttccattagagaatctcactatatcccttgatagacaatccggctgtagtccttaattacagaaccgactaatcattaatagaaaaaacgaacgagcgaattagacggaaagaaaagaagcggaaggaagaaaaaagtctcttctcttctctcatcattacatccaccttcgttctgtccaccaagcatcctctgttcatcagaccatcgcacacatctgacccatctgagcgtacatacatatatacatattcatccctataggacaggcgtcacgtaatgttccggccttcaatcctttctgcggtgtctagaccgttggctaggcacttttcgataaccccggccacccagatcggtcgtcggtcatccttgacgagcccagttcactcgtatcctaccctgccagacatacttcctattcctcttcgatccatcacctgtccatctgttccctcgccttcggcctcctgtgctcctcctcactatcttcgaaacccactggatcctatccttcacccggattgtatcccattcagcacccttctcgagaccgcccgaactcaatcgttcgttaggttcccactcgcctcgtccgccttgcccactcaggcagacagcccgctggagggtcatctcaagatgtatggcaagcggctcccagcagagtatgagactgctgccagagaaggcgacgactcgttggacgcttccgaacgacgggcaaagctattcgagtgggagaggtgtacttcctttagggcgacgtgcatgaaacgattggcggagaagaagcttgtccgaagggccatcagagtcggcaatggcagggaaaacactctcgatacaactaccgctgtgggtgggatcctgatggacagtgtgaaacgaaagagaaagaaaatgatgagcaagcacaagtcagtctaccccctcatcgctttcttcctccgaactaggctcctaggctctggtatactcactgtattcactttttctgcatccaatcattccttctcgtcttaccagatacaacaagcgacgcaaggtatgaatgctgatctttcctctgtgccatctcatatatcccagtcatttttcctatcagtaaaattcactaaatattctttctctttactcctttgttctgctttcaggctacccgaacggctcgacaaaagctcggaaagtaaagccctaatagactggatcagtaaaacgagatgtactctagccgttgtttgggagcactcttttctctgccctggatgtgttttgtgtcagtctgagaaagacttgacgatgtttgaatcaaaaacaatgcatgaaatataccttctaatattcttctctttctcgctatgacttgctgcaaacgacctgtggattgtttacattgtatttcattaactggaatgaaagaaactttcagatcgccccttctgtcctttcttgaccttttcacatcctcccacctccgatcagcccagtctgttttccttttccaccgccggaagcctcaagtttctttcgggtgtcatcaaaccgacggacgatgagctgacactttgtttccttgcagagcggtagagcgagacgttgaatgtcggatgagaacaagctcaaaccagaggctcgctcgatttgctccactatgaacagtgcacaaggaggatatgtatttagtcgatcggagataaaaggaaaaaaagaatacaggacgtaagagaacaaagggatcataccgggcacttggaaagactcaagaggaacctcatccctttgttttcgtttccgagatagaggttatcagaataattaaagttaagacagtcagcgacgaagggaactagatccaacagactgctctcaagaaagaacttgatagtatgaaaaaggacatacgggatgatagcattaggcagcacgaacccagccatgctcacttccctgttgatggacttctttggatcctcacctcgaggcacacgagacgtcaagatgactttggagaaatgagtgggcacagagatcgaaggtgggtttccgatcacttcgtgtgtcacacgccatttcccatctgccaatgattttgtcggcaagtacagaggaatagtaaagacgtaaacgtctgagaactcgttcgtcaactttcgacaccactcctctaggtaagcccagtctatagtttgataaacaaaggtcagtactgatcagtctgcttgattaggaaaagagaatgaataaggaaacgagcaaacgaacagtgtctattgaagccatctcccacctgaggagcgatattagacaacaagaacgtctcgttcatcgcttcctgaaatcccataccattaggggtcagcgtttccttcgccgcgcgaatacgatttaaaccaaggacaagggattgctcaaacctgactgatcttggcatctgccgcaggaaccatatgtcctctgtcatatccactcctgaagtagtccttaagcttcgccctaaagagacccgggatatcttcatcttcttcgaacttagacttgtctctcgaaatcgcggtggtctcaccgggctgaacaggggctttggctaggttggcgatcgtgagatgttcagccgtctaagaggcgcaatacgtacgatgaaaacgtataatatcagccaaaagaacacagagcaaggagagaagaaagaaggtcttacccaagcggctaaggaaatgaacggagttgagatatgaatttgatgagctcttataggttccttgtcggttagcaggaaagaaaccccagacaaagaataaccgactgacgatgttgcaaccgtcgatcgtaagcggtgatatacctacacagacataaagaccgcggagtaattagttcttatctaacgaacagaaggaaaaaaaaactctgttaaaagcacacatacgctctccttctcagaacgtccgaggtagaagcttgttgagaaatcccaaaagagagaagaacaattagggctcatcatcttccttctattgatcttgaacttgaaacgaactgactgggcactccaaatttccaaatctctccatcgactggcgttctgaatcctgtattcgatccgatgtccaagatcgctctggtctcgctccttgcctgtcctggagtagaggcagaagaataaggagcagaaccaggagcaggcaacacggtgacctgtccaggactcggaacggcgatggcaaccgatccaggcttgggtttggagggaccagtcagataagcggtcgttcctacaccgaggaggagacctgtggagaatatagccgattggacgaggaccgaaggggccatggtgttacaggttttgagttgtgggagacggacagggtttaaagtagcccaaatgagagttgctttgattaaaccttccgaacggttgtagagctctcaaattatgttttaattatcgggcgccatgcctttacaacaagcctgatagttatttggttttcatatgttcgcttcatctctggtccaaaatagtgataataaacatgaatccaaacagtggcagaatcataggaagaaaagaatatgtatagaaagaaggcaagatagaaaggaatccctcagtgacattaagggtaggccggacccgacactcattgtggatgcacgatggcagagcacatgtgagcttgactctaattgtgttggcaagtctcatcatcaggattcccttcttactttgtatataaatgtgaattgacaagaaaagatgtagatacggaaacattgagcaggacatagatgatcagggttcagttttgaaattgtcagtaatagctggctaaagaatgagaaaaattaagataagtcttcataaacacggactaaaataagacccaagaagaaaggaacaactcactcagtctttactttctcactccatgtccttcagcatagtaaaggacaaggagcaagagaaaggaaattagaaagaaaaagacacgaggacaatggtggtgaacagaaggaaaaagttagggaacgcagagtttttgtactcgaattttcgaaggacgccacaacataatccacgtgccccatcatgcactgctcttctctcatggtgactacctagtcagcgaattttgtctttctgattaacacctggataactcgaacacgtcctagctcacactcacacaacttcttttactccaacttaaacaatatggccaatcctcgtcgtaagtaacatttcaattgggaagcaggtagagctcttgttgttttctcttaactagtctgattgcaaacgttgctctattgtcggtctatccgtcatccagagcgaaataagtcccgatctggcgcgaaggctatccggacgacgaagaacaaatcttcggctaaaaaggttgttattcgaggaccggctcctcttgtcgctgcttgggacaagaagaagactgtgcttcaaaagtaagctcctgtattttctacttgatgttctaaatgttcttcttcctctcaaaaaatccggctcggtaccacacgcaacggcatggtaacttactcttatgtgtgtacatcctgttatctatcctattcgccacgtttctcgtcgctcttagctacacagatcttggtcttctctccactcttgcccctcgtcgagcgggtggaattgaaaaggagattttccccatctcgtcgtccaaccctactaccaagctcgctcctcccaagatcgaggttacatcttctcttccgtctggaaagatcccaaaaggatatggaaggattgtgagggacgaagctggaaatgtggttgacattatcttggctgaggaggatgcggaggagatggaggttgagcaggagcctgaggaggacattgggaaggggaaaggaaaggcaaaacaattggtcaaaggtttgtgcatatttcctttccgtttttctgttctcctttctctctcctccccttcttctggaaacagcaacctaaacatccaattcgctgtatcaaatcagaacttgaggaatacgccgcttcccgtccatcgagcaaacctcttcgccacaccactcctgccgaacaagagttccttcgagctctctacgccaagtacggccaggacaccgctgcgatgagcagagacatcaagctcaacaagttgcaaaagacgaaaggagagattgagaagagtgtcaggagggctggtggttgggagaacgttatcagagattgaaagggaaggaagaattagtgtgatcttctcatctcctcttctttcatttgggcctgatggcgctcagttgtacattactctatccataccgcatctcttttgtttcctttgcgacgagccgttgtcctcactttattcaagtttacaatggcaatcacaataaatcaagcaagaacagacaaataagccataagccctttctagaacttgaaatttccctcatcccctcttccacttgtttttcctctatccttccttggaccggcctgtcttgatttcttcctacccatctcttccgccaccatgtccgacaaatcttcagtgtctcgactagaagaaacggccgaggcttgccgatgggcttcatatcgggctgccagttcttctttgctcatcgatgcgagctccgatggatccaacgtgagttcgatcgtacccgccttgcgctagagacaaggagaaaagattgggatcagacctccaaatattagagagagagaaaagacattgccggggagaattatttaaaaaaaaagacaaaccttgacgccacggtcctcttcacccaataccctggtgggtgctgatccattgagatcatagcccctctcacttcccatgaaacctctgacgccaatgtacttctcctcgatgactttgtacaactgttgaggctccacactctccgttcctgccctggaaaacgagtcctctctgtcttttcggatatcaaggaattctggagtctccataccggaaggaacggtagagattgtgctctgaagaccagaaggagtctctgttccggctgcatcagccgaatcagggaagatctcgggagtggaagatgtggttgattcatcatcggaatcagactcttcttcttcgtcttcaggttctaattcaccccaaagttcagtctcgatcggcaacgcgtattgatcctctgcagggttcccttgaacaccaagcacgtctccgtatatcggccggttgtactcgtccactgggggtcggccccatcctccggggtggaaaccccattgggcaccgttaggaataggcgcgttgagacctttgattcgaagtgacgggtacgaaggtggtggtccgtatcgctgcattgagatcaaccacggaggaggagcaagaggtgggatggacaacgcctctgtgagttcttccgacagctctcctggtcgtttctctttcaagtcggcctcaagctctttcccttcgtagtagctgatgagagaagagaaggtgcaaagtgaagccataccggtatcagcaaacgaagtcctttgattgctgaaaagcattcaaagaaaactacatacatctctccaaagtccgtcatcttgggtttggtcgcgaatcggaaaaacgcgtcgtgaagcttttggtaatcgatatcaatcttgcccattttgggctgaactcgttctctcgtcttttgtttcaagctctgctccttctccttctccttgatagcatcccgctgggtagcgattccggtatcggcgatgtgcgctgagagatgttaaataagaacatcagtacatacctagacgtcaggcagtatgttcaaggaaatatggacaaacagggaagttggaaggctgctttctcgactcctcgcttgccttggagataatctcgcttggctgaccagtggccgggcacagggacagtatttttgatgcaaagacgcgtgaatttagctgtagtaacttaagggaaccagacatgattgagccgctcttaaaaaggagggaactcactttcggtacgacttgagttctacaagtaaccttggatcacgagccgttggatccgtccattcgatcacttccggatgggacaccaatgatttcagatctgctactgttaatctctgcaaaggtttggccgggccgttcagttcttaatctttccaagccaagtctggattcctccacgagtgaagcagactcagtcaaacgcgtgcgagatcagggggagaggacgaaccgccagctttctctgcttctttttgctcaacttctctttctcggctcgctcatcctgatcttcctcgtcctcatcttcttcgtccgaataaataacctctcctttactggcaataccgtctccgcccactccgtcgacctgttagaattcgaccccaacatgtaaagagataggattcggaaggcatcagatatcgacgaaagcggaatcacaacgtcggtagtatcaacacgtaccggtgtagactggtcgtcggcctggaagcgttgaaggacggaagcaaacgaagcgaacgcaggatctgaaagatcaatggatgctgtcagatcttcgaccgaggtagcaggtgtctatttgaacccaagttacgatgagcccccatatcatagaaggaaaggcgagaatgcacacaagtcagtcgataggcgaggcggaaagcattaaaagagttctgtcttgtactcttgagagaaatcgatgaggacttacacttagctcgctctcaacttcactctcggcatctactgtactctctgcatccgtggtctctgcgtctgtgtggtctgtatgtccattgggtgtttctaccgacgcattggccttcttagctttcttcttgtccctcttgagctgatttcgagagagcttctgaggtctagcctccgaattggttgacgatgatggtggcggcatgatcagtcagaaattgaaggatatgaaagctgaccaaaggatgaagaaagggtcttgggtcctaaaggatgtggatcgcaaataagaaagacagagacagagagaggatatgagcgatgtatagtgatggttacagatcaggtgttacgcgtctcgctcagtgatatcctgttcgatttacgcaatctcttactcgttatgctaattcctgatactcattgcttagtctctaacacacttctctattgatgttggatactcaaatatcggttctttgccctgattgtcaagtacaaattcatctcttccccgtgtctatctatcgagaggtgctccatgcatcctcagagatgttcaaagaaaggaaaaactctgtgatgcagtaatgtacttttctggcaaagtgatcaaagttcctaatggtagacatcagctccgcgtcccgccctgatatccttgaaatatacttcatgatcacttcctattttctgcccgcgttccttccgatcttatatgtagtttagtccaagcaagtgacgcacttctatagctcaaggtggccattattttcctgcacatgcggatcttccacgcttcagtttgtcagaaccgctcttgcgcgcggacaatgaaaagtaaacaaagtgttaactacctcatcgttgaaatgctcgtatgtcagttctcctatcttgtgattctgaaaaaggcctgggaagatctagatatttgcaggctctgtagttaactatcttgaaatttttgtggaaattacgcgtaaagaaagagacaaatgacaacgagaagggcaagttcaggagggagaggaatcaaagaagaagagaaggatcatcatccacacaaacgaatcgttgctcggagatgtcgttcacattgaaacgagccgactctcggcttagttgtcttttgtatcactcttgttgttctttaaacacttcttcactcgctctacggctaccagtattctggtttgccatctccattccgcctcatccatcaccattcctcgcgcatgcgctcttacctccttcgattattctaatttgcagtccataatttacattgcactatttgatgcccttctctttcttatctatcagaccttatttactctctctctctctcttttgtttttgatcggacctgtactcggaaggggcagaacatacacaatcaccgtttgctggatagccggtcgtgttaaaacaccaaatggatcggacgtaacccgaatctggaggttactaaccctaacggacggttgaaagagatgccgtcctgctgcgcttttttctcccccccccttagccgtcttttttcttgcctttcgttttctacccctcttcttttccttcctccacgcttcgtctctcctttttttttttcttttcttttcctctcggtagtcgttcgacctcatcctctctcaaactctacatcaacatcataatgtccacctacagaccctccgctttgttctcctccgctttccccatcctctccatcgccgagaagggtgagaaggccggagctttcctcgaccagaaggccgctgaggccaaggccggtcttgagaaggccgcttctattggtgatcttaaggcccagcaggcccagcaggccgtcctcgaggcctctggcaagaagcccaccggtgtcgacctttacgctcgattcgctgttgccggagtaagcttcttttctccttatcataacagcgtcgtccattatagtatcatcagatggtcgagcgatggcttgctcctaattttttccctctgccccctcaagggagaggaaaagattaggagtataatatatccctttacacagatggttcttgtatgcctgtcttctctcaaagttctcatcactgacccactttgcctacacacatcatctgcttcaacaggctcttggatgtgccatcactcacggtcagtccatcttgcttcgattgcgtaattcagagttaaagttgggagtactgagcgatggaccgcccaattttcctctttacgtcttcctttccatctcttcatattctaggtgccgccactcctatggatgtcgtcaagaccaagattcagcttgagcctaaggtctacaacaaggttcgttaattgatatctctagtcgtctttcgatcacctacctctatttttctcgcttggcaaagttttgttgctcatagtctctcccttctgtgtcatctctctttgtcttcttccagggtgttatcgctgccgcccgatccatcgtcgccgctgatggtgctggagctctcttgaccggtcttggacccaccattgtatgttccgctaccaatttgcatatcccattatagtcgagagctcatcatgcataacctctctgtcatctctacataggtcggatactccatccagggagccttcaagttcggaggatacgagttctggaagaagaaggccatgtgagtttatgtgcttctgcctgcttcgactggataggctattttgatactgacattgatcctgctgttgtctatcaatctagtgactactacggtatcgaggctgcccgagagaaccgacaggctatttacctcggagcttccgccatcgccgagttcttcgccgatgtcgctctttgccctcttgaggccgtccgaatccgattggtctcccagccttctttcgctaacggtcttggtggtggattcgcccgaatcgcgcgagaggagggtcttggaggattctacgccggttttggtcccatcctcttcaagcaggttccttagtgagtatcggtcgttttcatacctctttaacacaaaatgtgatctggatacttagactgcaagttcacctcttacacagcaccatggccaagttcgccgtgtacgaggttgctttcgagaagatctgcactgctgccggcaagaagccctctgagcttaccgagggtaccaagactaccttcaacttgggagctggtttgatcgccggtttggccgctgctttcatctcccagcccgctgatacccttctctctcgaatgaacaagaccaagggtgcccccggagagggtatggtctcccgacttgcgggtctttccaaggagctcggtatcaagggactttacggaggaatgaccgctcgattcgtcatgatcggtaccctcaccgccggtcagttcggtctctacggttccatcaagagcgccctcggagctactggtggtgtcgagatcgctaaggcctaaataaggttgtaagcagtaagagagaaagcctgtgggtgggtgtttaagtgagagagggaggagaagcgtcctcccttttgttccttgttaaatctgcgaattctttcattctccctccttgttctccttctctcttttgtgtttcttttgcacgttcccttgtatatgaaatcacgctcggttccgccttgttcttctcttttgttacgtgtcttgtttccccatcccctcgcgccttttgcttcttttctccatcatcttctttatccttttttttttctagaatgtatcctttggattgcacattgtctctgaagcgttggcacaagtgaagtactacacacattggtatgaagaaacaaaatatgatcctggcatgtttgctgctctaacagtatatctttttctgaacgtgttttcctttcttcgtttcaaataagacgcatgacatcgagaacagtaacatgaaagaggaagctagttgaatacccactacagaacaacaaagaaaaaaaaacagagaagagacgaaatcagtcacagtcttttttcaaagtttttgatgcaagtcgagagcaaaggatgaaggagaagaaggtggtgaagtggaatcagcgatcttggtgattaatgttagttctcataggctagatgggcctctgaagtagcaaatatatggttgatcatcattttgaagtggtagccaggcgagctgcagggaaaggaaggaagtgtatgcacaacagaagaggaaaagacctaccgataccagacaaaagagaggagacctcaactgatcatatgggagacagagggagaacgaagggagaggaggggtagtgggagaaaaagaaatttggcctgaaaaattcagttgtccgtttacagagcgagggttagaagagccgatatccatagcgaccgtcgtcaagggagccgacgcttagctagcgggctgcggacaaggcggattgaccggaggaacccgtgttgtgcctggaccgctcatttcaccgaactcggccttcgggtgtcgacggaatgatgatgggcacgaacctcggccgaagctacgagggcggcacagatgatctctagatatggatgctccgagattagcagtgagctatctgacatatgcatatgtgcatccacataggtgaagatgaatgtatgtttctagttaaagaggtagagagaaaaggagagagaaagaaagaacgatgggaagagagaaagcaacacgaagacgaaaagtaatataacgctggatacaagactgaacgaattggaagtgatggctgggcaaaaagcgaaggacagagagagtgacgagtgattaggcagcctattgaatatttccaatgacctcctcttcttatcgactcatttgtcttgaaatccttttctcctcctctcctctcggtcgctctttcgtccgtcttccagccaacgtctcttccttctttctttcttcttcgttcaaataggtttcacaagcacacacattcatacatacatccacatccacactcttgacgtttctctcggttttttttccttcgttggaaggtacgtccctgccagggttggccatctcttcttactcttctcggatgaatatagttggaagggccttatcttttccatctccatcgcatcatcagccatgaaatctcatctagctctctttttttctttttctttctttttctttttcttccttctttttcgtctctccttcatccttgtgctcttcttggtctctattccaactcgattccttcctccttcttgattctttcttcatatagaaaggctctcctatatctactctgaaggattctttggatacatccgcattccatctcaattcaatacacctaacgcacacagatgcagacgatcgcccctatcgaagcttggacggctcatctgtcgtctgggttggatgctagcatgccttgtcagtcgttcatgctctctttccattcttctgcctcttgttctcattcgatttctccttttgacgtgtcctgactgtctatataaccacatagccacccctggaacgcctagccacacgtaagctcattctgcgtcgaccgccaacgcccagctcttctcgttctcatgctctgttgctccttcctttctctctttctaggatccaaaacatccgaaagaaggcagcaggccatggtggaccgctcaagaagcttatggttgccaaccgaggagtacgtgttgcctttttctcatatccttgttctatacttcccggaccgaataaggaacgcgccccacaggcctcaatactcagaacacgcgagctaggcactgagataaatcatttcttttggggatgctctaggaaatcgctattcgaatcttcagaaccgctcacgagttggcaatgactacggtggccatctactcttatgaagatcggctcggcgcgcacagacaaaaggtcagaagcgccccttctttctttctctctctctctctctctctttcttcgttctctgtctccctgtgttaccttcccccttccttttcttccctttatcttttctttttcttgactgcctttatgttgctcatctatgggagaaaatcagcttacaagttatatcttcacgtttgtgaaccctcctctacatggactcaactctccaggctgatgaagcctaccaggttggaaaaggcatggcccccgttgccgcctacctcgcccaggacgacatcatccgaatcgctctcgagcacggagtcgatatgatccaccccggatacggtttcttgtccgagaacgcggagttcgctcaaaagtgtcacgacgccggaatcatttttatcggaccgaggtccgatgtcattgccggcttgggagacaagacaacggctcgagcattgggtgcgtcccggtcccattatatcctgcgcccttttacgtgctcatcttccgaacttaacactaaatttaaccaacagccatcaagcacaacgtgcctgtcgtgcccgggacggagggagctgtctctgcctgggaggacgccgaggggttcaccaaggagtacggtttccccgtgatcatcaaggccgccttcggaggaggaggtcgaggtatgcgagtcgtccgagagcagtccgagatgaaggacgcctttgagcgagcaactagtgaagccaagagtgccttcggtgacggaacagttttcatcgagcgtacatctcatctttgccatcaacttgcccctaacttgctattgacggcccagctgactcgacatcatttcggaatgaacagggttccttgatcaccccaagcatattgaggttcagatcattggagatgatgacggcaacatcgtccacctctttgagagagattgttccgttcaacgacgacaccagaaggtccgtacactctcacccatctctgaatcgcaataaattgcatttctctgacgaagtttctatctacatcccgatacttcacaggtcgtcgagatcgctccggcacccgactgcagccaggaaaccctagacggtcttttcagggatgctaccacgatcggaaaggctattggttactccaacgcaggaacggtcgagttcttggttgaccagcagggtcgacactacttcatcgagttcgtcttcgatcttcctctcgtttctcttcctccttgacttgattgatatgtcgcgacttttgtcaggaaacttacatctcctgttctttttcttcttgccgctgtgtctaatagggtgaaccctcgaatccaggttgagcatactatcactggtgagtaaaactcaaacgaaacgcgtgatcgctctcctctttgcgctgcgtagaagctcaccgagtgtcctatattccgtgtccccgaacgatctacagagtgtatcaccggtatcgacatcgtcgccgcccagatccagatcgctgctggagcctctttggagaacctcggtctcatccaggccaacatctccaagcgaggatacgccattcagtgccgagttaccactgaagatgccgccaatggtttccagcctgatactggaaagatcgaggtctaccgaagctcgggcggaaacggtgtgcgactcgatactagcagtggtttcgccggtgctcaaatcacaccccactacgatagtttgctcgtcaaagtctcgtgcagcggagcgacctacgagatcgccaggagaaagatgctccgagcgttggtcgagttcagaatccgaggagtcaagacgaacattcctttccttttccggttgctcactcatgatgtcttcgtgtcaggtaacacctggacgacgttcatcgacgacactcccgatcttttcaaattggtgacttcccagaaccgagcacagaagttgttggcttaccttggagatgttgccgttaacggtagctccatcctcggtcagagcggacctcctggtttgaccgatgaggccgtcgtgcccaagttcatgtcaaaggaggacccgaccaagccgatcgataccaaccagccatgtctgaccggatggaggaacatcattgtaaacgagggtcccgaggctttcgctaaggctatccgagcctaccctggttgcttgatcatggataccacctggcgagatgcccaccagtccctcttggctactcgactccgaacgatcgacatggctaacatcgctcgggagaccagccacgctttgcagaatgcttacgccttggagtgctggggaggagccacatttgatgtttccatgcgattcctatacgaggacccttgggagagactacgaactcttcgaaagctcgttcccaacattcctttccaggctttggttcgaggagccaacgccgtcggctacacttcgtacccagacaacgccatctacgagttcagcaagcgagctgtggagaacgggttggatatcttccgagtgtttgattctttgaactacatcgaaaacatgaagctcggtatcgatgccgccaagaaggctggtggtgtggttgaggccgccgtttgttactctggtgacctttctgatcccaagaagaccaagtacactttggactattacctcggcttggttgaccagctagtcaaagagggtatccacgtccttgccatcaaggatatggctggtcttcttaagcccgctgccgctaccacccttatttccgccatccgaaaggctcacccggaccttccgatccacgtccactcccacgataccgccggtattgcggtgagctcaatgttggcctgtgctgctgccggagcagacgtagtcgatgtcgccatcgacgtcctctccggtcttacctcccagcccgccatgggagccgtggtctcagctctcgagcagtctgacctcggacctggtatcagccacgagcacatccagagcttgaacgattactggacccagatcagacagctgtactgctgcttcgaggccaacgtccgtgcttcggactctggtgtgtttgaccacgagatgcccggaggacagtacaccaacctccagttccaggctacccagctcggattgggcacccagtggacggagatcaagaagaagtacatcgaggccaatgagctcgccggaaacattatcaaggtcactccttcctccaaggtcattggagactttgctcagttcatggtctccaacaagctttccaagcaggacgtcctcgaacgagccgacactctagacttcccaacttccgtcgttgagttcttccagggacaccttggacagccctacgaaggattccctgagccccttgtgagcataccgctctgctttggtttgcgactggcgcttgtttgtgatttactgaacgagccgtcttcttttctattctttttcttttctttccttccattttagcgatccaaaatcatccgagacttgccaaggatcgataagcgaccgggactcaccatgcagcctctcaactttaagaagattaaggccgagcttcgggagaagtacggtaagacgatcacggactgtgatgtcaactcttacgcgatgtaccctaaggttttcgaagagttccgagggttcgtcgacaagtacggtgatctcagcgtggtccccaccaggttcttcctcgccaagccccagattggagaagagatgcacatctctatcgagcaaggaaagatgttgatcatcaagcttctcgctgtcggtccgattgatatgacgaagggcactcgtgagtgcttctttgagctcaacggagagacccgagcggtcttgattgaggacagagacgccgcgatcgagcaggtttctcgagagaaggccagcagcgatccaggttcggttggtggaccgatgtccggtgtcgtcattgaggtcagagtgaaggaaggccagaacatcaaggctggcgatccattggtcgtcctttcggcaatgaagatggagtccgtggtgtctgctcctgtctctggtcgagtcgccagagtggtcgttcagccttcggattcgattgctcagggagatcgtgagtcctatttttttttctctcgcaactgccgctcgatttagagaatcatgtcaatctgacaacccttcttttctttgttcttgggaaatttgaaacagtccttgtcgagatcaagcactagaggctttagatagtcaccttacatgctctactcaaacatgttactcgtttataaatctctttttggctcctcttcatctcgcctttctgtcggttatttatctcgttatatttcttgagtttaccgagtcgagtgtacgtttaccacgtctggttctaaatcttcttactgtccatcgagtctatcgtctggcgtagctcctgagagaggagcaggtagaggagtttcctgagccttctttaattgtatatgagcctttctttctatatcctcacaagtctttcgacctttttccttgtatctttcgatctctcgcctgttcgctttcagattcgtaaaagagaaaaccaccgaggacagatcggaacggaaacgttaaagttctcacaacttgaatagactgagaacaagaaaaaaagggaagaaacgaacgcaggaagaagaaggaatgatgggggaggaagaagagggcgaagaagaacggggtttacaaaggacgaagagggaacaagatgagaagagaaaagtgggaagaattacattatagagtaaatttgaagacggattccatatcaagtgtaagaaaaaggaaccaagataaacacggcgtgtccggcagatagggaagccaagaaggaaagagaggtagaatgagagggtaagatgaacgatgagaaaaaaaagagaaaacaggaggaaggcgaaaagagtagcgaagaggacgtgggggttcaagcgaagaaaaagagaaagagaagtcgaagagagacaaaggacaaatagaagaacgtctacgtttcgatcctaagcattcaaccaagatctttcctctcgcccgactcctcagtaacaacaccgacaactgcatccacaccacttaaaccaaggtcttcgtccgccttctcatctgattgaatatctcctacaccagtgcccgtgcctgagatagctccgttctcggctccatctgatgctgataacactccctgctgctgttgctgttgctgctgttgttgctgctgctgctgctgttggtgatgagccaactgagatagttggtcgaggtgatcttgaccgtgagaatgaggatgatcaagctcctgaggatgagatagagatctgttcggatctatatttgttcgcacgtccgatcgttcggttctcatcagtgttaatgccgttcgaagggccgcgttctcattacgaagctgttcaatcttgacttgggcttcttgccatctggagagatcaagggcataagaaaagagaataaatcggaatggtgagaaggctgctgcacatggatctgaggaaagccgatacatccttgctttatgtatgagaaaggtaaaaaaaagaggtctcaccttctgttggcatcagcttcgttttgttgagcgatcagaagttgctctgctttatccgataaatctttgatgtttctacgagcaaggaatatacatgttgttcaaaatattagcagctgaacgtgcacacagctccgaaccaagcaagcggcaaggaggtaaacagagagatcatgaagaccggacgaactgatctcttcgttgtctgaacgcccgttgagctttcctattctgctccgccctcttcgttttgctcaactctcttcctttaccttttctcccgtttccaccgccggagcttccttcaccctcggcctcaagatctccatgggcctgccctcccacatcggcacttccgaaatggtcgagctctcttccgtacggatcttccccaatcgatgactggatcccactatcttcgcccacaccagatgctcggtcggccaagagaggcaactgaccctgtccgccagtcgaatcgtccgtcggtccataaggcccaagatcatcggtatggtggagatgagggttcaagtgctgatgctggtgcgggtgttgatgaccgccctgctgaccgacgccaagaggggctgattgatgagcatgagtctgggactgtgagtgagcatagtgatggtcctgattggacgcgtacggatgggaaaccgacgggagggatggaagtgtgtggtacgtctggcctgcgagcggggcagaatgatcttctgaaggcgagtagatcgatggaggggaaagacgcggagagttgctttgtttacgctttttcgagactacaaggcaggtgggtttcattcattcgttaaatgcaggcagtatatcga

SEQ ID NO: 3011 - DNA, 24090 bp, Xanthophyllomyces dendrorhous
atgcaggcagtatatcgaattagtattaagtagaaagaagtagtcaatgcctatttctgcgcgacgacgcgaaaacgaggacaaacctctaggtttcgaaggaccggcctttctgggatctaactcgtgatcatcggcgtcatggtcctggtcttccctatgagtggatgttgagtggaacgagtccgagaccggtagaggcaaatcttggattgttggttccgaagctgaacagacggcaagatcagtaaaggattctaagaatagacagcatgttctcacaggacgagcggttggtcagcaaaagtgtaagttgaaacgaagacgcgactatttctttttagaaaaaggttgggcagacgctcttcatcaatttccgaccgacagcgtccacactcagatgttccgcgtgattcactcggtataacttcgagatgtactctgctgagagcaatctgttcaattcggacgcgccttgctcctcatctatccatcgacttgtctgttcaagtggccgtcagaacgttacctcgcgtcgaaccatagattcgccggagttgtcatactcaagcaatcgtcgctcaaatctttaaacaggaaacaagagaaggaaagaggaaggcaaaggagaagaagaagacaacggagtgtcccttgaagaagaatgggttcttacctgaaggaggcgcgtctccgtgttcgtgttcttgaccttgctctgggtcggtagcacgttgatcatgatcgtccgttctgggaatccggtccaagtatgccctgagaacttcactcggtacttcgacgtgaccttgagagttttggatctgcatcggatggtgtcttgcctgcaatgtagaagatgatagagagagagtacacgatgagaagagcaaggacgacgatgaacgatgaagggaagatgatggttggtagagcgacgctttcggcaagttccacttacctaatcaaggccgagtctgactcagatcttaagtagtttattatgtcagtttcatatattcattcaactattcaaaatcatcatcaccttccaccgactctcgccgaagcctcgcatagagaacacgtcggccacgcagacacagcatacttgcacattcatccgcataggactgatattggcatccaggcgttcatactcacatactcaccgctgatatctcacgtactgaccattgaaagtttgtagattaattagaagagagagagagagagagactgtacggagggctgaatgtgtgtggagaaaaacccaagccccacgtaaggctgaccttcggatgagacaccaagctaataggaactcaaagaggaaaagaagggggacgatcaaattcctagcgcttctgcatgctcatagagtgctagtatcgacatcactttccgacaccttgtcttctcccatcgtgtagcctgaaaagttcatgttgcattccgaacgtgcgtaccaatgccgagagattctccacttggcagagtttatccacttggtttggttgcagtccaagatttattctacgttaatttaccggatggtcgcacgattgccaagcaggctcgattttttctgtcctatctcctcgttttcttctcttgtctcactctatctcctcacacacacgcagacggaacagctggcactgacctcgacactggccgttttctggccgaccgatcaattcctagtcatgcttccaaattcttgtgctcggtatttgcaaactggcgaagtcctcaccaccgtgcgatcacagcatgggcagatcaaaagaaggatagcgacgatgaacaaaaagtttgcgttaggtctctgctctataaagcccaacggtttgtagatcattcatctcttttctccttgtccatacagctcatcacacttctttctcctcttaaaaggcatttgattctcgccatatcatgccgacccttcacggtaagattttgtttcgtactcatggcattctcttcttcctacggctttacactcaccttatctacttgcgctctttgtcttgacagagtacgatttcttgtttgtctttgggttgatctttgctttcttggatgcctacggtatcggagcaaacgatgtaagtctttgacctttgaccaacggttgtactcaatcacatggcttacccttctctcccacaggttgccaactcgttcgccaccgcgatcgcctcaaagtctttgactttcaagcaggccatcgtcctaggaggtctgtgtgaattccttggagccttgctactcggagccaaagtcacggataccattcgaacaaagatcatcgatttgacactatttgaggataacgcaccgatgcttatgctcgccatggtgtgcgccctcgtcggatcttccgtctggctgacgatcgccacccgactcgccatgccggtctccacaacccattccatcactggtgccatcgtcggagttggtattgcggctggtggcggtggtgcggtcaactggacctggaacggtcttggaaaggtctttgcctcctgggtcgtcgctcctcttatcgccggagggtttgcctgtgtgagtctgaacaatctctttctctccttaattccctcttagggatcacttctcttatctatcatgattttcctactgtctgtcagattatcttcttgatcacaaagtatggagtccttcgaagggtcgaccagcgaaaggcggtcttggtcgctatcccatgttggttctttgtcactgcctctgtactcaccatgagtatcatctggaagggagcgcccgctcttggattggacaagcttcccaactcgaccatcgtccctgctatccttctcaccggtttcgttatcgccatcttgtctatagtctacgttttgccgtacgctcaccaacaagttcacaagaaggattacaacctccgaccttaccactttatcctcgggccatttgtcatgaaccgaccgtcacccgatcaggagctcaaccccaacaacttgtctgcgaaagaaaagattgatgccaacaaggctattgttgatgaagagaaatcttgtgaaggattggacgccgcttcttctggatcggatgtcatcaacccctcgcctttgaacacagagatcgagaagaaggacaaggtcgacccatctgttttcgtcggtcactgggctcttcctgccaacctatggcgcttcgttcgatacagaatccccaaagttcttctcacaggatggaacactgatcttcacgactactcgaccgaggataaggatcaaatcgagcgattgcatgccgctgcagagatctacggaaacgacaccgagcactactttacctacctccaagtcctgaccgcctgtaccgcctctttcgcccatggttcgaacgatgttgcaaacgccatcgggccgctctctacgatctacttgatctggtcttcaggctcgatcaccggttcaaaagctccggtccctacttggatcttggcctacggaggtatcggtatcgtgatcggtctggccacctacggttatcacatcatgagagtcctcggaaaccgaatcacccttgtttccccttccagaggattctccatggagctaggagcagccatcaccgtcgtactggcctcccagtttgctctgcccgtgtcgaccacccaatgcatcgtcggtgccacttgcttcgtcgggttgatgaactttgaaaaggacgcggtttcgtggccgacgatcaggtggatcttcatgtcttggctgttgactttaccctgcgctggtttgatgtctggtatcctctttggtatcatcatcaactgcccccgattctaaacgtaggggttgtgttcactttgcccatttttttctttttcttttttccttctgattctttcccatctttctttttggttcattctatatctcttgaaaatatataaatatatagacaactattgtacagcgttctcgataactggggtctatctctccatcttgagcgcgacggcccatcatctattcgtctccttgtacataccttatctcattagactttcttctccttgctctatgatgcagcacgccaagaatctgtcccagttgtcaatcgtcatgttgtttattcaccttcattcgaccagcatcgcattattcggagcaaacaaaaaaaaccatttagatatatattgatcataggataagaatcgaagaaaagaagaagaagagggaatacaaaaacgagaagaacaaaaaggaaagtacagtcgactgggaagcaaagaacgcaaggacgagcgaaccttcacgcatactcctctgatgcctcaaagtcgaactagaagagacaactctgatccttgtcctaacattctgtttgactctccccatcttctactcgagacaagcgcctattagacaaacatatatggaagagagaaagcgatgcagagctcatatcccgacatactaaggatagagatcacaaagaaagcaaggaagagagatacaaagagaaggaaagagagacgagcgaaagacgaaggtttatgaatccgcagctgaaagaagcaaaggcgtagaggaaacgtgccaatcaagaaaaacgtccaaaaactacacgcgagacgaaccatctgattagtctatcgggaaaagaaagaaaaggcacatgtagtagtaagaataacagagtggaaagctgcatgaacgggtgggtaatgatcgaatcagaaagaactggtgaggagggtcacagggaatcttggtttccgctgcagcaaacccttccaagacaggagaatgcacatctctatggtgatcgaaagattctcatctaagtctgggcaaccttgcgcgcaacagttcgctcgctttctaatcgggctctattggcctcgaacgcggcatctcgactgtgatagatcggtttgttaagaatgattagtaaagagtcgtgtgacagatctgaagatgaggcgagagaaacggttgtaactgatgacgacataccattgctgcaaatgtgaacacttgtgctcttcaggcaaccgatgggtggaacagctatattcgaggtagagagacgcgcagtgagtcccagtcagcatctatttgcgaaacatctgtcagaccaataagatcactcagatctggcagaggacctacaaattgtaagagcaatgaggacatgttccgatcaatcggacagcagggttcggacatctgaatagccagagtaggaaagaatgaaacgaatgagcacgagagaaaagagaatcgcgccatgccgtgcaagaacgggaagagtctacgtactggacgcttgacgcggatgcgggttcctccttcttatcagtcgccggtggtggcgaagcgccattggtagcagcggcaggggaggatggagatgaggcaggtagaagaacaagagtcttgaactggcaacgacgtttggcaggcctgtcaacggagcaatgaagagtgggcaaagaaagaaaacccgaggaagggaagaaattgacggtcgtcggagcgggacagatcagtgattgcggtggagccagaaggtagataacggcaagacttcggacaaaacggaagacaacgcgacaacctacattctaataaacaggaattgggtttgagaacgctattaagggtacgggcgagggtgtggatgtaagagttcgagtgtgtgtggcgaggaagacgatgtttctttggttggttgttggctggttgttggttgttgatcgtgggtggaagctcaagagatctcgcacgcataaacctccacggtggatcccgctaaagcccggaggttttatgtggcggctgtggctgtgtcatttgtcacgtgggacgagtcagtgctacgccttaccctccagttatgtaccaatcattctatctagcttctgcttggtttatgggtgcatatcaagtacacagcacatacaatgacgcctggctttgtatcaaagtcaaatgagctttggaagtatgagacagaggggagtgtgatctcgaacgatggaggctgtagagattactgtgtacgctcaggatcttgttcttttcagttccttccttttttttccttggtcttgcttgttggtggtggtggtggtggaggaggatgctcatcgctgatttcttctttgcgaaaaaacacaccaaaatgatacctgaaaggcacacgagcgaacagcactatcgtatcttcgtctagctctcttgctcgctttgctgtcgttcgcgttgatcgagaaagtaagatttccgaatccaaatcaaaatcgtcataaccaggttaattcttctctctatctgtatatgttcttcgtcatcatcgctcacacccacttggctttgctcgggctgtgcgcttttatgagaagcctcagaccaatcctttggagaagcatatagctcttcctctaggtgtcatctttgcggctgcagctctcgtatgtctgggttctgggatgcacgtttactggaaaggcattcggggtttaagggatggcaaaggctttgtcggagcaggacggttcgttctctcgttccggccttcatcctctttcttttctttttgactcaaccttcatgtggcgccgtcgactgacaaacttgtccgatcacgtctacaaatcagagtcaacacggccatccttcttttgttagcacttgctatcactgtgggaacaatcgtgtttaccgttgcgtcttgagctatacgttctgcattctttctctcgttcagtattctctcctctatattctcgtgtacgtcggagaaactcaatatattgcgtagaccgatatactcgaatctgtatcttttaaatctagactgtattatgatatcctcccatcgttattcaatgcatcgatgcctctgccggttgattagttcgatcgcatactttattcaaagcggccgactgtggatgaggacgaacgataaaaaagaccggcgactgaaagagcgagatccggcatttttgccaatttcgcttatccgaggtttttcaactcgtcctttcttcagccttgtgatagccaactcgtttactctctctctcacaccccaaaagtcaccttcatcgattaaatagaccataaaaaatgacttacggtatgggtttcacgttgtcgtcaggtctcgtagacagaccaagttgaatactgaaatgctctcgaccaactctaaccgatcgtacggaaacagattattttgcttgcctgcctcttgcagaccgagatcagtgagtcctcttaggttgtcctctccaacagaaccttattgatcatccccatctcaatcttcatgcgtgaaattacctatttcttccatctggttcgctctttagaattgccggattgaacgaaggattcgcgaccgactcggcacctcacaaggtcaacctcggaatgggaacatacaaggatgagaatggtaaaccgtgggtgttgcccgtcgttcgaaaggttcgttctgatgtccgacagacggattgtgtttcaaattgagaatctgtccgagacaatcattcaacttcgaaaagctaaccaagcttttggggtcataaacaccaggcatcagccatcctagcagccaatgcagacctcgaccacgaatataacccaatctcagggatccccgagttttacaacgctgctgccaagttgatctttggacctaactccaaggctatcaaggaaggtcgagtgtcaaggtttgtccttttttgcttcttacccggtcggataggcatttttccaaattatgtttccacgtttttttgttttctcttttttccatttttcatgcattcattttcgtttttgttttattgctttatgccttcttttcgcgaccaacacagcactcacaccgtcagcggcacgggatccaaccagttgggcgcgctcttccttcaacacttttacgacttcccttcgtccggtaaaaagatccatgtcccaaatccgacttggggtaggttttgatcgttctcttgtccaaatatccatgtcttttgacgcaagcacattcaggctgatctgtttcctttctttttattattatcttctatcttttttcttctttttccaaatagtcaaccatgatcctctattcagactagctggcctcgaacccgtcgagtatgcatactacgatcccaagaccatcggcctcgacttccctggcttcaagggctcgctcgagcaggccgaggagggcagcgtgttcctggtgcatgcgtgtgcgcacaaccctaccggtgtggacccgacggctgagcagtgggaggagctggtggaggtgatccttgccaagaagcacttcatcttcattgatgccgcttaccaggtatttctcatttcagtttttttttctttcctttctttctttctttgttgtcttgtgcgaatggtcctgacaagtcttgatttgtttctccttgataatccacagggcttcgcatcaggggacttggataaggatgcaagcaccattcgactgttgacggatcgaaacgtgccgcttctcgtctgccaggtttgtttcttcctagaacctagacggaatgatcgcccggttctgatgttctttgtttctcgttgggactatcgtatttggtgtttcacagagtttctccaaggtatgttcagacgcaaataacaatagatacatcattcctcgtcaaacctaacgttacaccatatcttggcttttaatagaacgccggtctttacggtcaacgagtcggcgcccttcacgttgtgaccgctagtaaggcaatcgcccacaacgttcattctcaggttgagaacctccaacgagctcagatctcatgtcctcctgcctggggagcaagagtcgtcacattgatcttgaacactccggaattgttcgagttgtggaagatcgacgtcaaaatgatggcagacaggatcaaggcgattagaaagactttgagagccgagttagagaagttgggtacaccgggtacatgggatcacattaccaaccagatcggtatgtctcttcactctcagcccatttcattgacatcacgttgaaaactgattgacgtatgactgtttgcttcacaggtatgttctcgtacaccggcctgacgcccgctcaatctcgagcgctcatcgataaatcttactaccttctcagtatgtcttctgttatttgccttgctcaattcatcactcttcccatccgtcttgtaaacatagggtttaacggtttttggtatctccttttacgatcgaccagcttcgggaaggatctcgatgtctagtttgaatgagcacaacgtcgctgcctttgctaaagccatcgatgaggttgtccgagcttaagaatatatctttatctagaaaacaaaaccgcctagcggatgtctctttgttcaaaaatcctgttctctctctattttcaatatcttatttatcgagcaataccataaaaagccgagaaaagtcttattgtacgattgattttcccatgttgtagagcttctgaggctaaggaattagatcgatgtatgtaacaatttgagcccagcatccccacaatgtgtgcgtccagtgaccatatttccataagatccttacctgatgactgatgttgtcaagaccggtttcctattgagtatgaaggacgactactcgcctcgggtattttcgagcgggtagtgtgtgaaatccaaagaggggtggaaatgagtggtgacgacgacgcgacgttcgatgatgatgatcatcatcaacccttcacctccattcacacgctgacgactcttgtagagagacacacacacacacacacacacacacacacaccccggcatatacacaatctacatctttcagattatcaatacagatcttcaggatgagcacaccctccagctcgtctcgttatagaaacacacccggcacagcccgttctacctcttctttatcactcacccgtccgtcacagacaaagactagctcttcgtctactgctcttgtgcccgtgagggagaagactgggcagttcacgaagtccttggataggcaatatgttcttgaggtatgtaccttcgttttggtcggacatcttcggtaaagggctgcaaagagtttcgttcgactgcctgcacacatcctgatgattctccactttgtgatcgtctcatgacatactcgttcataggaagacgcctacacagaagccctatcagatatcatcgctcgagatttcttcccatctttagccagattggaggcgacgaatgcctatctggaagcggtggagagtatggacgaagagaagctggaggttagcgtaagaagattgttcgaggttgatggtggtcagacacctgttcatggttcgtccttccgtgtctctctctttggttcatcaactgctctctaacgagagagaagatcgagtttgaaagagctgctcttagatgctgtcttcttttcgtctcaccaatgcttctttatatccccaatgtgacaggcgacgccaggtctacacctatgccatcctatcaaacatcatccactccattgtggacatctcaaacgccttctcagacaccataccgaacacctgttcatcacccatctagcctctcgtcttctcaacgatttctagctggtacaacacctgctgcacccagctcgcttcccacgcttgataacttccaagcaaacttcacgtcagaagacaacgcttcattcaccagtatccttcaggaggaaaacggaaaacggaaagaaaagtacgcttgggcctatgagccagagcaaaaagtgaggcttcggttggaagaagcgcgagacaagtgggtcaagcggttaggaattgaggcctccggtcacgccgacgctgtgaaaagtcaggagacgaagttgttggagtcaggctcggcagatgggggcaagaggatgtcgatagaaccgaaattgctggataaaggaaaaggaaaggagctcgtgctctcttcgtcttccgaatctgacccgtcggcgatgcaggttaccacctttgctagacctgttgggacagaagaagaaacacctcttccatcggcggacatcgtcttacctgacgactcttatctggccaaggcattagtcgaggctggattaccaccgaccgctgtggatcagcatgcggtcgtactccgggaggaccgagcgaaaaacctgaaagagaaggctgagaaggacaagagggatatcgggcatgaaggttggccattcaaggtgcgttttttcctcgacctacccaacggaggatctatcgtcctgatgtgttgcttacctccttttgtgttgatggcgcttcagactcgtaattcattgatgtttgccccggacgtaaatgtctccccgcacgagattcaaaaggcagctgtgttaccttcgaatcaggctccgaaagcaattgttcattcgaacacacggttctccaatggactggaggacgattttgtaggagagttttcaggggtgaaccccaatgagccgcccagtccaacaagaagtcggattgcagctgctatcgatggaacaccttgtaagcttctttttaccgcattctcgattgtttctatcaaagccttttgcaaaatgtatcacttcttatctgacaccgtggctgatgatacaacggaacatcagacccagaatccgaatcctctgactctatgcccacagtaaacggttacccgcttgtccctacccaagcgtctccgacgccatcaagtctcggtccagaccgaatcaaacagcttctcacctggggtacacttctgtctactcctcgcgctcttggcgctctcggtgaggcaggtggagccacccctttcaggatcaaagaccctagtagaagggacgatatcggtcgacgactagcttcttctgctggcagagcgatttctgatcgcgcaaaaggtcttgtgcctgcgagttccaaagggagaaaacgaggtgtgggcgagatgaatccgccctcatggacatcgtccacaccgggcgataagctgaagaaaagggcagggagtacagtagagttgtcccccgcggggagagggttgttggcaaggacgcgactgggaagtctgacgcctcggtcaggaggaggcagtggcctgggagtctccggtaggacctcagaatcgggtggtagcagatctagaggggaacgtggatggagcggaggaaaaggtgatgggacgagagcagaggacatcagtaagcttgcttgggatgcgtctcctatgacatcctctcgtggcaaaggagcggaaagatgagcgccccaagaagtctcgaagggtgtacacaatcaatgctgtaccaccacattgactccatcatgaataccgaaagataaataaactgcaagagtcatcaagagcatgttgctgctactacttctgctgccaccacagatagcgccaaaacttacgtaatccattcgacccggcaactcgtccggaacttcccttgacttgctcctactttcttctctttctcccacaaccatctgttctttctcccggccaagtgtctattgtctcgttgatccatcatatatacatacaaaaatgactgccagtacgtctcagtttccttagatatgctcatcgtcgctggttgtgtgctggaagaaagccaaaagaaagatcactgctgccagctattgatctgttattgttgctgcttccatcatgatccgtaactgaccttgacctctctctttctcttctccttcgtccatctcattcgcacgctactagacgttttctccgagatctcttacgccgctcccgacccgtaagttggcatcctttgcttgcttggctgcacaagtccatctcgaacgcgccttactattctcaaatgatgtagagtatctcgtgattttttttgactcattctccctcttcatttcaacttcgggacgacccggccgcggcaaacatgatacaccttctctctcttttcgtatgccactggttctctccgatgactcacattgcccttggatattatcgggaaccatgatgtaaatcattcgtctgtgaatctttcaatatggacacgttcctctcggttgtacacacagcatctttgcccttacggccggttacaaggccgacccttcgcccaacaagatcaacttgggagtcggagcctaccgggacgacaccggaaaaccctgggttctgcccgtcgtcaagaaggtctgttccatctcttcttctctcgcctgcgatgaagtggtttcaggctttgtttgatcgtgttcagccgtcctgataccttattgaaaatttgatcttgcaaataggccgcggctttgatcgaggctgatggggagattgatcacgaatatcttccgatcgccggtcttcctgacttcgttgctggcgctgccaaattgatccttggagagaattcgccagctatcgctgagggacgagtcgccaggtttgcagtccttcttcttttcttcaatatacatcctgattcttcttgacttgattgactcatatctttgcttgtttggcgccctcccttcaaaaagtacacagaccatcagtggaactggtgccaaccacttgggagccttgttcttgcacaaattctaccctttccccagctctggaaagaaaatctacgtgtccaaccctacatggggtaagtctcaatcaatcttgttaccaaaatgagatccgacctgtctaacgtgtgtttctcaattcgatggacaccttatcgtagccaaccacaactctatcttcagcctcattggattcgagcccgtgccatacccctactacgatcccaagaccatcggcctcgacttccctggcttcaagggctcgctcgagcaggccgaggagggcagcgtgttcctggtgcatgcgtgtgcgcacaaccctaccggtgtggacccgacggctgagcagtgggaggagctggtggaggtgatccttgccaagaagcacttcatcttcctcgactctgcctaccagggctttgcttctggtgatctcgagaaggatgctacggccgtccgaatgatggtcgaccggggtgtccctttgctgatctgccagagtttcgccaagaacgccggtttgtacggtgagcgagtcggagcacttcacatcgtgcccggctccaaggaatccgcgacgaagattcagtctcaggttgctcttcttcagcgagccgagatctctttgcctcccgcatggggagctcgagtgatggcgttgatcttgggcagcccacagttgtttgcggagtggaaggtccagatcaagcagatggccgatcgaatcatcgagatgcgacaacagttgagggccgagctcgagaggttgggtaccccaggaaagtggaaccacatcaccgaccagatcggtatgttctccttcaccggtttgaagcccgagcagaccaagatccttctcgaaaagtactctgtctacctcacctgtcagtcgatctcttaaccttttcaaccatgcacgccttgagggatgcttctgtattgacctatcatcgttcccatccttctattgaacaacgttttagctaacggccgaatctcgatggccggtcttaacaagtccaatgtatcgatctttgccaaggctgtcgatgaggtcgtccggggcgaggattccaaactctagatatagaggggaaattgtgggagtcttgttctttcttctttccgttctttcaatgtctgttcaagtctcggtgtaaattccatcgctgtttatatctttaatcgtcgttcagctagctgttctgccagacggatacaatcacgccagaaaaagaaaacgtctagagtatttcacgaacaaatggaatatcaaaagttgtttgctcattcagattgaactttcaattgcaaaccctgagaaacaaaacgagaaatactagggagcgcatttccctactttcaagctgttgattgttgaccatgagaaaacagagatcatatcctgtttcgaggagaaaaagaaaaagaaaaaaactctatgtaggtaacgaggtcggaggacgacattaaacaaatgcgatagagaagaatctggtagaatctgaagaagagattcaatggaaaaaaaatgaaaaaagagaacatagggattgtccatattggcttcgtcaagaataccagagtagaaaagagaagaaaaaggtcgtcactgaagaaaaaggagaaagaaaaaagacaagaggatgcacagatagagacaggacagaaaccaggctgcttacaacacatattaccagtgaccaagaagaaaacagaccagagaagaaaaagaagaaaaagaaagaaacaaagatgaggagagatgtgaagattcaaaaagacagatataaggcagagcagggagctcccccttaccagcctccggctcttccaccatacttatagaacatatcttccaaccctttcaatccatttcctttctcccactccaccaactcgaccttgccttcttggtttccaccatcagtgaaatcttcgaactcaacatcgacgcacatccctcttcgcttcccggtatacacatacatctttgctccgtccagttcatccgatcgagctgaggtttcttgaggagtgagtaggccaccagcaccgaatttgtaggtagacgaagtggaggatgaggaggaaggattgatgtatttgatgtgagtaaaggttgagccttgtcggacaccggctgtgtgtttgaggaggtttgcgtgtaggaaaagtggggtatccgtgtatggtgggaggtcatactgttgaagggttatccgatgtttcgtttttggaatcaatcattgtactcacaaaacgaagaagaaagagaaaaggaagacggaaggaatttacctgaagcatagtgttcccacaaaatcggttgttctctgccgggttcaaatttccagcagagctcaaccatctaggagaagcagcaaagggaatgtcgagcatatggaacgcatatctgaacgtgtccttgtcgcctccgctaagtttgaaccaaaactcgtgatctttctgcatgaggcctgccaagtgtagagctgcgagattgaggccgttgtttcctcgtttgtcaattagaatctggccagagtcaatctgccattctttgtgatcacatgtttctcccaagatcctgaagattgcgttctcggctatggtattgtgaaagaaaagttgggaggacggatgtgatcagtaatttgaaggatgtgtggttagaatcaacatttcctttactcacgatgatcctaacagatgcgattcatgatcatggatacaatctaacatcagcattgctccacttgaccgactcggcacataggcgcgcatgagatgacgaaccttggtgatatcaggccagaacactgctttaccgcctgacaagtacagctcactctcaaacagatgcgccggatctttcaacgggatattgtcctagttcaatatttgtttccatgacgtccgacaaaggtatagtagagaaagaggagaggtgagcaaaagtttgaaagaagagagaagtacagatatccaaacacgcacagagtctaagtagaggacttccgagaatgtagatttcaagatcgatagcgctttgatctctgtacatcagccacccgtgaaaagaatgaaataattagtaagaattgaaacaaaagtcgccctctcaagaatcggattcagataaagaagtaaaagacgaacgaaagttcttccagatgttcaaccgcttaactccttcaaactgaacgagcgtgcctccgagttgctcgatctcgtctcgttcagactgggcggtgatctctcccgggaagtgaaacacttgaacgggaaggtttgaatgaagctcgtttcggaggattcgaagaagagcgagtaaccgagctgtcgtgtcctgattcgtagccgagaagaaaagggagcaagaagatcagcttcttgcagatgacaacgactcgataaacatgagatatagaaagaaagcaagaagacaaagaaaaaccaactctatttccaccagcgacgacaatacctcttccatcccctttaccctcatcctcaacccacgtgaccttctcgccttgactttccagagcgttgagaccgttgaccaactgctctctcctcatcaccacatcatccgttccgatggccttccaatgctttcgttcgcctttcaactgatcagggttcacctgtcgatcatggaccttcaacgggcatgcctttacgttttccttcaatgcctccgcgtacgaacggaccgggcgatccaggaaggcctgaagagatcgagccaacctatcctttgatgatgttgttgtcgtcgtcgtcttggttgacgatgattccgagtcggaggtatcatccgaagacgagctcagacccgagcccgagcttgaactcgaactcgaacccgagctacctgaaggccttgcatcgacctcaacgaccggcaagatatggacctcgccgttcccctctgtgaccttgacgacctcctcgaagtctaccgatggtttcgggtcgaccggcaggccgacacctccttctggctgagaggtacccaagtcaatcgaaggagggatgatcggtggagatgttgacttttcccattctgcttccaactctgccgcgttcgatgtcgccgagcctgcctctgataaagaggacgaggggagcgggagcgacgagagatagtatactgtgagaagactagtgagaacgatagtgagcacgaggacgaacacgtttgtctttctgagcaacatgtcgagaaggaggtccgacgagaagtgagagaacggtcaagaacgtatcgcagctgttgacctaaagatggaagctcaaaagaggctgagcaagggaaaagaaagttgactgcgcacgtcatgattctggggtttcctcctaaaggtttagaaggaaagaacgacctaggcgatgagggtgggtagtagacacagatgacagatggcagacggcagacagaggacattgctcatcattatagtacaatcgattgaatctttgatggacgatctctctttcgagaccctttttttttctctctctcattcgttcttgtcgacttccacctcccttcttttcgatattaaaaaagaaacgacacaaaaggaaactaatcggaggagagataaagagaagaaagcgaagagaagatgaataaacgtaaaacaagatgggaaaatagaggagccaatgtcgcttaagcggaagaagcaggggtggaaggcctggtgttggctcgcttctgaaggacagcttccctcctggctcggataccagcagcaagcgcgtcgagacacggcacggtctgctcccaggacaagcaagctattattttgagggaaggaaagataggggaagaagtgactacgtcaattccaagtacgataaaataaaataaaaaaacgacaagagctggaaggtcaaacagagaagatcttaccatcagtcacagagacaccgtaggccaaaccggcaggaccctcggacgggaccttctgctgaccctcattcaagttggactcgatcatgacacccataatcttggaggatgtttcaccgtgggacaactggtcggcctgtgaggaaggttcgagtccagaacaaacggacaagagatcagccttcttgcaactgatgagacaagattataacggtagaaaagaacgaacgatgtccttgcagacgatgatctggttctcgtgcttcttgttagagtttccgtgcgagcagtcgatctgttttaaacagacgtattgaaaaatccagagcgcgtaccagatgacgttagccaaaagcgacaggagacggaaaagcaagagtctgctcaacgaaccatcagcttctgaatcaaattggccttggcaagcttctcagctacagccttgacatggtcggcagagtagttgggtcccttgttggatcctcggagaatgatgtgtgtcgaggggttaccgaccgtctcgacgatagcactcaaaccctgcttggtgaccgagaggaaggtgtggccagaggcggcagctcggatggcgtcgacggcgatatcgatcgagccgtccgttccgttcttgaaaccaacagccatactgagcgcagaggccaactctcggtggacctgactctcagtggttcgagcaccaatggctcccctgtcaagtgtaaaagatggtggtagggtgagcgggtctgaccggaaggcgcatccgatcatcacggacagcacagaggaacaggaaacgcaccaagagaccaactcggcggtgtactgaggagagatcgtgtcgaggaactcacaggccgagggaagacctagctgagtgatgtcgagcaagagttttcgggcagttcgaagtccctggttgatggcgaagctgaggaagtaagacggaagtgaatggggtgagtcgatagaaaccaaggacaggaaagataacagttaagaaaggacatacgagccgttcatgtccgggtctgagagtcgatacaaacggtaggtaggattaattattcgtgaacttgattggtatgggaaatcgacgactatacacaccgttgataagaccctatgatgtgaagggaaagaaatgataggatcaatctcgacgtaggtattaagaagaagcttcatagagattgaaacataccttccaaccgacggtcgttcgaggcttctcgaagtagactctcactaatatccgtttgtgttcgttgagcgcctagtgtcagaaccactagagccagcgaagaagaacatggagaggaaaaaaaagagcatgtagacgaactcaagatgtggaggtcctccttgtgctcgtcggcgtacgctttgaggagcttggcatactccattgcggctccgacgtcgtgaacggaacagggtccgacgatgacgagtagcctgtcgtcatctcccttgatactataaaggtaaaagtatgagtagaatgggcgagtcagaacgatgataataaacgacagttagaagggaacaaccaggtagaacgataagaaagacgactaacatatcatcggtggcgcttcgtccgtcctgagaagagtgttcgattgaacagacgaaagattccggcgttgatgagtgtgagtgaaaaagagacggagagacgtggtaagcgaatgtttggaagaaggaggtaaacgtttatggttgtgaagaaacccccgatgttctcggagcggataggcaaggcaagggaaaaaggcatctgggatttttcatctcttcttattcagatgctccaagatatgtgagcgctgaacaggcttgcgcacgaagtacgcttggactgctctgtttgcttgatacgagtgaaaagaaggagaagaacgaaagaaaaagaaggagaaaaaaagtgaaaacgacttacgagaacagtctgggcacccttgaggtcgagcggcaactcctcctggaggatctgaggaggaatcaacggccggacgaccttgacgcgcttgtcgtccagctcaagcagagcctgctgaacggtgtgggatctagtaggagccatgatgtgtgattgagcaggtgcaaaatgtaggtgtatgtctgatagaaagagtgtgtgtgtgtgctttggagtgtgcgggaatggacgagtggatgaaaagcgaaaaacacttagataaaggtatatatgaaatatgaaaatcaaatataattcaaatacaattcaaataaaaaaatccaacgactcctattgaaccgcctggaatgactcgaccggtgagactttgggcttccatcgttcttctttcgtgcttccctcacttgcttgcttgtatgagtacccagtctagcgcaattctccatctgctacccactcagagcatcgttcttgctcgcccatcgtatgttggatcgatccctggaagcgcacccctgggcaggccatcatcacctttctcggccgatggggtgacgtcagggaggtgactgcttacataatcaggcctagaactattgaccgccgtagtacttccaaacatttttggtaatgttatcgtttgaactcattcatccatcatcatcatcatcatcatcatcgtcccatccatcatcccacccaatcctatcgtatcctatcccatccagtgcgtacatcacacatctagccatgatcctcaacgttcacatcccgagcaacacctcgttcgctcttccatacagaggtcggtgcattcatgtttctatctctccgttcacctcacataccactcttctttcttctcgcttagacttgtttcttttccgctacgtccatattcatccatccatcgatgtcctgaacctttctcttttcaacactacagagtccgactcgtttccgatcatcaaatccaggatcgctgataaagcagggtaagtctaaacccaatgtgttcccggcttaatatccgtcctatatctcactgtcccgttcaaatcttcttcctccttctgcctccatcccattcagcgtcccttctggcgagacaatcggttcatccaagaacggctaccgtctgcagtatacctacaaatcttcgtcctttgctctcgatgaccaggacgacttcgatatccttcaggctcgattttcctcgtcatcggacgagccagacattcatctagtcccccctccgttggctgcacctactcctgctcccttgtcatccactaccaacaaaaacgcgaacaacaacactgctgccccctctccgtcaaagcctcgacttcagtctcagcccaaacctcagatctacacttcttctccagctcagtcccagcagtcgcaacctcaacagcatgaacagtcatccagtccacaccgacgactgccgtcactctcgatgttgaaacctcatatcaagaaatcgacccacccagcgtcaattccttctgctatccccgccccgctttcgattccgccgtcatccggcccgggagagccgttcggtggccgatcgggcagtccggcagctgctaacggatctccgaaaacaaagtcatcgaaacgactcttgggcggtggcctgctgccgagcgagaaacagtcggacggaggtagactgaagcatcagcttgaattcgaaaacttccacggaaacaacggggtcagaacggttgtcggcagcatcggtcctgttaaggatgtgagaatgttgctaaaagcagggtacagacatgtgtacatttcacgagcgtttgcccagcaaaacggctttatcccgaacgacgctacccctggctggtacggttacggcgggcttgttaagtacgttctctccacctcggttgttgtccgcttgacataagggcctcttcaaatcctgacttgctttctttctctatcctttttctcaatttcacaccgcttcttagccttggtcaatggcccatccaggtaggatccgtcgctcagaaacatactgtcatgctgtccgaagagacacactttgatgtcgtgctcggtcgatcatggatggaaaagatgggtgtcaaaacggatccgttggacgagacgagtgttgtgttgatgaacggactgaaaggagaggacggcgatggcgagaaagtcgcgtgtgacttggtggtcattaaggatggaaggtatgttcttgtctctgcttccttgatcatcttgcccttcctttatccaggtcaagcaacgttgacattgttttcatccttgttcgctttcaatcttgtgtatttcagaggtgaagttgtcaccatcacttaggcaccttcacagaaggggacacaactatatgatacacatcttgattcgtcctctctgctttttcaattctcctttctttctttctttctttctttccttccttacttcattcgtcgtaattctgccttttcctctttgctcttctgtcgatcttgcctgctctgctttataaggatatctaattttataatctgatctcatggttgtacatagctcggctcgactcacgtgattgtacagccacatgatccttaatcacgtgactgtcgacgcgtcttgacgcgtccacactatgttcatcttcccttctcccacgcgtctgttttctcttggcctcctccaagctgagcgctaggtgagcctttgggttttgcctcctcttcagtctccaactctgctgatttgcaaacctccggagctaggttgactcgctcagatacaagacttgtcaaacgtttcgctttccacacacaagacaatagtagaagcgtgagcgaagaacagaaaaataattgaaagaacattcaaatatataattcagatatacttaattaaaaataaaaacattccccccacccccctcgcgtcgcctttctttttgtttctcattcctctccttccgacagtcaacctccgacagacatcccacagaaggctacgacgctgctcgtcgattcagagaacaggaatcttccacctgaaggtcttccctcctcgcttacactggagcgattgctccatccaacacttatactcctgcggcaacctaccctccatcccaacccttagctttcacttccaaccgcagatctatttttccctgcgggatctctttcgagtgacaacaaacactttaccttttcacatcttttttccaccgtcctctctgtctctctgttccctctgtcttccttccggttggatcctgctatcttatctcctgtcaaaaggcgttcatctttcgttttaatacctattcatcgaagtattcactcattgatctatcatcaacaaatcaagcaccaatcatgccgtcttctgtatcatcaaccggctctcaccaggcttacccaacagttcatgcctctagagctgctcctcggccaccttcgactgctcatgcgtatgcttacacccaagaacaacatcagcagcagcagcagcagcaacaacaacaacaacaaca

SEQ ID NO: 3012 - DNA, 8496 bp, Xanthophyllomyces dendrorhous
caacaacaacaacaacaacaacaacaacaacaacaacaacaacaacaacaacaacaacagccaccaaaacaccgaaacgcacctgcccctcccactcaacatcaacgacctaggtcaacggcttctaaccaacaggctcaggcgcatccaccgggagagactagcaatcagcgagtgctcaaacggacggcagagagggatcgaagaggagacgaagttaagcgaatcggggcgtggaggatcggaaaaactataggaaagggctcgtctggtgagtctccccggatggtttattctcttttctttatgaggtttcgcttttactgatcttttgtcggttcacttttgtcctttcccttcattttgcctccttgtctgtcgcaggtcgagtcaaactcgcccagcattccaaaacgggacagctggcagcgatcaagatcgtgccgaaacatgcgatcttgtcgtcaagattatcgatctccgaggcaggtgccaaggcagataaggtccttcagggaatcgagagggaaatcgtcatcatgaagctgattgatcatccgaatgtcatgaatctttatgacgtctgggagacaaacggagaactgtgagttggctcggtctttccctctctactctcgcgaaagcgactccatttcttcaactaatcatcttctctcatccgcttcagatatatcattatggaatatgtacagggaggcgaactgtttgactacttggtttccaaaggcaagctacctccctcagaggcgctccattactttcaacaaattatccatgccgtagactattgccaccgtttcaacatctgccaccgagatctcaaaccagaaaacttgctgttggacggtcagcgaaatatcaaggtggctgatttcggaatggctgcctggcaggcgggtgaacggctgttggaaacgagttgtggaagtcctcattacgccagtcccgagattgtcgccgttcgtttctcttgtctttttccgtatgtgtctgtaggattctagaaaacttactcctgatttctcctcgtttctcttctctttttttctgactcgttttccaggggaaagcttataatggagcagcctcggacatttggtcgtgcggtgtcatcctctatgctcttctctccggtcgacttccgtttgatgacgataacatccgagtactcctccagaaagttaagttgggacggtttgaaatgccaaatgagattgagggctcagcgagggatttactgttccgaatgatggatagaaatcctgataccagaatcaccgttcgttttctttctttctttctttcttttttttgcgttcttctcttcgtcgtcatctgtttagcagtttacgtggcgtttacttatcatatctgccttgttttcttcctttgatcttacgattgtcctatacccctttccgagagaatagatgccagagatcatccaacatcctttttttatctcgtctccccgtcgacagatcgacggtcaggcatttgtcgttccaccctctatcgaggatatcgacagaccgatcgagagcgaaagcgatatcgatccggacatcttaggaaacctgaggacgttgttccatggagagaaagacagcgtcatcgtcaaggggctactgtctcacgagtttgtcctgcttgtttttcgagacttctcggctccgtcgcgattgagtgttcgctatgctgatcgttttgtatttgacttttaggaaaacatgggaaaagacaatctaccatctcttgcaagattaccgggcgaaacatctcgagaatttcaatatggatgacgacgacgttgttattcctaccagaacccgatctaaagctcatcactctgaccatcactcccaggcccaaggtcaaacccagtccgtgaaccgacaggcctcttctgcatccacctctggcgcaccatcgtcgacgacgacgactgggggagcaagaagacacgtcgtttctcatcggcgaaagacgagtgtgacgatcgcgaaatattctgagaaagggtcgtcccctcagtcgtctccctcaaaggatcgagtgatgagagctcaagcgaccagaccgtctgccccgacgcctaccaaggcttccaatgctaatcccacctcgaatgggaccacacaagtgggatcatcttcagcacaagcagcgccgcctgtgaggatgccttcgattcgaacggcgcctcctcgatctccagtcggacctcgacctccgttgtctcctcgagaatcttcgtaccagtcatccggtgccggaatcagttatcctttgtctccagtgatgacgacgacgacgacagcagtagcagcaccgagttcaactttgatgactaacaagtctgcctatttaccagaaattcatgttcaaaacgcaacacctcaacgaccacctacccttgtacttgcccagaacctggctcttcctccgacgcccacctcacccggattccacaataacggatcgttcttctcagccgacatgtctagagaaaccgtcggttccccaagttcctctatcaacggtggcagtcccgctgggtacaccccgttgtctctaggaggttcactcggaacacccgccagtttggcttcccctctacagatggatcagttcgaagatgcggaagacgacaattccgatctcgcatcgatttattccaatgcaatgacgttcgaggctcaatcgccaggagcaggaagcatccttagcgctcacggaaacggaggcagaccagcttccgtttggacaaactcatccgatcatgggatcaaccctagtaacatcgggttggggatccaatatcgacctggcggaacaggaggaggttctcatcagaatggcggtggtggatcgaaacattcgagtgtgtcttcggccggtggggcttacgtccacgggggagcaggcgagaatggctacagggattcatacggtagtcagggaagtaaaggaagtagaatcggaggggctgaccatcaacatcagcaacgagagagagagagggagagggagagagaaagggactatactcatcctcatgcccaccaccatcaccatcagaatcaaaatcaccaccatcagcaacagagtcatcaacaacagcagcaacaaaggtctcctctgggagaaacaaacgggttcagagctcaaaactcggcggggaaccaacctatgccgctgggaggatcttctgtcaagcctgccggaaagaagggtatgtgtttcttatccgttcatcggtgctatgcatcttctttgccttgccttgccttctcaagtcgaaaaggccctctcttatgatacccatctgactttggtgattgcgctttactcgatcagtctcggctgtagattcttcggccggacatcgtccatcccggtctgcaccttcttcagagcccaacaagcgatcatggttctccaacctgttctccttcaaagccccgtcgtatacactgtactctctctcggatcgccgaaccaccttgatgaccgctaaacatctccttgaatcatatggtgtggtgtgcacccaagagggttcttctctcctccttcgttgcaagcgagatgaaatcagggatccctcgaacgtcatcactgtttccaaagccgtcaagttcagagtggaagtctctgcttgcggagaaaaagtagggaacgcaagtgggtttgtgacaatgttggtgatggttcaagagaagggcgcattgagtacgttgaagggtgtttacggtctggtcaagaaggactggtcgttggacgaaccgaaaacgtcgagtgctgggctggttggagacagagcggcttcacctcctccgttggggggtggattcatctatgtctaagtgcatatcgcgcgttgcgcctctttcttcattctcttttccttttccttttcgttctctcatcatctcagttgttgtttcggttcctattcttcttgttttccccatctcttggctacggcaggacttttcttttcatctcatttctgggtctccatctgttttcctgtctactcattaatctaatcagatcttttgaatgataccttcaatcttatttttgaacctccatctcgtctttttctcaattcatcccaaatgctccctagatcctcactccaatatgccttttttctttcctgccttcgtcttcgtctttttcttgttcttttattgtcttgatccactttctttgcctcgttcagaaccaagactgcctatgttctcgtcgtgcctatgaatttgctgttttccatatcttgggttcaacccagtcgttctcgcggtcttcaaatcgatcttgagtgacctccacatttgcgacagaatcaaccaaagaaacgattagattttgatttatttatttttccttaaagcacacatatatcccgcttcttctcattctgttcactccgcttcgtcatcctctccatccggcccgaaccctaagagatcacacagaccatcctcgacaacagccaaccatttggccagatctgcagtcgtctttcctagctcggcgtagactgcagaatgggtggccaacgaagcgtaatctaacggagggacagaaggtagatcctcagtctgctggagttgatggttgtatacattttggtttggattgctataaatgtgattatgattgtgagtgtgggcatagttcgatgagggatatgtcatcccggatacaccaccgttacctccagctccaccaagggacgaagagatattcatgacggaaggttgaggtgagattactctactagagttaattcctgaaggaccgggtgttataggtcttgattgattcgttccggggaaaccgttggtcgctgaagatgttgatgacccacctcccgttcccccgattccaggtcctcctgcgccgccggcgccattactgctactgttgttgctgttgctaccaccaccaccgagtcctccgttatgactgctactgctgctgttgccgttcaaagcagaagacgtcgcggcgatcaagaatctactcatcgagtttgatgaggtagacggcgaaggtggtagaaggtcaagtgaattcaacagaggtggtggatgaagtttcaacatatccttcagccctcctccactcgctgctgctgctgctgctgctcctcctattccattgccattcccgttggctccagaggaaatggcctgaattccactagacatcatcatcgctccgggcgaccttgaattccaacctccaccgccaccgttgctactgataccaggatgagcctctccccggctgtgacttcgttctctacctgcgctaacaggtacagcgatcgacaagcccggtccgccaccatgagaactcgcgaaagccccggttgcgcttctgaccatgcccggtctgttgaacacgttggaccccagacctccgttggaagaagaggagacggaggcggtctccatgatgggcatggtggcttgtctagctactgatggtcttcgagaaccaacaaccgcacgaggtgtgggtgtcaatccgtgaggtgcattggcagaggagagacctggataatgagggagcgatgaagtgattccatccggcttaggcggtggagaggatgggatttgtaggtttgaagtggccgaatgaagctgaggactagggttgccgaaggaaggtgaggcaggcgagggagaggaagaaggcaaggaggcattagtcggaggtgaagccgttactctaggatggagattagttcttggaccagatggtgaacttcctgctactgccgagggggaggaagaggaagagatatccacattcacaggctgttgctgctgctgctgctgattcgaatgtgaagccattgatttgttcaaatctggcttggctgtaccctcctgatcaggaaaccttggtagatgaacgccaccagagataggcgaagctcctctggcatcaggacctgcctgaaatggatctataggagggggatttgaaggatcttcgaacagtctgcgaagagagctagggggaagagtcgatcctggtccaggcggtggaggcagggtgtcgggtaaagattgaacagaagatgggattggtagagaagacgacgaggcagaaggtctgaaagttgaaaggtcggaggaatgattgtatgttgaacctgaatcgctattttggaatgttggatccgaaagagcataaggcgagtctgaaagtttgtacgtctgtgtttttatggccgcacgcgcatcaaattgaaaagcgtcaacaatgttggaggagagatgaggaaagaaagagaaagcgaagagacaacgggacgcacattgaaaagccaatcatcctgcttgccatcaagtccgaattcattatcatttccgtccccatagatactcattgctagacttgacctgtttgcattgggctcccttccggcttctacccttgtgaggacatctttcaaaggaacgagttgcgctttcgctacagatttgatccatttagtctttatgagttcatctgccgagagacgctgagggaaaggaatcagaagcagataaacagttcagcgccgactcctccaacttgatggcaaaccgaacgagaacaggaacactgacttcctctggaacttcattcagacaatccgcagcgaaatccctcatttcctttgaccaaccttccttttcgctcaacctgggcggcttgttttttgggatcaacatgatgactctcattggatcttccccactcaaaggaggttctccgttctcactggctaattctaacagggtgatcccgagtgaccacacgtcagctttggtatcatatggtgaacctagaaggatctctggtgccatccagtatggagttcctacgaacgtcagacgtttcgtgctgtttgaggaagaaagaaaaagcggggcggagactccaaagtcgcataacgtcacccgagggacagaggtgagaaggatatttgccgctggatggttgatgatgtttgttacatgcgttgcaataaagggaatcaactttattgctctctgagtccaacaaggaaggcagggaggacgaacctttaatatctctatgaattacacctagtcggttgagaaagctgagcgcggtgagaacctcccgaatgacgagtgctatacatctttcatctagcttggtcgcttgtcgctatttcagaagggaagaaagagggatccccattcagccctcagagaacaagaaagtcgtccaacaagtctatttgtccgatagaaacctagaagcaccgaactcaaagctcaagaggcaaagaaagacaaggactaaccaaagctctgagactaccgccttctgcgaaatccatggcaatccagaccttcggtccctcgacccaacaaccgaaatacctcgtcacgttgttcttctctgcctctccacttttagccatggcttgtaacatccctacttctctctgtatttcaagtgtatcatcatctgcctgatcgaggtcaatgcattttagagcgaggataaaggatgtcggtgggtggatcgctttatagaccgatccgtatgctccttggccgactttgtcgagtcgctgatcgacaaatcacaaacagacaaaagacattcagaaccaacgtaccctcgaagcaagaggagagctctcgagtgagggagaatacagactttaaatattcgactaggctgtgaactttttgggagactactcaacgcctccgagaacgtcctctccgctattgccgtcgccgtggccattatctctccttctttgctctattcggtgttttcttcctttctacaatcgaacgatataggacctagcgaccaagatatccaacgacctggctaaagagcgaggtccagttggggacaggatgagtaagacaagaaaacaagaaaggccagcccggtcaggtctgggtgtgggtatagatgtgaaagcgaaggctaaggcgaacagatacggttcacgtaactacggaaacccaagaaactacacgcgtcgcgtcgacgcgttccagacgcgccacgcgttcgggcgtgccaggattcatattgcgcttgactctttatacttttgtcggccgagaggaatcaggaatagaaggaaaactagatggggggggagtttgcaggaaggaccaagagagcatggaggtcttggatcggaccggaagcggtcaccatgatactttgtttgatggatcgagaaatatctgggtctaaatttgtaactgaatctctagctctggtcctgattccggttaaagattttgaattgaagattttgggtgtataatgtatgtgtgtatggatgaatggatataaccgatcgaccgaggagaatgtaaaagagaacagaaggaagagaagagaagagaagagtaaaaaggttggtttcaaggggggaaaggatagaaagag

SEQ ID NO: 3013 - DNA, 12376 bp, Xanthophyllomyces dendrorhous
ctacatgactacacactcattcttcgcctgttctctagtcggtctagctatctttccaccttttgctcctagtttctttagttctgttgatgaagacccgcgagaagggaggaaacgcacaagaaggaccacgattagaacattggatctgaatataaggagaagagttagagagactgacctgcgagccgctgtgtcgccctatgtagaccagacccgaaatcagcacatgggaagaaagagaagagagtaaacgggtcagatgtcatgaacggtctctccttgcgcggacggatacgagatagaaatatatgaatgaaaccctcgacaaacctcttgttgtgttgaactgagagaaaagcagagaatggaagacatggacatccggttgagattaattttctttgtgcccaagaactgcaagtatgcgtatgataagaaagcattggagaaaagacgaacgagcagcacggttgtaccatcctttggccgcttccagatctgggttggttcctatgccttgttcgctgtaatctatagaggagaagaagaagaagaagattagaaaaatcacaacatcgatcttatctgatgactaaaaattgagagagagagagaaggaagggacatacaaccgacggcatactctgctttggcgagtcccttgttagccgcctttcgtgcccaaaggaaggactccgagtctgactgtttgagtactccttctgtttgaggtggtcgaaaagttagagaggaataaaagaaagagaagagaacaagacgatcgttagcccttgacagaaaggccactaggcgacagggagaagaagaggacaaaggaactgaccactccctgtgagataccatccactgagggcaagctctgcttctgcgttccccttctcagccgcctttgtataccaactgatgctctttctcggatcgacctcgcaagtgaggtttccatattcgaaacaggttcccaactttagttgactgggcggataacctagctgggcagcttgagtgaaaaactctctggcgagtgcatgatcgagatggatgtactgagtgaatctggccggtgggttctcgtgcatcatccctagttcatgtagagcgtgtggattagaggcatccgcctgtgaggccgccaatctcaaccaatggacaccctctctgacgttctgagcttgttggagttttccttcaaggaggatcattcccaatcgatacatcgctgtggtgtcacccaaagaggctgcctttcggaagaacagaatggcccggttaggttctcgtctggtaccggcaccgagttcgttgcagactgccgaacggtaggtcgctcccggatggttttgtttggacgcctggagatagagcgtgtaagccttttctggatctgcctggagacctagttggccggtaccgtacaggtctgcgaggaagaactgggcgtccgccaagggttcttccgactgggtagccaactttttgatcaacttgagagactctccgatcaaagtgtctctgtacttccttcctgcttttgggtcatgcgtcgatatctcggaccccaactttttggcggcctcgatgaggtactttgcgaacgcaaactgggcttccgagtccgggtctcttttcattcgagctcggtactcgtccacgaaagcctttgtgtacggtggctttctggtgtcgaccgtagcggaggaaccttggcgtttcgcattggacgagccaatcacagtacccgaccgaacgagagatgtcccagagagagaagagcctgaagaagccgctcgggatagggatgggccgccgggagaggctatcgagccttgagggatcggtggcatcgagggcatcggcggcatgggaggtctgaacactgggggataaccgaccacgccagtcgccgcggcgtggtaagggttcgaatagtccgcctgtggtgaatagcttgggtacgcagggccggccgagtgttgttgttgttgttgttgctgttggtgatggtagccggtgttggcagcggtattattgatattgttggggttgcccgcctggtaggacgcgtagcccgggccgggtgccctcgaaggaggaccgttgaaagaagttggaagtgggtatccaccgataggagggtcataaccttctgggcccaactccagactccttacgctgggtgttcctcgcccgttgttgggtctcgagtagctctgttgatgaggatatggatgtggatatgggtgagggtgaggatgtggatgcgaagggtgcgagagggactgctgctgttgctgaatgactgaaccttgagggcccatatcgaaacttctaacggactgagctcttgagtttgcactcggtgtccttccgaaattcggcccagagggaaaggcgtttgaacggttggagattgagctctgagatctgttcgacatggacgtctgagaccggttggggattggatccgatagtctgatggctgagaagttcaggccgttgacctggtcggtcgagacagagtcctgaatagttggcgagtttgtttgaggggcaacggagaaagaagcagaggggctggaagaggacgaggcggccagggcagaggcagaggcagaagcggagctagaggacggatcaaagtacgcgcctgaagttgaagcatcgtacgatggaagtggcggtgaggatggactgtgtggtggagactgtgagcgtccatcgagatggccggggttcggccgagctgtagttggtaagaacgagaatgaggagggagaaggcagggagaagggaaagcgaggcgaggaaacatggaaaaggagaaagaacgaaagaagacaacacagaaacaagtagaggccgtcagactcaacacgaacgagacatcaacacggatagagagcagcaacagcagcaccaagaaggacgacacaacaaaggtaagagagcaagaagaaacacggacagtagtttatggtcgacgagttttcagcactccatctttgttgaacaacaggaggcgacgcggtatgtttccccgagagcggtttagcatgaccctgatagctctctggcatgtgggagggcacagcggaagacaaagagggaggagatggcgattgagagtgaatgagagcgagcacccgtgctggtgtccgtgagagtgagtgggtgaacggaacacaacgagagatcgaggagagagacgaaagaagaagcaacacacggtttcggtcgttcgacctgacgaccgatctgttcgttttgctcacactcagttctatcagacactcatatatatatatgctctatgttagggataacatgtacgactgtcgccatagatctgtggataccaaggatcattccattgtagacacggagagctgctcggacgcaagcacatagtgggaatcttatgggctgtgtggaatgcagcaagcgtgcgttccatcttcttgtagctgacggagaggacttgtggccatgtcaagatatcatctggttgctgatacacatgctgtgttctccaaggcacatgtacatgctatccttgatgtataggcacccaacgtctgtcgagctctccaccagacaacatggcataggatggtcctagggaatagggatagcagccttcagcatgtctaccctcgtgtctctctctctttatgaactctctccagcttctccctgtatatctatgttctctcttctacctctttcctgcttctctctgcactctatatcttccctccgttccctccacgctctccatctgctctctgtgtatgttctccatgctgtatgctgtatgctgggcatacaggctgggaacgcccataaccctaaccagaaaattcctcggccggccgggacgaaaacacgcacacgacattcccagcgttcaacttgcaacgttgaccttggacgttgagctcactgttcccgttgttcccttgttcccatccctctcacatgctcatcggttgaggtgtctgggtgttgatctgttgtcctgtcatctttgctgctcgctttatcactttccttcctcctctccttctcctcatagcttcgctcgccctctatgagcttcaacttcaactgggaacatgcgttctctcctgccttccacgagtccgctaaatcggtcctcgagaccgcactcaacaagggaaacactccggcgctcatcgtaggtaagatcgaggttagagagcttcatatggggacaatcgtgagtccttcccgttcagttcttgcctttcttgccgtctgagttcgccgtcattctcgctgagcattcgtttcttcttcctttcccttgctctcgccgtgtttgtatacacactctttctctttctcttaattacgcctcctttctctcttttctcactgtctcggtccctatcaaccacgctcgctctccttcagcctcctacattgaccctgctcgagatcggcgaccttcagaaggatcggttcagaggaatctttagactcggttatgccggtgactctcatatcgtcgttggatgtagagtccaggtgagaaccaactatgactctttttcgttcaagctattgtcgaggctgatcttgcttcctttctgctcttctcttcgttttcgtgctctctctcatgtcttgttttatgctctctcgtgcatcttcctatgaccccttttgtaccttctccctcacttcctctcttcatgctccattctgtactctcacccgatgtccatcctaggccaatccactttcaccttctccatcaccgctgccgacatcgacgacaccgctggcggcacaccggccgttgctagtgccgatggccctccggctgtcatccctcaaattacgagcgatcgttgtgcttgttgtgtctaaacagaagggaatcaccctcgtgttcaagaacgacccgctcgaatctctccaggtcagctctacgttcgactcgatccaagtcctcaaaggattcatccagaaagagatcgaaggcgcgttgagagagatgttcagagaggaccttcccgggatcatccatactctcagtcagaaatggttcgcacccgaggagccctcagccggaggacaaagtaggatgccctttcattccaatcttgaatcgggtagtatccctagagatttctctgcttcctcctcgacatcttccggtgatgtctcctcatgtgcaccagcctcggcctactacccttcctcatcctcctccgtctcctctccaccgacatccccaccgtcaagtcattcggtcttcactgatcgatccctgttctccgatcctcatctacaagcttcctcctctactagtgcctatactccgcctctatcacccacagaatcacacgcgacgttccccgatctggaagaatatgatccgacctacggtttcagatccaaacactctgtcttaccctcctcttctacgtctaccccgacggcagcaaccaactctatccgttcaggagcagaaggagaaccaaaggcaggcctacgaacgatggacgactcgaactcgacacccacctcggccggaccacagggttaccgtccccgatcaagaccccatctcgggccaggtcttggtctcttgggtttcatggaccccgaggctggtataacaggagggccttcaaccagtagcgggagtgggagcgccgagagtgactttgggttttccggccaaaccatcacgacgagcacaagttcactctactcaaactttcatcaggcccgacgtctgccggggagggaacgagccgagtcgaacgcggcaacgttcagaccgaaacacgtccaacggatgtcacttcctgctatattctcacctgtggtctctccttcaaagtcgaccgccactcgttcaggctatcctcaaaagtcaacagcccctcggggggcagagaaccatcagtctcatcacgggaaacaatctggacttcagcctcaaacgggtagatcgagagcgtatcacttctcggagtctaccaatccttcaggctcgtatgataacaggtcgacccctcctttgtctcaatcgactacaccatcgagaacgtcccccttaatatcaactcctctaggttccccacctctatcgacagacggaagtcgaccgtcgtccttgtcctcgtcttcgtcggcttatatgccagcttatcgatcgagaactcacccctcaacaccaagcgcacataccgactctatgtactcccgtccatcggtcgcccggtcgactatcaacacacacagaccatcctcttcgatagcagccacagaactctcctctgatcgttcatcctcctccccaagaggtcttccagaaacattggaccatttgtcgctcctctcgttatcaaatcagacgttgtcaccctacaccagagaactagctcacgtagccgtgagatctcaacctccttctcaaagacttcttgatgatccggctggtgggtacccttcacccgctggctatttccctggagccggaatgggaacaaggaaagcgacgagaaggaaacttcataggttcacgacatcacccgccgtgccgaccgtatctaaaccagatccctcagttcctcttcatgggagggctaccagtccgaaacagccgttcgatccttccccagtagccgcagggcagagaccaggaataggcgtacacagagaaagctatgggtttccatcgatagatcaatccggtctagatgtgtcttccggtccagttttatcagaccggcctacgcctagatcaggagggaaagcaatgggagagggaaggagggattcaggagtgcctgtcccggtcggttggcgcgatgggttcacagggccgttcgcgggtaaggctggatttgtgatgtgatggggaggaggttgctgtttctttagtgttcttctattgttcttgtacacatgcttttttgcccttccttcttctttcgtggtggttcgtcgaggatgattgatgcattcttcctcctccctcctcattcattcatcatctctgtccatgttcacaactctgacgatttctcttgtttctttctctctttcctcaagcaatgtatttacgtatcatacctcatctcttctcgtttcatcttattgccccctctctctctgttctaagcaacctcttgtcttccagtcttatacatagtctcgatcttgatatcttagtcttgatctatgccctggtctcgaaattcaccatgactatatatcgaccggagatcgatgattattctatttcctctatttctgtctttgttgcaaacgagccgaacctgttgagaaaacgaagagtaagaagaagatgcatgcgcgggtatgtactttcaagaggaggaagtgaagatataaatgacgcgacgcgacgcgtcacgtcagctcgaacgccaactgatgctcaccctcaatcttactcattttgttctccgtacgactcattatccttcttctgtcttgcgatctttcactcatattcgaggacatctcattcaacaagatcgcaagcagaagcaccaacaagatcgagatccaggcgcgaaccggcttgttgacaggaaagaatcgagatcagagctgaagcgagcgaatataattaagtggtcagcctcagaaatgaagagtcctaaaacccttcctgccggaacacagtctcatgctctggatcgaggcaaatgcgaaagtaggaagcgtaaagaaccatcgacaccgatgtcgagcggagcagaaccgacgggtaaagaagaacctgtcttgaaatcgatcaaaatccatccgatgtttgctcctaaatctcagtccttgccctcggataaaggaccctcggattgggattcgaatgtcccgttcgtattttcgttcctcaatcttcttcttgtttctttccttgcaggctatctcttgctgattggactgggatcatttgtgcgtgcggacgatcgttaacagaaagtcgctcttgaaatatacccatctggatcctttcacctctgttaccccccctgtcttctcaacagaggaagatgaagacctcaaacttaaacgaaagaggaaagtagcgttctttgatttggacgggacgttgatcaagacaaagtcaggagcgacctttcccaaaggcgatacggattgggtttggtggagtcctatggtgaaggatgaattgacccggttggcccagcttgggtttgtctcttatcctttccctcttgcattgtcatgttctgctcggtcttcgagaaaatgtcttaacgattggtttatttgaagggcagatttcttgtcgttgtgatatcaaaccagaacggattgaaagcgccgagtacaaagatgcacaaagcctggaaactcaaaattgagcatatctccacccaggtttgtcctcttcattttctctctatctctggttttctacatactgatgttcatccttctactctcaaccttaactatgcgcatgggatccgatgtctttctagttgaaggcgaccccatttctcgtcttggcagcacttgagaaagaccagtaccgaaaaccaatgttggggatgtttgatcattatgtcgaaattctatcatcaaatgatatgactttaggtttgtttgccttctgttcttcttctcttgtttggaatgttctgtagttaaacattcgtataccttgcgtcttttcctatggctgtttgagcgcctgcagattcagaagagtcattctatgtaggagacgccgctggtcgaaagaaggatcatggtgatggtgatcgaaagtgggcagagaatgctggtctaaagttctataccccagaggtgagttcctctccatcatctctcgattcgagatgtggattctgaccaccaatgttctctttctggtggggtccctctggggtttgaaaagatgtactttggtaagaaagacgaagctttaccgcctctctctggattcagaccacgagaccttgaaccatgtatgttctctttctcccttattcgaaagactcttactcgttcatactaaaggcttgtaagaaactctcataaaacgcgctaggtccatcgatcacaccgacatcgactccactcttctcatcaccttcgtcgaaccgatcagaagtcatccttctcgtaggctcaccaggttctggtaaatccacgttcttcgaatcgttctgtctaccaaacggatatgttagagtgaatcaagacgaactcggcacgagggtcaagtgcgagagaaaagtagaagaggtattgactgagggaggtcgttgtgtcattggtgagtcgattaggttcatatttcctacacgtgcgcgcgtatgtgtgtgtgcgtacagggattggaagaagagaacattagtttaacaatcattcgaggcgaaatagacaacacgaacagagacaaagcaactcgggcagcatacatcaaaatcgcccgacaacacaacgttcccattcggtgagtccttcttgcatcactctccgttgtatcaatccaaaatctgatcatacatgaacatcatctcttggagaaaagttgcttcttgttcccgtctcagccggcgttagagaaacacaacaacttgttcaggttatatcccacgtcatcaggatctcacgtgcctgagatggctcttgcttcatataggaaagggtttgaagaaccaactgtggatgaagggttcgacgaggatatcaagcgaatatcactcatcggagagctaggaaaagggttgatcgacgagaaacagaaagccaggtgggaaggctggatgaactagatgaagtagatgaactagatgaacgtcatcctgtactttcacgcagtcagatcagctatcgatatgctacatttcatctcattacattctttctaatttgcttcgtttcctctagccacgtttgtttcatgtgcttcaaggaagcccagcacctgaagtaacctcaggcgtgacactagtctcgacggcggcgcttctagcagcggtcaaacgatcgctctcagcttggtttttgtaagcttgagaggcggaagaggcgtcatctataaaagatcattcaaacgacgttcgcaattagcaaattgataaagccggttgacgactgaactcaggctaaagaaaggactgattttcagaagatgaggaatagactaacgggaggctcggacattggaagggacatcgtctctcagctctggatcttctgaagcaagatactcctgtttcatctcaacattctgacgttttatgtcatggaagagagaaaaaaggaaaggagaggagaacaagcaaacataagcaatcttgatgcgcgaggagataagatttcaacgtacattagcttgctgatcgtgttctacaatcttctctttgatcttattgacgattcccatctttgcgctcaaatataagtatgcgaatgaatgtgcgtatggtgaagaaaacagaatgattggaacgaaggtgacgactacttttctctttatgtgttgagttgggatgcttgcgtcatgatatcccacgtgacccaagagattgtggctatgcagttagtaacccaacatcaatcccatttcttcttaaccctttctctttagcaactttcttggatacgacggacgtcgtttgatgctgacctggtcgtctttgttgaatagaataacagccagtatatcgttcagatctcttatgaatccacacggacggtccaatccgtcagaactaccggctatagccatcattgggacaaccggggttgggaaatccaaactggccattcaactcgcccagtacatatcttccgtcggacagaatgaacaaggatcgacaatggagagtacaggaggatgggattcagcagagatcataaatgccgattcaatccaaatctttaaagggttagatgttattaccaacaaagtgacggaggaggagatgcagaatgtgcctcatcgcttgattggtgtggttgatccaaggggagagagaggttggggaatgaagaggtgggttgaggtaacaatggacgaggtgagaagctttctgtttcaatccgtttctttacatgcttgatatagtgcgcgctttccgtcattcgaaggctcaatggactcctccttcgccggtcgtacaacagatatcagaactacacgctcaacgatccatcccgctcatcacgggtggtacaacctattgggtacagcatcttctctttccgctcgggaagccatcaacgccttctcctctgtcatcttcatcaactagtacggtccatgtacctttccgtccaactccctctccttccctatctagctttctctctgtgcttcctgagccactcttgcctgccgagaaggatctcctagagtcgcttccatcgctaccattgaagccggacgaaaagcttgcgctaccgctccatgagctcttgagaaagctagatcctattttggctgataaatggcactggagggatacaaggaaagtgttaagagggttggaatctgtgtggaatgagggtaagagagaaagtgaggtttggatggagcaagcaagaaagaagacggagaatcaggactgggagaagaaaaggtatgtcaatcttgtacgagagcgtacaaggatgaaactgactgatggcattttcctctttgtcggacgggacataggtaccgaacactcattttctggctctacgcaccatccgaaatccttaaccctcgacttgattctcgaatagacaaaatgattgaggtgaattgttatctgttctcactcttgtatcctcagacgattattctgactctcatgagttcctcttcacgatgaatgtctagcttgggctccttcctgaacttcgtgaaatgcgcgaaatagctgacgaacacgcctcgtccttgaaagagagcacaacccaatctgatccgaatgattcgacttcgggtatctttcaggcaattggctacaaagagttttctggaattccgacaaaagacctcacgacagaagctgcagacaccatacctttcaaagatgcggttgaacggatgaagatgacgactcgccagtatgcgaagagccaggtcaagtggatcacaggaaagttgggaccggaagtagaagagagggtggagagggaaagagaagggttgttcctcttagacgcaagtggttcgttcctagcttagatgcccatgcattcctctcgctcctctatctctaaaacggatacgactgattgatcttctttcttacggatggaataatgatcagatctagaaaagtgggatgataaagtgttggcaccagca

SEQ ID NO: 3014 - DNA, 10820 bp, Xanthophyllomyces dendrorhous
  misc_feature (9193)..(9202): n is a, c, g, or t
acctatacacatgacgatcccagcttattccctgcttctacccatagctttcctcaatgaacagcctctcccgtcgccaacttcgattggtggttctcatgccgatacattgctttcatcactttcgaatagttccaagtcgtaagtcgtcatctaccaaagagataccattgatctcctcattgactttaagtgcacaaaacaagcagtacgctaccgaagggcactccgcacagatgcgagctctgctcgaccttgaatgagccatatatggtgatgctcgacccctcgaccgacacaccggaaggtgccagggtgaagcacgagcggggaaagagacatcaatcgtacgtcctttcttctcttccatcaattttaaatgtatagaatcaggcaagttcaagtaaagttgctgacagttcgaatatcgtcgctttgcgttgtggtttccttttcagaatcttgcgaaaaatgaaacgagcggaggaggcgcctcgatacgaagaattgcgcagagaggccagaaagcgagccgatttgaaagctctcgagcaggataagccgaaggaaggagacatagtcagctctgataaagcctagataaatatataataatctttcccttcgttcatgctgcacaacgtgtttgaggagagaagatcaacgccaaacaggagattgcgctatgtttgagtctgaatgatcacaaacatggttacaggcggaagagccctttggcttatcacaacaaacttcgactcttctctctcctcaccttcagtcgttgacctcgaccttctcttcttgagccttctttcgctctctctgctgtctctgtctcttacagcaagtacaagcatacagacgacgtgtctctgcatcccaaaacttcaccggtgtcttagatcccgctgtccgcctgtgacatgatgcagtccggctcggttcaagcgtatcccaaccaaccaactcaacctacgtcgtactttcaacggcctacccaacagcagcaacagcagcaacagcagcaacagcagcaacagcaacagcaacagcaacagaagcagcagcagcagcaacgcataccatcacaatctgctctttcttcatcccaacgttcaaccgagagccaaccgtcgtatgcctatgcccagtcacatggtagacagggtagcttgagcagtagccgaacaggagccggaggcggagcaggagagtttggacagattaatggagctaatgaccaagctggacaacttgcagatgataggaaagacatcacaagggtctactgggaagctctgagaacatcattggctgatctcttgagcaaaggttcgtctgcttcctccctagactctattttcaatcacttctttgagacaggccgcaatggatcacgcatggccccggtcgcgctataagaatttctcataacgctgatcagaaaccttcttgttgtatgctcgatcattcagagccaccaaatgctcgaagtcacgcccgattgaaacttgtccgattaacaaaacagcaatttcacgagctcaccatggatgtttacgatgaactcttacgtcgaaattccatctctgaaggaggaccggacatccctgggttgccctatcgacaagacttccactcgagaagaaacgaggccagacaaaaactggcgacgctgccaaagaaccgatacaaggatttggcttccgacgtgtttttcgaactaaacaagcgaaatcctgagttcacagcgagcattgcagaggagaccttaagccaggtgagcattgtatctttgctgatattcaatcaaggtcatctcatagagacacgtttgggcaagctgattgacgatcgtctctcgtttaaaatggcgcatgttccttcttcgttctcaaaactttccatcatattcgatctgcttacagcgctcctctgaagtccgatcgtctgtagaaccacacacagctccaaatgttcggcaccagcctgcatcctctatcggatctatggcctctagcatgcattcccggaccatgtcatcttcgaatcatccgcaacgtcagccccagcctcagccttcacaggcgcagcatcgaccaactcagtcgagcagcagctctattggaaatcacagcttctaccagaatcatccccagcaacagcaacagcaacagcagccaggaaaaacgcctgcaactaggcaaggatcgatgtcacgcacgatctcgaacagttcttcacttggcgaaattcctttatcttcgtccaacaatccttcttatccaccgaacagaactcgcaaagattcgaccagctcgtactctcctcctttctctaacgccgtaacacctgatgacgccttcacctcaagtcagaacccgaatttgacttcaaaccccaacacaaaatacaatcaaaattcgaatggagcgaacgcaagccttttgaactctgtcaaaacatcccaggttgtacccaacaaatcgacgattgcatccgaagagatcgaggttccttattcgcgcgattccgagtacatcttatcccctcgttcaccggattttcaggattctggcgctttcggaagacggcccggtaaccagagaactgacagtggggacaatgatggacttcaaaggaacgaggaggaaggtctcgtcaacgagttgaggaagacgaacgaacagctccgattggagttacagcaggtcaggagggatcttttggataaacaaggccgaggcacagacaccaaagaggtaggtcttgtcttgtgttttctctgatacttcacgccgtggttgcaacaccggatattaacactatggtttattctatatgaagtacaccaaggatcttgaaatgtctctgaaaaatatatctacagaactcgaacagagcaagacagcgctttcgaaagagaaagacaagtctcacatgctggaaactcagatgaagaatctagagatcagccacgaggcaaaggtgtcagacatcagaagaaatcgagatgttcaagaactcagcacagtgcgccgtttttcttcttcatgagggcgcgatatttagtcatgccatcgtgcttttggacggttcgattttctcatgctttacatttttgctatcaggtaactccaagcgaagatgattttgcggctctgcgagtgcagatcaaggagcttctccgagaactcgactcgctttctcaaacaaacgatcaccttcacgaacagatggatcgcgaacgggcacttacaaccaaggcagaggttagggcaaaggaaatggaacgaaagtggaggactgtcaagacagaactgagaaacttgaaaggtaaaactttctttatatctcatttcttattctaatattggtaacgtcacatacttgaacaaaacctgatcagtttatctcaattcctctgggcattcatcggatacattcagcaacttcccaaatgttcacctcagctcctcgcacagaagatcactttcctgcttcaaaaggcggagtgatcgcagacgtccatgttacagtattccaagactcgatcaacagcttgctagctaccgccaggtaagaattaactctctttcttgttctctcctcatatatcacgttagatagctgacctggaaggtttctcgttcagatcttcgtcaccgagctcaatcctcggtgccacccaccctgttctctccgcggtttcttccattctacgagacgtagaaacctttgagtctgatacatcagtcgacatgtcctccatcgacctacctacgcttcaaattatcaaagagaaaagctcgaccgcactctccgcgcttatcgagtctgctaaagatttcgccacctcttacggcctcagtccagtcggtctcgttgacgcggcggctcgagaattaagcttaactactgttgagctgtttaagcttttaggaatcaaaagagcggacaaggcagtggaccttcaggaacctcgaatcgaagaagagaatggggaacgaagttccatccaagatgaaaacgatgtgaagagcagtgcctggcttactgttggaggtgctcgatcatctccgtcgttgtttcatcctctcggagaaggaaaaggagcccagagaggagaagaagaagaagaagaagaagaagaaggaggatttagaagtcgacagtcgtctgcttcatcgacgtatgatgaaccctcgatatccattccgacggccaatttacccctaaacgggtcgaatgattacagaggcggagcaaacaatcacctaccttctgggctcaacgcggcctaccgactgacatcgacgtcttcagttgggagttcattcgatttggaacgtaaagcaagcttgatcagagcagatagtactcgagaaaaccctggaagattgaacggggtacacagcatactgacagaaaacgagaatgagcgcgaagaagaactagaggatgatgacgataatgcatgggttgcattgaaagtaagttctcgtgttgtgcagaaaacttgagaatgtgataaccgatcctgaagttgatatctccccctcatcatcatcatctctctctagccttacctagaaactcagtctgatgctttgattcaatccatccaaactctcctcacatcaatccgaacgggtgcgacgggcacgctcctccgggagcacatgtcctctgtgatcgtcgttggatcatccatcgtcggcgtgtctaacgattcgctttcaaagaagtttaggacaacgggcgacgatcgacagaggttgttgaaaattgtggcggagaattgcgagtcgttgagcgagttgagtgagagcgtggatatgggtaaggagacgaggaatttgattgccggagtcacgttcgatttggccaaggtacgttttggattgggattatctcaggaagagacttttttctgatccacgttctttttgcttgctctctcctccttgattgatcactaccaacaacagaacttgaaaatgttgatgagcttctagaagcttttgtatcctttattacctactttttccccctgttcacgcactactccacatcatcgcatgagtatgatggtgtgcttctccttctcgataaaagttggacgacctttccgttcttcactctatgttctatgcttcacacgcaccgttcgttcttcattacatccacttttttatttcttagtcttgtcacgttttattatgtacgatcggtttgtcatccatcccaaccacccagaccgtactttgcatgtatccatgccggtgttctcttcactttgttctactaatcatcaagcttgatcaggaggtgaaagctatcacatatgttcatacaaaaccaccttggagcgagattggccctttagaaaaaaggcatctctaagagagaagcagagaccgataagtgcgcttcaacagagttcatcgagttcatcatctcctgtttgttcaacttttgaaggttcggctttcaaagactccgggtgttggaatagcacgttgacttcctctctgtcgaaaaccaaaacaaagagacgaatagaacgtcaatcggtcaatacgcgcgctatcacgatatgataactatatagaaaagaggctggaactcaccccagctctctaaccaaaacagcctgaagacctttttctaaacttctgctaacactcccaaactcttccttcagttccttcagtttcccctcccattgttttctctcctgaatggcctcccgatgcttggccttggccaacatgaatctccacgtcgctcttgatctacctttccactgagcggatgaggttgtttgtctagagggcataaacggcccggtgaatgagtcgtccgagtctgagtctggtgggggttcacgaggacttgtcttctgcgggttcgtcttctttcttgaccgcttgttcttttcctccgtggtcggaagctctatatcatcaatcagcgccgtgttgataccagaggttccagactttgacgcatccgtagctgaagtcgttgaagctgctacggctgatcgagcaagatcggcctgcatcctttcccattcatcttcatcggcttgccatcgttgggagtccttgcctttcggtcgacctccttcgaactggtcaagctcttctgtcgggacgacagccttcgggacgaacgtccggtttgaggtatctttcgtccggtgggacggagcaggaagaatattgtgttggacgcgcatgtgttttgctagtgcatcagatcgggtgaaggacttatcgcattctgaaagatccccataagcggacggaatgcacggagaaaatatgcgcccgtacgcagacatcaatcaaacaccgtcagcttgtagtctcagttatatcaagctgtgctggatgttccggtaagcagagtgaaaacaacgtacgaggctcggtgcaatcaaatggtttctctcccgtatgacttcgaagatgactcaagagagcaaaccttgatgtttgcggtcttccttttcgaacacagtccgaccattcgcacgtatactgggccttgttagtcccaatatgttctaaagagtgatttccgtcagaaatcaagataatcagaaagaagccaaagagagggacctcagggagaataccaagacagagaaagcgtacacaccttcgtgtatatgattgatgaacgttccctgtagaaatattcgacccaagaatagtcaacatcaccgttcagatcatgcgatcatgaggcttgaacccaatccgtctatgttccctagagagaattttttcctttgaagcaagaaggagaggaagcatgtaaaaatcctggaaaactcactagttctgagaacgtcgctccgcactcgacgttgtttgttgaactgtctaaccaataacaaactgcatgcaacgcgtttgggtctatactatccctcttccgcttcttcccccgttcatccagctgagcacctgcagtgtctacaatgggacctgccacatggtctgaaagattcgaaggggaggaaggagctgatcgaggggaagccggctgagtacctccttcggacggagtaggagatgaagacagggaggagacaggcgagagaacgtcaggctcagagtcgctgtcagaggcataatacctcatgctggaatgggtggtagaggccgaagactggactggagggagcgtgtgtctatgtgtatgagtgctggtatgagagtgagaacgatatggctgatggtcgtttgggaatgagatgatgttgatgatagctaccaacttctctcagacatactggcgcgcttgccttgccttgcttcacttcttctctcgtctttctcttctgtctctctctctctatcacattcttctcagcctttcactctatgttttactctatgtaggaacacatcaatcatatatccagtccttgagtagttattcatgttgataaaccagcttgaaccccagagtctgcacatcgggtcgatctctacttatgattttatagcattggatatccagtcccttcgcctcctccttcctctctcttcagttctttcctactccagctccatgagttgccatcttgaatcaactcataaaccaactgttcaccgagtctgtttgtctctccattcttcaactgacagtcgatcgtctcctgatcctcagagctgcccgcgactaaagcggagagttgagagcccatgaaggcgtcttcttgaagaatcgtccttgctttcgaagggggtaggacagaagagacaatgatcttgggagaaggatttgcagtcggaacgtccaggcggaagtgttgaagcggagggtccagctgaacggtggatgctatggtaggcgagagcaatcgtacatgaatggaggaagaagagaagacttccagagtggacgacagtaaaggggtatggatatcaagagtaaagtttgaactgttgtctggtttaggagatcccgatattcttttgatcgatcagcatcgatgtcgaagggataagctcgcatgatcacgaaaggatgaactgcagaggcaaaacttaccgatgacgactttggcgagagatgtcccaatcaggctgaactgcttgccttgcccgtcaaaatccctgaagaacacggtcgtccgtgatccaaacggagtgggagcaaccgatgtcggtgagaggaccaaaggacttgaagctgtctgttctggtcggcatcaccgtgggtgggaaggccacttgaaaggagctcagtcgctgtcatgtatcaagaacgattatctaagagctggtagcacatacgacttcgtatatctctcttctaggaatggcgaacatgaggtagagagagcgagagaaagaagatggagacttggctgttggcacgaatgcatcatcaacaacactcatcatagagtttgcttacgctctctcttcatcagtcagccttgtcctatgttacacttgcataaggcttgtttggccaaactcggacgaacccagcatgggtgttcattgcgcacgacctcttcttcaagatctatcttgctttatagatatctgggattatgtatattattgccgttgatggcacttgattgtctttacgtatgccgtcgaaagaaggcaaatctactgataacgcgggatgtatcgtgacgattgcttcgagtaaatacatggtatattgctggggtatcagaaagtgtcttgtacatgtgttgatatcacagaaatttgaacgatatgttttgcagattgagtcagtacgaaaggattcaatcctcttcgtcgtcgtcgtcgtcatcgtccccatcctcatcctcagagtacactacacctctgttgatgaagtaaacaggaaggaagagaagagtgacactacgtcagtaaagtcatacggagagacgacattcttgagagactgaccttcctgccctgggtcttccgttctttgtctttatctcttcagttgtcgaactagcggcatcgtcaagaaactgcttttgtcgcttagatgtagcttaaaaaataacgaggagtcagtcagaacggaacaagagtcgaacatggtagagagaaagaagctagggaaaaccgacttacgaggagtgtcgtcctcttcttcagaaccctcctcctcctcttcctcctcctcctcttcatcttcnnnnnnnnnnatcttcatctctcgatctcctcttgccgccttgagtttgtgttgccgtctggttacgcgattgagcgtccctcggggtgaaaagttgactttggccttgactctggctaggcctggctctgcgtttcccggcagatgaactctcgggcaccacaacttcgtctcctacctcaagccattccataccgtctttccagacgatctgacattccgaattaggacattttgggttggttttggagatcacccgtcggacgcaatgattgtgaagcgcggatagactatgcgaggtcggagagcaggatggacagatttttccctgaacaattatcaatgcaaccccaaagaactgtgttaattcaatcaccacgacgacgacggatgctctgccaagaggtatgtatgaggctacacaagctacaaacctttgtgacgagttttcgacaaagcttgcagtccaagatgacaagcgcgctatcctcgttttctccatcgtccatagagtatgtgtcccgtaggtaatggtccagctcagtcacggctcgtaaagtcaatgaatatcggttactggtgtctcgcgtatgataagggtttagttacaaacgagatgaatgacagaaactcgttgttttcagatgaaagcgcaaagaaactcacttgaccaactgtaaccaacctccgccgggtgtgcttccacagaacctatcaagaagtttctcgccggccgacttactgatggtcgtcttgagttcggaaagtagccgagaggcggccaagggcgagattgagaatgaatagctaggggcttcgatgatagcttcaatctgtgttgaaagtagtgggaaagtgagacagagctttttaatcgtagtctagaccggaggctgctcacaattaattttagatagacaatctcgccgggagtgtaatttgtcgctatctgggccaatggatcggcctctatattgagctgcaaacgggccatcggagagcacataaacatacacgtaagctcgatgcctatgttgttaataataatgataatcgaaataacacacgaagactgaccaagaagacccacttttcaccagtcgcttggtgcacttgttcatcgagaaggaacctcaatggctccagcagatcgttgatctgacccttgaaggccggccacccgtcatctgctctatcaggcggcggatcgtttctgtccttgtcattttcttgaacaccgaacgagtccgaagtttaaaaacaagtgagatgatgaaaaatcagcgagcgatgagccttgagaatagctagtaaatacaaacgggcgagtccggcttcagactgactgtatgcggcctgggcacatcgttcgtaaagggatactgccttctttagaggcaccgatggctgggagaagacggactgaagaaacaacttgtgagtatgaccgtgagccatggttcaacgattctatccgtccgtcgaaatgtatgctggatggtgaagatgatgatgctgctgatgatgatgatgaagaaagaacaagaagcccgacgggcgtcgtcgcatatttggactacaatctaattaggaaattcttattttttctctaatggtattttctattt

SEQ ID NO: 3015 - DNA, 1818 bp, Xanthophyllomyces dendrorhous
gtttactttggatcgccttctcgccgggttcaatggctttcttgtcaccttgcgcatacatccaaggaacacagcatacatccaacatctcgcatcaacatcatcacccctccagatacaattgcgcttcttttagcttggcccttcgattgttctcgtcagcttggtttgtctgaatagtaaatgaggattctgttggaacatctgacgatccgtcgagctgggcttctcatcgtgctccttacattcgggttcttggccttggaagcactctccgtgggatctctgtcgagcaaaccatgtacggctccagggacgactcagtggggactacttgtgagttctaccttccgtctagttgtagaatctgtggtggaaacgaattgtattctaatgcaccctcagaggcttgatggcatgctcttttcctcttcctcaggccgatgatgtataccacctgggtttaaccgagccatcgctgtattatgggtctcttcgaaactttacaaacgtgttccctagttcgtctcctctgaagacatcgcttctccattcggtcgacacctactcttcacaccccaattcgtccctgtctttcccatcgatggtcgacaatcgactcatctttcagaccgacaaggaatctaaaggtaccgaggcaacccggtcatggacactcaaaaatcaaaagtgggagtacaggtttctggacgatgcagcagcagaaacctgggtgaaggtgtggttcgatggaaccgagattgcacacgcttggaaggtgatgaaggccggagttctcaaagcggattttctaagatatctactgatgctcgtgcatggtggggtgtactctgatagtcagttgaattccttcttgttcaatgccctgcgctgatgatgtactgaacgattgtgaactccaacagccgatacggtagcccttcgtcccatagaacagtggggaaaactacaccctcgattatacaccaatggctcgctgtcctccttcgactatagtccagattctgaacctagtttgatcctaggtatagaggtagacgtctggaaacctggctgtggttggatcaagaaatggcctcggccacttcagatcgcgtacgtgatctagcatttctttatatcataccaccattcccgtccgatgagaagatgctcatgacaatcactatggtcatagccaatggatcctatcatccaccccacatcatcccatttaccttgatgccgctcgaagagtgtcatccaccgctaggaaaatggaagcatgggaaaaatctcgtgatgaggaagtcaaattgttggaaggcctgggcgacgaagcatccctccggaaagcttacgagttgaataaaaagctttggacaaatatggttagcactctggaatggacaggacctgccatgttcaccgatgctgtccttgcgttcgtatttcataatttctacaactgtactgcttacataggtaactctaatgattgatgtctgttcgttgtcctatttgtcttctttttctatatctagataccttgaaactcaatatgatgtcacctggccatcactcaaatctctgaccgagcctcttcgtattggagagatcctcattcttccccttgccggcttttctcccaacgcagattccgacctccgatggtctcgaccttcgagccctcaatccagtgtcctccatctcttcagaggaagctggaagaacatgggcaaatggaaagcgttcaagaggtggctggccaaccgagggggattcatctttgcacttggcatgattatcaccctcttc

SEQ ID NO: 3016 - DNA, 22069 bp, Xanthophyllomyces dendrorhous
ttatcaccctcttcgggatggccatttggatccggttgaggatgacagaacagcagcggacgagggcatcagtagttggggatgagagtgtgacagatggttatgagctagtttgggatgcgcagaatgatagtttcgaggaggaccaaaacgcgaagaacctatggcgagtaggaaattgaggttaatcgtagcatacatggactatcaaattattcaggacttttatctttcttcttctttttaattgaagccatctctgtgcatacgtatttctcttctttgtctgtgatatatcgtctataccctttgtatctacccttgagttaggccccgtctatatgtaccatacactcgacaactttcatggctcatgcattagtttatgcttttcagtcgctcgcccaaacttggacatcacccatcatgctgagaagcatttcatctggatatctgtcaatccaaccggccttctctgcccttccttctgagtggagcctcctcgattataccacctatcgatccgactctggcatgtgactctccgactccacctcctccgctcaacatccggcctcttgccgcgcctctacttcgtcccaggaaaggaatgacccgatggatcgatatagccctgatgaatcgagacacgacggcagatgttgaacctgcgcctcgacctcgaggtgtggatcggtagcctggtccgtcatagttaaggatctcaattggcggattcagccgaggccaatcgacataacttttttttttggggggtccaaggggcaaaaaggaagaattggtgatgagctacgctcgtacaatagaatagccaggaatcgatggggaagaggaagtctcttactagattccattggcccagatgtaaagaaaagagagcacggtgacgatagaggcagcccagaaaaatgtccagcttatcggaattactgtgttgatttttttagtttaagacagagatacgaagaaacatgaaaagttaggtcacgattcagagatctgggctgtaaaaaagaaaaattgaatattctggaaggaaaggacgcacaccaccaccacgcgtaaaactcaattagacacacacagcctaacgctgttgatagcacagttggcatctgataaattgacattaccaatagggaattgttcagttgggtataccataaaactgaagatgagcaatacccacaatgcgcatcaagatcggtcgagtatcaacaaaaggtgatgtggacccccttcgtaccgaccaagctcctgtcaacaagtctagtgcatcctgtcatcatttagagcatcaagatatgtcgagatcagccgtctgaagtggataacgttgagttgacatacggagaaaatagacggctaaactaacctgtctcgatccgtccaaataattattcttcacgtatcgaactactgaattccaaccgtccatagcagcacccttagaggatcgcttgcctgtccttgtaaagtccgtttttagtgcacctgtaccagaatacgcgatcgagacaacgtccgcatggtccgcccaaactagaaagttcattgtccatcatgaggatgtcatccaaaacagaaaatgagtctaccaaactttggatgatagcaaagctagctgtcgaaagagaaaagacccactgtttcggaaaacatgcatgaattcggggtgatgttcgacagaatctatctcggtcaagaccctcgaacttcgtagctgacggtctaggacatctctcgctaacgcagattgcacaacgttggttcgatcttgaggcgttgatgtgaattgggatggaatgataataaatatgagataagtaaagcgacaatgggcttttaacttgagagcgttatagctctgcgaaatagcgtcgtcgtacctagagaatccatgcctatattgcaaagacccgcaaatgaatggaagagaccgtaaacgttgatattcagggaaactgatctgctcgggaacaaaatgagagaagaacatacagtttgtgcgtatcaccgagatctgaaacttcttgggtggataagaatatgcggctgattctgacggactagaataatggaaataactgccatgtgggaagagacattttctttagtaacagaatgagtttagcaacggcaattgaagcaaaactaaagaaacacacccttctttgtctagatcttctctcaatcgatcgatcaagctctgcacattctcaaacttcattcctttgcactctttgtggaagtcaaagtacatatactttgctcgaggttcgttgacaacgagcatggcgttctcaagtgcctctttgataggccgttcgtatttgacctggttgacaagattgactagatgaacatctccgtagatcacgatttgctcggaaagatgggattgaagagcagccgcctaaaacaatcagatgagtgtcagtatcagtgtcttatggacaacagagatattcgagtggccaggcaagagaaatgcgcacagtttcaggaagagccatcacttgcagatcgggtgtgtacctaagattgtttacctgcgcccaaaagatcggggcggaacctctgacctgaacaaaactaaatcgttccctcccgtgtatcacgtcaggtaaacctggagagcttgagtgtttgtcatcagaaatttgtccgtttggcgtgctaaacgatgacgatggtttgtcgaacagaacgatctgctcggtctctacgtagttggctgtgttgccatcatgatcaattcctctagtgaagaaccgggtgccggatcgatgacgagatcgacgcgagatgagcgcgagtaagataggttggctgccgatttcagtttgacggagctcaaagtctgagacgacccgacgtagcagaacgaaacacggtgaactgatcagattcgctgagaacgtcggcgatgagacttggtgtcaataaacgggttgtatgacttactgccatacatcacaggtaggatgaattgactcatctgaggtcaaaaagatcgataaaacattagcaacaccccaaccacaaactaaacaggcaaaagagacgaaccgcaggatcaacagaaactgctcttaccgagctcgacactctgccgacgtctaggaatttccgcatcaactccaagttccaaaagaaccggtcatctgcccgctcctgaagtccttccagcctgtcttctcctcccgcggccctcacctgtctccactggcgttcgagggtatttgtcaggtcaaatgtatatgagaaaaacaatcgagcggagtctaagccttgctgaacgagatcctgaagctgcgcctcgtacggagaatacagccgggccgggtcgagcggggaaagcggaaggagcagatgcgaggagatttgatagatatcatggtcgaggaatttacacgaatgggttttttgagtgataacaatgagatagtccgctgttaaagtttatacaagtagtttggtcattatgcatgcagagatagtcataaggtttcttagattacgcttggaagttctcaagacctactcatggcgagggagatgatgcccagaatgccatgaactgtaaggatttgttcagtggcaaccggtgctgttttggtcgtagttgtttgaatttaagcaagagaagatccaaggtcgtttggaagagccgtgagaatgtgagcaaactgcttcgatgccgaacatagatggaagtcattcttacgattcaacacgatgctgcccgtcatccgatcgatcacaagtgtatctaatccggccatcttatcattgaggtctcccctaagagctgattgaaagacctatatcattacatcgcgtcatgtttagattgcaggttgcaaaagacggtgataatcaacattggtaagaaagattggtgaaacattcgaaacagcatgagcccaaaaacccaacgcgtcctttgcgttggcaagtcggatgacccgaacaacaacagaagaaacgtacataagcatcattactgatatacagattgagagattggtggatcgatctcgttgttgatttcaaatccatctttaaacgtgtcgagtatcgttcgttgcgtttgctagcctgagttggactgatggacggatcggaggtagagagatgatgtactgtcaagaggggtgtcgacgaaatgaaacaagttcagagatatcgatatagctgaagcctgttggtccagccaggctgtatctcactggctgggctgtattttcgtggatacacttgtgtatctgagtgggtcgaggagtgagagaagagacggaacgggccgatagatggttggtgtactgatggaacgaaatgtcggcaggtaatcctttagactctgtttttcgggatcctcttttgatattgtcatcgtcctctcagtttcaaatcatacatctatcttatcactctttcgtatcaatcttagataagaaacagtgagaccttgtatgcatggaatccatcagccataaaatatgatgctgcacggtcgtagagcgcaacgcgctgtgggtgtttgccattttgtcttgattgtcttgcctgccagctgggccaaatcttaagtgacttagatggaccggtccactatattctttactttcactcgatctcctactcgccacacgccttccggatctagtccattagtttcgttccgggcaattggaatcgcgtagactcccaataaggggcacagtacgcctacgaactgatcaattgtggagtgcatctttgtgtcagttacgcgtctgaactgatttggagaacgaagaagagactttgagaaacaacagacctcgtccacctttttgggtcgttcagatgatatgactttgtggggtagcgtcggatgcctgactccagtatcagggtcgacgtttgggagctgagcaatatatatatatactcgacaagtaagattatgtctaataaacggaaggcaagcattaacagagaaagaaagcgatagatgaatgacatacagtacatctcacacactctcccaccaccaagatatcatctcctcctgattcccctgtcaaatggatcaattctaatcgtccccatttatcctcctcgaatgcgccttggatgtcatcgggctcggatccgtcgtcgagatcaacgacaatgtttggccgcagccgctgaatggcattgtttatcgaaaagtcgaattcattctcagttgagccgggtatgctaggagtgagatcagtgattgatcgagcgatcgaacgaagactttggagagagatcatgtggagtgggtatgtatctgcgaacgccttgtggtggaaagccaagtaagtccagctgtcagagcgggagcaacaaaaacgaattcatatcgaggcatgatcatcagaacgttaggattcaccgtggtactcttcgaatagcctaatcccgagctaggtgcttttttccctggacctctgacgtcccctgatttctgacatattctgacaggtcttccaaagaatttggaaagaatctcgtttgagggatcatctggaggaggtgatacccctgtgagtgtcaacgaccacaagttcagatcttgaaatctgatgacctgacccatgattgatcgtgacgatgtgcgcaaccaaacagaagccgtaacacaagtaaaaagttattagctacctcctcatcgtgcctccttctccacgcaaagcttgaataggtcctacgtttcccagtcccaaagatcatcctcagtaggctcgaggggtaggtcgaaagtttcgtggccagactcgaatgggacgtcgacaaccagtcgatcctgttcaattctacacgtgatgaggaccatctgagtatttgaatcaggttatagtcaaccatctgcctctcagtgatctggtatgataaagttcatgacggacggcggggaagtttctggcagtacaggccttcatcgttttaaagtcgactatcatccattgtctatcatactagttaacgtatcacaattcggttagctatggtaatgaataagaacaaacatatatagaatcttacactgagtccctcgagagtgtatgttgacgattccatagagatccctcggcagctcttcaagaagacggattcataagtattttgaaatccatttatccgagatctgatgcaacatacggaaaacacacttacctttattggataaacccatattgagcacaccctgatgccacttgccgagccagaaccacctgtcattcgactagggaaagagtattgtacgaagaaagagggtatacaactcgaatggtgaaggtatgccgacgacgagctcgtcggtctcaatgaggtgctaccggacagtcgaacaatcttcaatttcattttgccctctaccaccagcatcgtcatcagcggcagcgggctcgtcgttcttcgtttctaaactctctcaaggagtgttccaaaaggctcaatatgcccacaatagttcataccacagcggccaccatatcttcccagcataatcgccatcagcagcagcaacggcagcatcagaaccatcatcaaccacgcgcccggttctctagcccgtccaatacaaatgatctatggaatccccctagatcagatggatcagatgaagacgaatcctccggagtgaccgcccgtcctcaaccgggactctttcagactgtagaggaggagactgctcagtatggagaatctgatgggcaagaccacgcatcgttccgatcagttgatggagtgactgagcgactcaggaagagatcagaggatgaatcgtctaaccaaggctctttcgacgaggaaattcgaggacaaattcccgatgaatacgacgacgacgacgacgacgatgatgttggaggagatggagagaatagagtggaacttgtgcaaagtcagtctttctttcctagtctgctgcttcggccgaaccatgctgccatgagctgacgaaaggacgaaccttcgaacatgcacaaagttccttataggattattttaagaagataccttttggtacccctacttgctctaatttgctttggaggaaccatcgccttactcacatttgcttggttagtgttctttgttctgctctcttcattttggatttgcgaagaaattgtatcagccggctgagatttaaacctgatcctctctccaggccaccgcctcctgatggggagaacccatatcctcatcgtcccaagctcgctcacttcctcgttggtgtagccttctactcattagcgcatgtgtgtatactattctcttgagtgagcattgccttcctctttcgcagctcctaaactaaccttaccatgtcgcgtcattcagtctcttcgaatcccaattgcgaccatcttgtctcctcttcctttgtctgcgtcctctcttcaacggacttccaccgctttgcacactttcgtcctcgagatccttcgtcttgcttcaatctctatattccttcctcctctgcaagtctgggaatccaactctataccggaaaccaattcgttgactgaggtcaatacgtcagtctctgttttatcacataatcatttgctgccttatccgtctgtatgggaccagcggccagtgttcgcctcggccgcgtggttaggcctcggatgggccgcaggagaagtaaccgtcggaatctggcaagcgtttagtcagctgggattctatagaccggtcttgcctgatgtaggcggaggtatcgaattgggtcatggcccgaatgaaggagggtcacttggattggaaggaatagatgtccgacgagacatcatcgaggaggtagatgatgatgacgatgacgatgacgaagaaagtgaacagcagcgggaaagggaaagattggaagagggtgtttgggagcttatagcggttcagaagcgagaaggttcgtttctctcttgtcttttcctaccaccatgttgtctgacgtgaatgcgagactcgtgactttcatagaaatcgagtctcttctgggtgtccctctacccaacatacctgctatcatccttgctctttggaggatcgattcattgcttctcaacataggtatcaccctgtacgcccaaaacttttgattcaaccgtcttttctactctcttgctcttactttaaccctgaaattcaactcatcttcttactttccatctttcttttgatttcgccttggtacaccggcagcatcttctccgcgttgttttcgacccacagggaggacggatctgcgtggcatatcatcaagcacatgcttccccttttcaccgccgttgcaggtggtcatattgttctgagtttagtttgggtatcaggtattcctactctgggcggtgagtgaactccttccaagtcctggcttgcaagaggttttggcaaatacgaagagtatcgatcgttaatgtatttcctttccttctgtgtttcaacgggcttcggatgatcagcaccaacaacgacatatgcttctcttctggtcgccctggctatcttcttctggggtttgggaacctgggaggccttgatctgatacaatctcaaggttcaggaagcgaagaccatgattgcttggtagtcactctcctgaatgatctctgctaaatcatgtttgttttattagattagatattctatgacttttacgactatttccggatgtataaattgagaagcaagcaaacagggttcctagtctaatcctgtagcaaagttgaattgaatgagcaacccaagagttgctggaaagacataatgaaggcatagggtatatcatcattcctgagacctagataatgaagtcgtttcgatctcccaaggtcacacaaccacaacatcaatcgacccgctctccttttctgacaaagcatgtctgatcgtctcgagagcagcatccttctgtctttcggatcctacctcaatcctgacgccttctgcccaaggactcggtatctcaaagactttgaacaacttcaaccaatttatggcctccgtccatgaactgaaccaatctgacccgtctctcggtggttgtgttttgaaatcccagatcaatgatcggcctttgatcgagttgtttgactcttccaaagaatcgatagatgcaaccggaggtagtgtcctgaacagaaactggagttgtccgctcggagcaatcgaatctgggaaaagacctgcaagccgaacggttcgaagtctgttccatctgtcaacccctgctcctgtccggtcatcgacctcgaggtctccttgtgggcagccggcccattcgaaatgaacaggattcacagaaggaaacacatatgagaacagacggaaacgttcgggatgagacgatcttgtggtgtttctcaagtgaaaactggacagttgaaggggaggtaatgacgatagccgggtaggtattgaagacactggtcgatgaggggttcgacgaggggtaaacttgggtggggttgtgatggcgaggtgtcgggtattcgatagggagagaaaggggaatatccggtttgtcgactcgatgaagtctgtctaacaagaaacaaacagacaaagagtggaagtcgaagcagttataaagacatgaacagatggaaaaaaggatatgcgacatgcgtcggatgacgagtcgagaaagatcgataacgtaaacgagaatcaagcgaaccaatcaatcatctgttttaccagaaggctgctagccaaattttcaatatcagatatacagactaacctccacgaacaaagcatcaagggaatcccagtctgtgagctcgatctctccgtacagtagcggaccggccactcggaggacctcgaacgaaaccaagcaaagcgcgaggagtgttgaccgatcggcgaacgaaaagataagacagtacaactcccacggaagggaaaccgacttggtcggccgttgactgtaagtctagaagtttaaatatcgaacaggatttgagctgaatctctgaccagacggtgaacgaaagatcgaagaggatttatagaagctcatgatcaagcttacaactactgaggcttctgatctgccttctgcttcatctaagagcatttttgtcactttttgttcgtgcaatatacgcagttggagcggataatcagaacaagaggttcaacaatctgggtgcatctgttcccaaggaggatgcctagggagaaggtgatgatgttgaggtgagttgagttgaagacgcagatgattaaattggccacgtggtcttgcgatttttctcttctatttttctctacgcgttatttgcaacaattgattgatggtcgcaccaacaagataaacttgggcggagcaggctacagatttcgaggatacgaaaaatacggcgaaacatctcacgagagaaaccttctaatagaaccaaggacttctatgactggagtaagcgaaaggccacatgttgaatatgatatgactatagtgtaaaaagagatgacattggacagaaacaggaatgcatttcggacagagcccagagtttcaattgcgcttgagacccatgggatatcatcactgaacaatgataacgacgattagaaatcagctcaaaaggaaagcaaactctgcacctgttgagatccatttcgaagatttcgcacggcgacttgagtaacatcaggcttgttcatcgatcttcttcatgacgacacttagctaaagctacctgtgtttttgatcacgacgtcgccttttgctgcagttgggaacattcaccgctgctagtgtaaggatatctctcaacggttacttagccattcagggtcttctcccacgcaggggtttctcgcatacagcagtgaagccaaacaagatatgataaggaatgagtagaaatacatagagtcgagtcggagcttaagaagtaggggctgaaacatccgaataccatatatacagtctggaaaccataaaccaagattttcgtctccctctgtgccatacggatctattcttctgtcacatcaagtgccttgtgtccgtacgtatcatccagtcgactccggacgtattcacccgcgctgaatgacgggatgaatgagttgtacaaataagtaagcttcgattcgtctgctggacatattgggacttccgatgtccagcctcttagagcaaactcacaggatgggttcatatctagcaggtcgatcggcagagacacaggtgtggaatggctaacgagcaaaacatggaatatgagtatccggatgatcagatgacaagattaggtatattagggctcacctccagcacaacattgtaactggttgatgaggaacgaatgataatgaatccattgtcaacgcgcagccttggaagaacatctcgagtgagagacaagatagatcaacgtactctgtcccaaagaagaaggggatggagtaccgttctctacctgatcgattgatggctcggtgtcgagttgatacaaagatgtcatctattcaatccacaagaatacatcgcatagttgtatcagcggcaaagaaaaaaaaacataacacgttgagataaaacagaaagatagaacgaactagaccatcgagagagctgatcggcgatgctaagtcgttcacataatacatacgagctcagtctatttccaacctataagttcaacaacatacgtacttgatgacaaaggtgcctttgatgggaggtgcgtcgatccctgtttatcaaacgcgttggttagacaatgtgcagctattgctttctgcatcatcggatagaaagcacagagactcacactctccacttcggttgagtacttgtagcgcgccgacatccgtaccctgcctcaggatagtaaagcactcgtagtcggtatgagccccaattccttgaacttggccattgatatcaacatcgggagcctgagaaggataatgcagcagtcgcatgatcgccgctttttctttggtcttgagatagagccgcgataaggaagcagttaagcaaatatcacagcagtgagagatcagaaacagaaacgaaccttgtcgttaaaaaagtcttcaggaagtccgagagcgagggcgaatagagggaaaagtcggtagcctagatcgaggacttcatggctacgatagaattcaacatccgcttcgcatgaaaatcagcatttcgcccgacatgcttgattctcgagcgcaaaagaggatgcatccgattctcaagtagagacaaggacgctcacgaactagtacttcaagacatcacttctgaatccttcaagcgtttcatcggcaggccagatgttattactatggtggcctttatcgtccagcgtaggtataggtgcaggttcagagagcggctcgtaacctaggttgaatgcctcatgcctgtgtcaaagagccagtttcaaccaggatggcggatagtattagaatcaaactttgatgacttctgaataaatggtccattccacgtacaagtcgcctttattctcaggactgtaattcatccgatgataagttcctcatcagtcctctttttctcttcttctttaatggattgagaacgtactttgtgttctcttcgtagagtccttgataacctctaaagttattgctctgggagatatggagcttcatcttgtcttctttggacagatcttgaaagagacgcttagccgtatcgaaagtctgctgaacagtgctttcggacacagaatgatttttgactgtatggcatgaggtgattgatacgcggggttagtcttaatgtttgaataagttgcctgtgaaataagaccaaccatagaagaatccagcgacgaggcaagcttcacgaatcttctcgacaagctgatcatttgggagcgcaagatcgctgggtgatatcaaggacgatgttgaagagtgaatgtcagcaatcagtcgttccactacgcgatctaagttcaacgcggatgaaggaagacaagagaaaagtgattggtatgaccaacatgatgggaatatgatcaaactcctcggagtgcaacgtctcggcggtggagagcaaatctggagcggacataattgtgtatattctcgagagtgtgttgagaagatggatgaatggtaaggatgtatgtatatatatcaactatgtgatcgaaatggttataagaaaaataagaacagcatcttggttaagcttcctcgtgttcatgctattgacttgaagagagaaacgccgataagcatcaaaaccccggacaaatcggacggcgccgtagccagaagagaaggataagcggctactaaccgagatagacggcttagccggcctagccggccagattctgatccggcgtttttcgtaatcgtcgatatatggcttaagtaatcaggtcacgtggactaatagtttctcatttgccacaaatgcagttcttctcgaattacagatctcaactcaacatcttcatgacaaccacctagagtctgcgaagatcattgaattactgtcaagtcctttgaagaacagcagacatacgtcaggcctaggagcagacaaatttgtcaatggattctttcaagggatcaacagcagctgtggtctcaggtgtgaacgctccgccggaatcgtctgattctcaaccatccctgccacccactcgttttcttgctcatgattctaaccctaacatagtcgacatgtccgctcaatcggttctgcttgtcaacccatcgactgctgatcccactcttccggctagtggctctcctactgttgggacctctgtccaccagccagtcattgaccctatgaacaactctgaacggggtcctgcctctaccacatctaggtcaacgtcttctccccggcctgaagctgtgcaaatcgatgagatgtgtccttcttgtttaagcccgaacatccccctgccaccaggatatcagaagcgatctaaagagtttcgaaagaacgaggatattttgatatggatcagttgttcacattgttcgtttgaattgttatatacttgttctgcctactcagttgagtgcatgtgctgatcacgggcttgctggctacatctttaatttaatttcaaaaccgcatatttatcaatcaggcgaggattggtaccattggccctgtgttcggtctcggaatcagggtattccatcagcgctggaagaagataaaggagattggaaagctcaggtcgaaatgatagacaagtggtactgtccgaacccgatatggtatgttcttttcttcctgtctgtccatactctcctgcgcatcacaaagatttaacccctttttactttcgaccttctctcagctctggcccaacatccggccacattcctacattgaagcctcacccttctcgtcgagcctcaagccgtccgaagcctgtcgtggattataacgcgccttctccaccattgactcaatcctctcccgattggatttcgctctatcgggaattcgaagcccaaggtcggatcatgaccggagattacactgaaatgctcggaccggatgtcaaccttcagtggctcattcgagatggttgtgcgtctgggtggtatgaacggcacaatcaaggtgaagggccgtgggcaaagcctattgttgtcagagaggttcaaggtgctccagcaggagcaggtatcgagagtctcggaggcaagatgccgaacagatcattaaccgtagcagagatcgcagaactaaacggacgagatactaaggtcgaggtgatgaatgtcagcaatcagtcatctagcaagaacccaccgggtaaggagaagtctggatccgaagaacagaaggagagggagaaggggcatggaggttggacattaggggattggtcagactattttcagaaagataaggagacaagagggggcgaagtgttcaacgtaattagctacgaagtgtcagggaccaaggttggagatctgattacgccgcccaagatcgttaggtaggtatcaggtttctaattcgctggcaatctgttgtgtttctaaacatattggttctggtttgattgaacaatcgtcactatcccctttttttcgctttgatgattagggatctcgactggactacacgggtttggccgacatcagacgcaaagcacaagcctaaggttcagctctactgccttatgagccccgctggatccttcactgttcgtctctttcatccaccatcaatcttggacatgctagctcctatcaaatttactaaagcggactcccctctgggatatttctgtgtacattaggattggcatgtcgactttgctgccagtagtgtttattaccacgtgatgtctggccagaagatcttctacttgagtgagttcttgttctcacttcatccacctactttactaatcttgctgaatggagatgaccctatccagcttatgttgctctaatactaactcatctatcgccaaccttcagttcgtcccacgagcaagaatcttgacgcgtacactcgatggtctagttcagagaaccaggcaatcagttatctgggtgaccgagtgaaagagactgtgtggaaagtgactctaagtgcgggcgatacgatgtttatccctagtggatacatccatgcagttgtctgtttttttttcacattctgtacaagaaaaaaaaaggaaaaataactgatatctcctctttcttcctttgaattcatatattgttgttcgatttctgcagtatacacctgttgataccttggtctttggaggcaacttcttacattcatataatattcctatgcgtcagttcttcctctttattcgttcaatgactgttctagttcgtctgatcttgttttgttttgttttgttttgatggatgtagagcttaagctacaggacatcgaaatcgctaccgaagtaccgaagaaattcaggttccctcatttcaataagtacgtatcctctacatatttcatcaaagttatcatgtcgatcaatgccttacaaccccaaaggttatgttggcatgtcgccgagcattacagaagagaacttcaggctcgtcaaaagatcaaaacctcccgaaagacatctcatccgacaccaaatcttgctcctagttcacttaacgatagcgtatcgtatctggtcaccgagccattcactcctcggttactcgacaacctgtgttgcctctcggtgtatctcatgcgtcaggtccgaccaagagaacgagggttgaatgtggacagcgccgaaccagagtttccattcgataagattaaggatccaggagcggtagcgagagaattgaggtggagggttcggaaagcaatggacgacgaaagtgaggatgagaccgaagactacacggctattcctcagaaaagtatgaatagggattcgagcaaagaaaaccgcgactctgaagaggtgtcgtcgacaaaatcaaggaccccggcttctgcgcctacacctgttgagtccattggcggctcaggaaagaggagactctcattggaaacgaggatggatgagaccagtcttaaaaagcagaaggtagaaggagataaaacggtggacgttgtctccaaagagtatgtagatgctcaaaacactttgcttgtctgtcagataaatccaatgctgaccgtatgaggtcttgccgcccttgatttagttcatctccttgggacgcagatgaaatcagtcaacccatcatcagaactcgcacggtgactcttccccggccaggaggatcaaatgctcgaccagaacaagctctcgaattgtaccgatctgaatctcagatccgaacgagaaagcgtgcaatgcctgacggggggattgtagtagaatactcaggaacgacaaaagtagtggtcaagacgacgtgggctcctcctggaggtgaaggtgtaggtggaaaaggaaacgacagagctgtcttcagtcattcaaacccaatttacccgacgcaacaagcaaatccatccggttcttatctttctccccctctgaatgctccaaatccgtatataccacgaccgactcacccaacccaaccacagaggcctcaaccagttcagccggtcagatcacctatgccaagtacttctattgatagcacgccaactagtgggctacaacgtccaccttatcctgtacaagcccaaaccaacgcaatttcccctcttcctccccctttgcaacagcatcaacggttccccttacgacaagaacatcagcaaatacaccaacaacctcaacgacagcggccgatgtatccaaaccagcttcctgatggatatgctgcgccgtctttcaaccatccgatgaactctatacaacggccacctgctgctagttctgggatggtccttggtggcccgcgacctatctctttgaatggaactcaaatttctgttgggcaaactgacgggtcgcgactccaaccaccaccaccactaccagcaccatcgtctactctatctgatcttcactcgataccaaaccaacccttcccacatcctatccctcgttatcacgcaggtcttccgagccaaaaccaactgcagagacaaaccgtacggcctcctacagtaagatcggttcatccaccaaaaccgttcaattctgttcccctctcccagcaaacatctttgtcagaaaatttggtggcgaatccagcaatttcttcgccccttgtacatccagcaccaccggagtcgacactctcatcaagtcagagacgagagcctcctgtacctcctttccctgtactagagacaggggttacagcttctgtacctgtcaaaggggctgggcctgatgttgcgcagagttcgggtcttggtcatccgtcacctgtcgtactcgctgttgaaccagtcgccccgagtgcttcagccaagtctccgtccacccgtgctaaagctgtaaaagttgttcctatatccgattcagtgtcggcacctatgactcgatctgcacacgtgcaggcagctcaggtagcatcgccatctcctaagactcctactacggccaaggcgcctcaaagttcttctccccaagctcaaaaatcttctccggccatgacgatgagccttcggaaccatcctcctcctcctgtcgttccttccgttctcgcgcctacgactgaagctccccaagcgtcaaattcgacgttaaaggcaaagccaacagcgacgccaaagaaggttgtgcctcctctgaccaaatcgacgccgatggcaaccagacaacggtcgtccggaggacaacaaccagttacatccagcacccaatcgaccgaggggaaatccgtattgacttctgaggttgtaaacacatctggttctactacacctgctcctgtcacgacctcatcagagaacaagcgaacgacaagatcgagtggtgcaaagatgacaaatatggcgagttcttctccgatcaagacggggaaagtcgcggcagaggtttccacagctatggaagtagatgcagacgactcgctctctgagctttctgaagaaggaggatgaacaatattctatatgatatgaataactgtactcatcttatcgtgcatattgttaccaatctgactttgatgttcaaataaacgagtgttattcaatccgaaagaacctgcttacaatctctcacacgagcatcaatgaattctgggatctgagagacatagtggtctgtcgacaaggttgagctaactacgtcgattacgtaatcgaccaattataatcgcaatttcacttgattttcttctttctatctcaacagccatcacatttaagacggccatccagcctatcattcctctctcgttcctctcctcctcctctcttctataccctcacccctcaaagtaatggacgatgtctgccggatctgtgttaggtctcccgcaagcctcgagccttgatcggtcatccccgtcgagctcaacaagctcagcccttttgaacagatccttgaaatggaatccgtttcctctgtcggcatcggattcagtgtcgcccggtttgatgtcctcgaccaatgtagtcaagaaacgaggaaaaggtcgaccgccaggtagtaagaacctgccgaagccacttccgggcgcacctccacctcccaaaaagaagcgcgggcggcccaaaaaggtttgtgcgcttgctttattcaatgatttcggtcttctggcttcatagaatttattatctgacgacccttcctatttcgatacaatagtcggtccctttaggtccggacggtcagccgattgcctccccacctagacgagctcgtggccgacctcgtcgtgatccgagttcacttcaatctcctaaacgatcccgagttcgagcgcgaccgagtgtccctgtgctgtcacctgtggtagatgagtctggggcattcggcgtggatatgaatataaatacaaggataatgactgaggagatcgggcaaaaagaagtccggatgacatccgatggttcaaccgctggttggaactcagtcgatattcagatggcggtcaattctacaggaggcatgccaacatatgagcttgattcgcagacggtcaaggtcggtgagagtggaacaacgactggctctctctatcagcttgcaaatcaaccaaactctgaatccataccactcgctcaagtgagtttccttgctcagtatctttttccttttctggctccaaacccaactcatgcaagaccctccgcttgatacatctgtgcgcgcatatttttctgtagcccatcgactcgttcgaagcatttgagtttccagactttccattctcatttgattttccagcgttccttcaagaaatccaacagtaccgtcggattcaagatgatcatgaacggacgggtgacgtggaaggagagccgggtcattcccttgtctctccgcacaatccatcttcacatcccctctgttcttcatcctcttcgtcaacagtaccaccagcttcgctaccatctcctaatcctcttcctgcctcttctcatactcaatctcttccggagaatcagacccaacaagaacaagccgaacctacgataagaacacgacatagactttcacctgaaccgccgatgatgtcagagatcgaacctattcccttggcagattcgtttgcctttgatatgccggctttcttgctggagattcaacagtatcatcgagatcactttcaggtcaaggatgacgatgcaggagatggcgatgagaggtggtgatcgcttcgctacttctttctccgttgctttccttttttctttttcttctcttcttttttcttttgtgttttatacatatatattccctctctcctcctgtcactaggaatataggggaagatgacccatgtctgatttgaccgtttctgttgtatcgatgtctatcacccctgcctatgtctgcctctgcatgatgatctaggaaggtggtttctgtttcccttcttctttcttttctttttattcttcaaatttctcattgagcgactgtagacgactccttctttgtgtatcttttcctctcccttcctcgttttccttagatactttatagtttgctttctcttgcaggaaaggatatgaatgatgaaaacaactgagggagactgagagaaacattcacatgttcacgcaaaccaagggcacaagaatgagagaaagaaacgatatatgtgtagaacgagcagaaaggaagaaaaacagggcccaagacaagacaagtgaagagaggaagaacgagaaacgggggaagcaggaaagtacggtttggaaggcgagtaggagtaaggggatcagaatagaagagtagaatgtagaagacgtatcatgccgctgaggtccgattaacatcagtcgaccggacgacaaatgcagacgatttttagctgaagagatctagatgctgtcagcggaaggggagatgatggggagagagagagataggatataaaacaaaccagaatgtgaagggagggaaaagggtaagagatagagagattaagaaacagaaaagggaaactaccaagtgaaagcctcttcgtggtagacgatctggtgagcagtcaccccaccgcccaaagactgcttgacggcctcccgcgaggcatcgcacagcgccgtcggcccgcaggtcgacacagcgatccgctcgctcgcaaacggaagcagccgctccacatgagccgcaacagacggtcggccggcagtagggatcgtccggatcgcaggacccagatgggagaacgaccggtcgatcgcagccagcgcctcctcggccggcaccatgcccgacgacttctccacatccaccgactcagacgcagccgagccggtgtagtgcacatggaactcgacaaagccggcaggcatcgacccaaacagcggctccagccggttcaagtacgggatcaccgcccggatcgagtccaggtcgcggatcgaccagacgacgacgacccgcttgacggcgagcgtgcccttgccgagacactttgccaggtccgccagatgggccacgttcgccgacacgccagacccgccagacacaagcagcacggagccgtagtgctcgagctggacagagtgtccgtacgggccctcgacaagaagcttgacccgcttggtggacacgccctggaccgttccgtcctcggcagacgggtcgttcgcaagcgacctcgagagcgactgggtgaagccagagtacggcttgacgagcagctcgaacgccgcaggcgagtcaaggtccgagctgtcgaactcgtggtccagtgtggagtgggtcgaggcagacgacttcttctccctgtcagactcctggtcagagcttgaggcggccgacgaccgggcgccagactcgagaggaagcgccatccccatcggccaggtgatcgtgaacggatgggcctgggtcaccttccagtcggccgaccggacaaacacatacgttcccggcccgcc

SEQ ID NO: 3017 - DNA, 34793 bp, Xanthophyllomyces dendrorhous
ggccaccggacggaaggcacgagccggagccggatgaagctgccttcgccgacgaggtagccttcggcggcaaacgcgcccgtcttgggcttggtcgaccgcgacgtccggaagagggcgggcatgttgaggacgacgatgcggacccatcggaagaggtggtccgaggcccagaagccgacggcggcgtagatccatcgaaggagttcagtctctcggcgcagcaaggcatggtagtaacatccgacgacctgtgggtgtcaatgtgagtaggaaagggaaggtacagggacgaagagagatgtaactgtcagcaaaaggtctataggatttccgagggacgagcacactggagtacacgtgtgcaaagagtgtgaaggggtgcgatagaaagagcgacgaacccagaggagagcaccagtaacgtgtccaattaagaaaagctgaagaagaaatcgaaaaagagtgaaagtgaatgttggacgtcagcagaggcttggttgaagaactgtagagcaagagaaggctccgatgcgagacagaacatacctcgtagcagagctctcggattcgccgctgactgcagaagaacaggaggagacctccaaagatggcctgatatgaaaagacagagaggtcagattggagcgtgtagaaagagggaacagaaagagaaagggggtaagaggaacatacgacaaaaccccaattccagtaagccctcttgaacattgtgggtagctggtttgaccaaccctccatgagcagccagcctatgattggatttgatcaaggaatattggtcagtcacacgggaaagtagagcagccggttcaagtaaaagcaagaaacgtacagactgtatggacaaagccatgcatgaagcacatcctagacacccatcggtggtagatctggatggtcgagtagcttgcgccggtcatggccgtcaggatgttgtttctgcccgcaagtgcaatggcgagcggggtgagtccgaaggcgaggtaggcgcatcgatcggcggcgactcggaagtactggcttcgggagtatccgacggcgatgtagctgtgattgtataagttggaaagtgaaggggagtgataaagccagggtgagagaggtcaaagaaagaacgaagacaagaacgagaaagcgggtgagcaggaaagcgagacagaatgagtcaatcaataagcagagtgaaggaacgaacgtcaagttggggtatacagtgggttgatagaacaccatcaggacattgaaggtgaccaagatggtaataaaaattccgtgaagtctagaaagggtcaaacaaaagtgacgatgagggtgagaaatttatcatttcaggccgaaaagaggaccaaaagcacggaggagaggaatgcagtcaaggtagacataccgggtcgggatctgcacagacgtccaccttccaagcgcacctttcgccccgatgaacgacaccggctgagacgtcttcttgccgaacagagacgacaggtacaggtgcttcacgatcgccgtctggacccgctggacgggggcggggagcttgccggtgacccactgaccgatgaagtgtcggagggtggcgacgatgaagatgatggcaacacagccgaaattggcgtaactggaggtaggggagtaaagggtagagggaaggaaacaaggttcacatcagagacagcaagaggggagagagagatgaaagaataaagcagtagagggaacctacttgatgaacatcggaagcgcaaacgagctccacagtcggatgatcgaggactggacatcacgtcgaggacaagattagtaaaatgcaaagcgcaagaccgggcaagtgaccgagtaaatggttcagacgacccacctgaagataagcgagctgaagctcgggagggtagctcgcctgaagccaatgaaaggaaggaaaaggaaagagaagagcgctgtgtgagcatagtaaacgacgatgaacgagactggaaagatacattggcacgtacaacctgagaggtgactctgctgctaataccatactcggagggcagtttcaatgcctcttctatggtccagtaaccccaagccatgttgaaagagtgtaagaacgaggaggggggaaagcgaggggagaggagaggattcgagaaggtgtagaaaagggtcagtaagaaagagccccgggtgaatcagcggactagactccttgttgggacgatgagaattgagatgatgaacagagaggaagagaggaagggtgaaacgagctaagatggaaagagagaatggtctttaagactcaacgggttagtttcccatcaagatctccgtttggtctctttttttcgtttttttctctcgctctccttctgctttgtccgtgaatcctcgtcgttttgtcagtcttctctctgtccctatctctaccgtctcatcacgcaagcaattaaaatgacaacaaagaagaaacaggaatgggctagaattcaaagcattcacggaaatagatcggtggcgggacagcatcagcagggagaacgacgttggttggttagtccatctagtcagcttgtcaatcgacgaatgagaaaggtcgaggtcgataaaggaaagcaaacaggaaggaacagaacgaaaaggagaaggaagaaaatactagtcggggcaacataacagagcacaccagcggtccggagctcacagaatcgaccgtccagccggagccgctttgcatattatgccgacgtcaacggtgagttcgggctaaaagggcaagatcaacaaagcccggacaaggacatgttgctataaatacgtacggagcctttaaaaccacgatatctgattatcgttcatcatgcccgaccgccctgattaccaaaagaatccgttcaccgacggaaacggtcgatcttgtttatcagattgttcaatctgattcgtccgttgttttttcactctcgttcctctctttattggtttcccttgtgttgtctctacatctgtagtattccttatgggattggtaccgcccgtttgcctccttcacaatctttcagcctaaccgagacacgataggctcgctgaacagacgacagaacaatcaatcaatcaatcaatcaatcaaattttctctttctcttctctctacgcgttcagctggcttgactcgtgcatgcatcatgataaatcttctttgctgatcttcgattgggaatgattatctgattggtcgaaccggcccagtgctgattctttcgacctattggttctcctacacaccaattttcacccgtcgccccacgcaaccacatggctgattcaagccatgtttggcgggtcgtattcaactttctttttagaaatgttctcctagatccatgctcgatcgatatccggacggaagggagaaggaaagaagatgatgaacaaagagaaatgaaaggaaaaaaaatcgtttttttttctctctctcacagcgttgacgcttaccagaatcgcgcacgcttccttcttcctcctgaaccgcccgtgtttgtcatcgtcttctttttcacatcgaaaccgctcctggttggtcgcttagttggataggatagaaaagtaggtggagggagagaacactcgaaagatgatttattattcactcctcctttccacttctctcgaaagtctcttctgtctttcttctttcttttggtcctcttctttccctctcttctcaacaactcttctctttcttttcatacagctcgtcaggcagatcgtcgtgatcttcatcaactctttctcctccttcctgtctcacaactctcgtccaaaaaagaatgcgctctgttcagaccgtttcgtgtgttgccgtgctgtcaagtgtagccaccgcatggaaccctttggagtggcaaaagtagattacccctgcaatcttcagaagcaacttttggttcccaattgactgatggccgctcctgcttgtttcctcttgctatcatttctttctttctcaagatatgccaactcagtgctctcttcagtcgcacaaattgacaccatgtctaccacggcatgggcttactggtccgttgatctcgctcttcatcgtctatttctatcttctgctctgatcacaatcttggctaatcccttcaccttatctccctgaacagggctcagaccgcggatcatgctcttattccgctgttcaaggagatcgaaaaggcaggcgccaactacaccatcgccgttcccaccatcgccggcttccgcacgttcaccacctccaaaggcgtcaacacctccgaccttgccacgctcaactcgaaaggatggaagtctacgtgggcagatgcctacccgtaccactgtgggtgctgtcttcttcttcttcttcctctgctctccctgttctctttctcctctctttctcctcctcttcgctctcgcgtgtcgccgcgctcccttgctgatcaaagcatgcgctcgttcttcgcttgccttcttcccagtcctcaaatcgacagtcaagacaacagccgtcaagtccaaccagaccatcatcctcgactcctacaagacgtcgcctgcgggcgactggccgctgcagatggtgtactacatggacggcaacatcaaagccaaggacgtctctgccgcgtcgacaagctcgtcttcttccaactctaccacctccacttccggccacggttctagttcttctaactctactacatccgcctctggccatggctctagctcctccaactccaccactgtcgtcgcatcctctaccagtacggctaccgattccgctgcctcggctgcaacttccactaccactcgtactcacaaccacaaacgagctcgtggtggtaaaggaacaaccacctcttctgttgacatgagcggtatcttcaacggaaccttcggtgactcgttctgtcagtcgtttactcctttcccttgttgcatcttttgccatatggcgtccgcgtcagtcgcccgctgacactacttctttctcgctctctactcgctctctccttcttcttctccctcctcctcttcctcctcttcctcctcttcctcctccagacggacagtacaacgtcaccatccctgacacgaccgtcgggacgttcgggatcgcccaggccgtgagcggatgggtcgtgagtctgctctttacgctttcctctgctgcgctttcctctttgctctttgttctttgcgctttccttttcctccttgctcgtgagcctgcttctgagcatgtctgtctttcactttttcctttcttctcccttctccacgccttctgtgtgctcctgtgtgctcctgtgtgctcctgtgtgctcctgtgtgctcctgtgtgctcctgtgtgctcctgtgtgctcctgttcttgccccactcagaacgagcccaagtggctgaaggacacactgtcggacctctcgatcaactacacctccctcgtcgccctctacccgtcgttcgccaacctgtcgacctcccggtacaccctgttccttccgccgtcgagctcgatcccgacgtattccggcgcggcgttcgagtcgttcgtcggcaagcacctcgtcaagagcctggcctactcgcccatgtacggctctggcggagcgaacctgaccgcgcaggacggctcgacgatcgcatggacggacggcggcgtgaacggcgcaacggtgctccaccgggatgtcttgacgaacgcgatggtgctccaggttcgttttctctctttccctctcttctcttctcttcttcttgcttctgctgccgccgctgctgctgctgcttctctctatccaaggctgaccccagcgctttccctccttcgttcgctttttttctgcgcctctactctctaccttctacgctctagctcatcgaccagccgttcaccaactagtcgaccgatccgagaacgacaagaagagggacaggagcagggatacggagagagcagggcgagaggtgtgtggaggggggtgtgaacgcgtgtgttgacgggcatgtgatgggcggagaggggtggagaggaaagacgagtcgataaaagaagtccacatgtacatgcgcgagtgagaacgttcttcgaagaagatatcctcccgagagcacacccacactgtctcatccctatccctatccctatccctatgctctatttcgcttctcgcctttcgttctagtcttcatttcatctttcatccttgttttcagtcttccatcttagtctacacgctgcttgtttcttgggctttcttctcactaatatgtatgtttcctcatcctgccttccgtcgtctgctttctctccctgtccctctctctttctcttccatccccctgttctcgagatcaagtacactctcacactcacacatacgacataagagtaacgtagcatcgattagggtcatagaaaatacagtgtacaggccctcccccgtagtatcctcgtccatcgcaagccgtcagcgcgaatcagaccagagaacgtctgacgagaaacctggcttccgactttcagagagaaatggtgatgacatcaggagagggagtttaatatttgaggataatgtacaacgcgtggatgattcctggatttccgttgatcagaagggtgatgatgatttgaagatctcgaggtcagtatttgtgagatggtaggtaagaatgcatggaggaagaggacaaaccagggatgtaaccaaggatggtcaacaagacgttgatccagaagtcggctgtaagaacaagttgtgtgaagaaaaaggtcagtccagacttttcgccaagatggaagggtagggttggatggacgggaaggaaaggtaggaagatgaacgaaccggcacatcctcgctcactagaaccgtttgcatcgtcacaaagaaaaagaatgcatccaaaggttttgttcggtcccaagaacacacaagaagatccgaagggaatgaagggtaaaaatagaacatcaagaaaaagagtggtcagcggataacgtcccttgttcctcagtgcccattctctctcctttcgtcattcttgtgcctctaggcttgacgaaagatggatggatgggttaggtagaacgattgaaaaggtagaaacgcacaggaagacgccaagaggaggaaggaagatggccaagatgatcttgaggatatcggagcaggtgactggcctttttttttcgaacgtgaggaagatgaaggcaagaagcggcagagccgacggcgagaaaccgaggaatcagagatagctcgaagaggaacgagacggctaacaagaacgacgactcacatgttggaaggactgtttgttttctaaaagaagggcgaaggagagattatagttgatgagatgatgttggaagggaaagagaaagaaaagaattcagtagaacgaaaagaaagagaagtttttaaagagtcggtgtgtatgcgtgcgtgtgtgggaatgtatgtgtctctcgcttgcggtgacatcaccgcccagatgtgtctttacgtttcccgcagtcaagttctcagtcatacctcataatcaaacactaacgcttccggctgccgtgtgctcagcagcgagaatagttccgagtcccggaaacagtcatccgggttctctctcttcacatacaaagtaagaagagattaggtagagtgaacacacgcctgcatcccgtcgagatgaccctgcggatataaaggggcatggatcgtcgattacctgtatatccaaaacaactctgctgtgtctgctcatggtgaaagcctaagtggtccaataacggcaaacctagttttcttcggcgcttacttgccggcacgtttgatgacttcatcggtcattttggccgttagtcggaggacagatcgactagagattttggttgatagacagaatgatgtttgctccgtaaatgtctcacactcttggcaatgcttattgttggtcaagagggaaaaaaaaggaaaagatgatatagttgtagcggcaaggaaagatatgatggtttatgcaatctatgtagagaagagatattgaaggaaacaacagattactcgcaagacagatcctaccaacgttcgagacgagcgatagtgatcaaagggtaactaaggatacataaaaaaggggggatggggcggaggtacgaaacaaaaatgggacggttcgtgtgatgatagaaagaaaaacacgaaacgaacgaccactgtttaaagaccttcgaaaagagattcgggctcaagaccctggaacgagatcttgtagaccttttcgaacaaggggtagccatcgagtcggcctctggcctcaaggaattggtagatctcctcggaagtgatggttccctggagcttctgtccgtcgagaagctcctcctcgagctcagggaaagtcttaccagacttgacgaaagcctcggcgcactttcggtttcgtcctccgaacgaggtggtgatctgaaagagatgatcagaagttaacggtttagtatgtgtaaatgttgaaacaaggatccgacaagatatgagtgctcaccagatcagccacaccggcagagtggtgagaaaaggtggaaggtgaagcgtcagggaagaattccaaagtgaaagaggacatctccagaagaccaattcgaaggatagcagctgccaaaagcggacgacggatacagatcaatacaaaaatctacgaattagagaccgacagaggaacttacccttagtgtttccacccatgccaagcccgtcaacgaaaccggcggccatggcgacgatgttcttgagagctccagagagagacactccagagacatcctcgatggcgtgaacacggaacatgggggtatcaaacacggcgtgccaggcggcagcatcctgctgagcgggcgtaccgatggtggtctcacagaactgggagttggcaacctcgagagcgatgttggcccctccgagagctgaacaaggaaggccgagcttctcttcgatcaaccaggggtaggtgaaaatatcgggtccgtggacttcgatacccttaatggcagagatggctcgagccttggggtgaagaactccgggcttgctgagctcagctaagacctggaaagaacgatcagggtgatggatggtggtgagcgttgaatgagatagctaggtcggtgttaagaaacacacttacaggaggcaagaactgatgaggaacgcagaaaatgatgagcgtagcatccttgacgacatcggcgagctcgggaacggcgacgaggttctcgggcaaagagactccgggaaggtatcgtgcgttggtgtgctccttgttcatctgttcggtgagctttcctcctccttcgacctaagaggccgaggagaggagaagaaggggatagagaagggtaaggatcttgattaggatccaaaaaaaggcagatacaggcagaaaagaagcagaaaactgacctccttctctcggacccacatcctgacctccttgtcgaatccctccttctcggccgtgttcatggcggcaattctggccaaagcagttgcccaagaaccagaaccgacacaggcgaccttatcgaacgagccaggctctcgctggggagccggggtggccgctccgctaaggctgagagcttccatcttgggaaggttggcggaggagcctcgtctggagccaggggcggatccagatcgggatccgacggaagatcctcgtctgagcttgacggtcggcgtgctgtcgatctttgtgtcttcagttagggacgagatgccctggagaccggagagcgcgttattgggcagatggctcggcctcgtcatcggcgacggaggtcgggaagaggcctgaggataagtgtatgcgtgtattcagaaacatgtcagtctggcgttctctatggacttgctgatcggatcaagattgtagacaaattgagagaaaagaggaagaagaagaagaagaaagagaaagaaagaagaaagagaccaggaatcaaggttaaaaaaaattcaatctcacaggagtagacatgggcgagggaagggttgacatggtgaaacccttctctgtcttttgctcggttcgatcggacatgatggatgactatgtggaagtgagagtatggatatgggtgtgagtgtgagtgtgatagattaaagcaagtggctgataggaagtaagaaggagacagagatagagatgagggttgaaagaaaagggacaagaagaaaaaagagggagaaaggaaagacagggcgcaaggtacagaaacaagggggcgaataaagagagatggatctccccctcgactagctaaccctagtacgggcgagacggcgagagagggagagagaaaaaattaatgctgagaaaaacgcccacgtcagagaacgtcccaaagggaagtgggaaaagtggccccggtttaattgttttggttttttttcggtttttttttttcagtctcgatgttatcgtcattactctggctgctcaggtccaagaccggagtaacccttggattaaccagcagagacaacgttcaggagaaaagctaacgacagccctcagaggtgaggcgcgaggcgcaaggcggagaaagaaactcgttaggctcattcccatcatgcaggatggacaagacattttccttccatgtgcctggtgcattctatttgccttgcctccggcgcgaaaacatcacctccctcctacccctttgctgtctgatggggctgataagtgggggagaggcagggcgtgtggtgtgaatgtgtgtaccttcttggtttgatgacgtcaagtgatctacttaaatgcggggcaaagtgactgtggagtgaatgatcatgcccctttttttactatcattttgttttattttattccatctcccttcttttccctagttttttcaccctttttttcccctcaagcgtaatgatgaatggtaattgatcgatctgtgtgtctgtctctgtgtgtctgtatggagtgtcattttcccccacagcccggtcattcatcgtctcacccacgcccacacacttccttacttgacctttccccggccgcccggccccctcccctttttttttttctctattcctgccctcgccctatcgcctgtcggatctcttctggctcattccaccaagagtacctttttttttccttcttttttttttcttcccccagcacatacataatttccagccctctcgttctttcctttctcctttcttccaccatcccatctctccttccttccatcaactttctttaagagatagaccaggacttgactcattctttaacatccacacatccagtaatcttttatacacatcgcaatgtccgagaccatcaccatctcccccaaggcctgtcttttcgacatggacggtaccctcatcgattcttcccctgccgtcgtggtggcttgggagaccatgaaggagacctaccctttccttgtgagtccgctcgtctttgtgtcgcccttgacaccgttcctagcttccgtttcctttctaacgaatgaatcccttttcggtcatataggatcttgatcacatcctcaagtctgcccacggataccgaacggtcgacgccttgcgaaagtggtgcctgatcgacgatcaggagctcctcgcgaaggaggtcgtccgattcgaggttgccattcttgaggctgccaaggccagaagtgcctctggagctgacggtatcgtttccttgcccggagtcaaggacctcctccgacagatcggagagggtgccgaagaggctcgagatggtttcgagggttgggccatctgcacttcttgtaagtagacttgtcctcttttcctgggttttctttttctctttgcgtcttgcccggttatctacgagtatgtctgacattctttcaaattctcttcctccttctcttagccactcacttctacgcctcccaggccatccctaccgccggtctccctatgcccaagatcttcatcaccgccgagtctgtgaccaaggtatgtgtgattttctgctctgcgcgcatatagcctttagttttagtcattgaacatcatccctgccctgtcttgttcatcacagggaaagcctgcccctgacccttaccttctcggagccaagcgaaacaacgctgagcccaaccagtgtgtcgtgtttgaggatgccccgaccggtatccgatccggaaaggctgccggttgcgtcgtccttgccacctgcacttcccacaccagggagtccctcgagaaggagcaccccgactttttggttgaggatctctcccacgtccaggctaaatgggttgacggtgagctccacttgaccatcgagcagccgaccgaccgagcctccccggctcccacccccttggctactccttcggtgtcccgaagcggttcccaggagaacctctctgagtttgccaaggccgctaagaccggacggacccccgttggtactcctgctgccgatatcaagggagccctccgaggaatgtctggcttctaatgggagcagtcgaagaacgaaaaaggaactcgaccgttttgtttcctctctcccatcgatcgtgtacccctttgttttattcttgttcaatttttcttcacttctcaatccctctgttgtttgatgaggtagagcatctctttcctgttacgtgaccatgtatctctagatatccattttgcatagactactctcgaggttccgtccctctgcattcaatgttctttttcacctcctctcaacctctcgtgcgcccgactagtgacattcttgcactcaaacgtgtcgactgaaaaaaccgttagggaaaacgctccagcatgaagagacagaaaggagaaacacacggtcactcgggagagcggtaaaggcaacacgcgagatcgagttcctccgacgctgcaaaagtccctgcgtcatctgttctttcctccatcagccacggatcgtttcttttgcctccttataccggtcacttcctcttaccactgttctaactttggcctagccctctccgtttttcatctgtcacctatcgatctcgtattcgattccatcagcacatttggtagagacaaaacgacccttatcgataacgcaaaccatgtcaccttcatcctcggaaaccccatcgttcccaaacagagaggctcgaaagctgtgttgggcagcaagagacgagtattatagctgcctcgattcgaagggggctgtcgctcctggctcggagggcaaggcttgcgggaaggagaaagatgcgttcgaagggagttgtgtaagaagctgggtgagtttctcttttctctcttttcttttcttttctcgttgtctcctttctttcccttgcctttcttctctttgtctttccttctccttcttctcttctctcttcgtctttatcctatattgaaaccatcggagagcaagggaaagttgatcgatcgattgagcaaagcagaaaagatcggtattctcctctctcgatgagaatgatctcccgacggagaatttcacattcccctttctacacacccacaacccatgatatatagtccagaggacagagtggcacgactcgattgactcaaggaccatcacactgacgaacgcatcactttctgttctatcatctttcacttggcttcttacctctcaccggttctgaacccggaacgcaaacgaacccccttcgttctctgaccctccgattcccactcgatatcttcatcctccccttcaccccatccccgtgttccgcaaacgaacattctcagatcgactacttcaacaaaagaagagtactggaagcaggcctccgagctcgtctactcgaggatcaagcaaaagggatcgatgtctctggacttagatacggtcctgacgatccgaaaaagaacttttccagcagaggttaaaattgcctgtcaggcgaaacgccaatgccaacggcgaaagaggacgggaggagaagggtgtatatatgtgtgatcatgaaatgcgatcgggcgggtgtatattgacagacgggccggcaacgagtttgaatgtgttttcacgtgtataacaggtgcacatctttccagccaagtggtaaatgaaaagaaagtagaagaagaacaaggagagaagacaatctgcatttgtgggatcgtacaccatctatgaacgacaggaggaagagaaggaaacaacaagagtataagccgtgttaggaaaatattctatcggtaagccagattttcatctctgcgatacgctaactacagctcctatggcttggcctgcttcgggtttttgcccagtaactctgctacaccggaattagcgagtagaggtgcccatttgggttcgatgtaaatcgcgctgttaaacaacagaaaagttgaatttccatattagtgatacgttccgcatacgtgaataataagaaagaaagagaaaacgaagaaggaaggatagaaagaagaaaagacacctacgtagcatccgccaagagctctccttcaagactcttcatctctgcggacacgaccaccttccggcctttaagttcttgaagcttcgtccggatgacaacgaattggttcgctcgagtgggtgctcggtagttgatattcaggttagccgtgactccgatctttgtcggcaagttcaaaagagcctatatgggacaagaagcaaagaatgaacaataagtgtgagtgaatggactggcaagaaatgcccgcagagagagagagagaggcaaagacatacgtttctcccggttgcctcatccaacacgacaccaaccatacctccgtgtacaatcccgtcgtgtccgcacaagcttcgaccaagatgaagcacaatcaccgcctctgactcgtcctctttggcaaacaccaacgggggaacggccagccgaccaggaccccggagcgtgcctgccgtaagggaatgatgaatcttggcaggatccatggtcgcgtatggtcctgttcatcacagaaagtcgcagcggaagccacaggatcatcagctcatgtctactgagctcaagagagaagtgaaatagcgcaagtgagggacaaacggcaagtgtaccatccttccttgacggcgtactctttgacgataggaagcgactttaaggttacctcgatctcttcagtgtgctcctttccttcttcagaatgcaagtgcggacctgtgatcatccggtagtatgcgtattccactcaatcatcagttgctgtgatctttcattgagcggaagaagaatcaagaagaaaaggaaacttgactgactggcaggagccgaacggggagagataaaggtagctaggtcgggagggtagagtgctcctaaggtgtagacagagatggcgaatgtgccgaatagaagtgtctttgctgcacatacgaagcattcggttagtccttggtgtacaaatccgactcgatggacaaagaccaagcaaacagacagagaaacgaaccaagcgcgtcgaaagccttctttccacccgaaggccgatgatgcgtcctgtgggtttcatgtccatgatgagcgccagatggagtccggtgggtggaagtgaacctgaagctgtgaggactcagcctgggagtaacggatgacctgatcgttctggataaagactgcatgagctcgataggatagagacaacacagaagcgagggagtagatggaatggatggctgaggagaaacgcggatgggcgggaagtcagagtaaccggaagccggcggtaattcggagtcagggcaactggccctgaaccctgaaccttgggcctggcagtgtgcctgagcttaaccctaaccatccgttcggccaactcctaggcttcatcctttcttttttcttgttcttttttttgctctccctgcttgaaatctttcagttcatacaatcctatccttcatcgcaatgtccaagccagtccagtttgtcatcggtcagtctctcagtcggatctcttaccaagactaagcttctgctgacagatccttcttttcgtgatcactgctctgaacagagcaccttgaggaggacgatgcagagtccaagaacgtccctgcttgggtcgaggtaaatgattagcataggatgtagcatatgatgatcacgaagctgatctctttgaaaactcatcgtacatgtcgtcaatgaaaagctcgagtacagggtaaggcagacccggcgctgagtcttgttatctcagctgtagtcagttactgatgtactatgtatctatcgaaacctctcagcacatgctccaactctctcccgccgatgctaccgtccacttcacctctctctcttctacgtcgtccgctcttctcttgtccactctagcctcgccatcatcctcttcttcatccagctctccggcaagacctcaggcgaacgccgaggctcatactcaaggcattctcgagctgatgaaggagcgaaacatcccgttggagagggtctgccttctggaccccaaggccgagaaggtaattggaacgtctgactgggagcatgacggatctggagagtttgattggttcttgtttggaggcatcctcggtaggttccttgagtctctctctctctctttttctatatccgacacggcataccaagttcgagtatctttagatggtcccgaatcgaaagaactgatttaaattccgacgctatacgcgtcaacttttctctccaggggacgacccaccgttggatcgaacttctgttagtttcttctcttcataattcattggtttaggtaaactatgcttactcatccgtactatgcactctgtaatagatccttcgaaagatgggcttcccttcccgacatcttggccctgtgcaaatgaccaccgataccgcgcttggagcgaccaagctcgtggtcgttgataagagtgagtatgctgtgattgagaagacgcgctcagtcctgacaaactttgtttcactacttttggattctttgcgtatcacagttcctttggacaagattgaatataacgagtttcctaccatctcttttagcaagtccgagtctgtggaaatgcccttccgtatgtcccttccgatgtcgagcaacaacccttggtcgagtttcatcgcgtcgttacgagccaagctaacgtgccacatctattctcatctttgtcctgctgtctggccgataacttgctcgtctaggatacatcaaagaccagaacggagatccaatcctgccggaaggaatgaaggagcatcttcgaaaagatctggacagagcgttcgagttttagattcagatgaccatgagaacttttctgatgctaccacatccccgaacaccagtcctcaagacccatgtctggcgagcgcaagcatgtcaaagcaagaacagtctgcccagagagaagagtgttgcaagcgagctgaaaaggaagaaagaactgccacgaaggctgtggttacgatgttacacggccatggttacaaccccccctattctccctgtgcaagatgggttttttttttacttctcgtttcctcctctgcacacgcgctcgcatctctcgcttccatttgttctccatcaactctcctggtaagtctcaagctttgttctttcgtacgaggcgagcaccgggctcggaacgctgggtgtttcgtggtggatgtggcgtgaagaaagaccgatgggaacgaaagggatggcaggtcgaacacgtggatcggatgaaggtcaagagggatcatttttcccttccttctcctctcctcttcatcggagagtgccttcctggtcggagcgtagagcctccgatgtggattgatccatgcttggttccggacaacaagcttgagcaagccgttcttgacttgctgggaaggaaaacgatcgagagaacgaagaacaacacatttcaagagagaaaaaaagccctacgtcttccctttcccctcgttttctctcttctccttctcttccttcgttcgaccttctcgcatcgagtgccgttcgatgagtgattctctctcacaataaaaacatcaacctcattcatcctgttcccttcctgtccccttcccagtctcgttaccacatccttcctgcgccctcccacacgtcggatcaccttcctcttccctacccaagccttcctaagagaatcaagagaacctccgagaacaaaaaaaaaagtctacgacaagtactaaccttggatcccctccctccgtacctcgtcgtcttcaactctacgtccgatctcatcgccttgtcctcctgatcaatctacacaacctcaactccacgccctaccaaatcaataaatatggccgacactaccaaccccgcttcgcctcctgctgctgccgctgctgctaccaacaacaaaaggcctttctctgctgagcctgaggattcgactcataacaagaaagccaacattcagggtgaagaagacgatatcaccgcggacgacgtcaagatcgaacagcccgtagcgtccactcaagccaccgagcccaaagccgaagagacgcctgctcctaaaaagatggaaggagaagattcaaagatgcaaggggtggaggatgtcaagccgtacgtgtcctgtttgcttaccttgtactcttgatcccatagcgtcagggatctcatccagagtcgatgtcgatcgcgtctgacgtacaatgtttggttctacgtccacttttttatctttcaacacgcgcctctacctcatcagtgctggcgaagcctccacttcgacccttcctcctgccgctccctcagcccccccagcgtatgtgtttcaatcatctcggttctgagatcgctttcttcctcatcgtgttcttaattcttatttgtccatcatctcttcctttatccttctctcgaatcgacagtgccgatgctgccagtcagcaaattcagatgaggtgcttgattgttacccaggatgctagtgtcatcatcggtaagggcggtcgacacgtcaacgagatcagggttcgttctttctcaagatcttgtgtgtggtcacatatctgtggatgaaggtagtattgtgtaatcgaacagccgctcatcgtgtccgcaatcatctgttttcgttcgtgtccaatcgtggtgtatgctttcaactggttacctcttcgatcatctttgggttgttgttgccgtcatgaatatgcattgaataggagcgatctggagctcgagtgacagtttccgagtccattcctggtaaccccgagcgaatcctgcacgttagcggtcctctggatgctgttagcaaagtgcgtctgtttgcttaaggtttctcttttttgagtcgtaagtagctgacaaagagccgaacgcgtcgttgttactctttgcaggctttcggattgatcgttcgacgaattaatgatgagcctttcgatgtggcctccgtgcccggatcgagagctgtcaccatcaagttcatcattcctaactctaggatgggtactgtgtgcgtcttgacgagccatcttttatcgttgtgaaatccatcgcctctcggctaacattagcatctcttgtttggtctttggctggtgatcacaatgaactgtatgcaggatcggaaagggtggaagcaagatcaaagagattcaggaggcttctggagccaggctgaacgctagcgaagccatgcttcctggttcaactgaggttcgacctgtctacatattctcgcgacgcaagcagacatcgactgacctgtctcttctaaattttttctttcaaattcttatttccaacagcgagtcctttcggtctcgggagttgctgatgccgtccatattgctacctactacattggaaacattcttatcgagtaccaggatcgacccggatcccaccgagacggttctggcgccggccgatccgagtacagacagcagggttctggacgagactcatacaggcctggatccgagaggggtgataggtccgctcagaacgtggctctcgcccctggagctcagacccagagcatctacatccccaacgacttggtcggacccatcatcggtaaggccggatccaaaatcaacgaaatccggactctttccaacacccagatccgtattatggagccccatcagcagggcagcgagggtaacccgaacgagaggctggtgaccatcaccggtcagccggactctgtcaacaccgcaatgcagctcctttaccagcgactcgaacaggagaaggcccggcaattgcagtagatctgacttacactggtgtccatttctttgaatattctttgttttatttttacattcgtcatttcgtccatcacccttccccccttcccctccctcttccttcctctcgctgttttagtaaaccagtattctcaaaagggtgtcttattcccccttccttcccctctcctcaatctcttctatcctccccctcttctgtggatccctgttattccatcttcttttgattcttttccccttcccttccttctctaaaccctttccactatcatgatttttttactggtccgatacggaaggcaaaccacgtatgatgacgcatatataacacacaaaagtcgatggtttgcttggtacttatttgatacaacacactgacgggcaagattaaacatataatactgaatgaggaaaaagagaagcatatgcattatacatgtgaggtgaagagaagaaaaaatggaaaggtaggagaggaatagtcacaaggcagggttttttttctttcttttgatcttttatgattgccgccgtcatcatacgtatacttatggctggattgagcagacacatccaagagaacatgttcaagcccaagacggactcaaacatcttcgtggtgctcgggttcgctctgagtggccaatctgtaaggaaacagaatatcggattcatcaacgaaacgacacaagaacagttcatcgtactagctcgcccatttactctcgctgatcgaacgaagacgaaccctttcttctcgttggagttgacttccatggcgtctcttcggttagcgtagcctggaggactccaagaggcagatcgccaggcctgaggtttgcgaaagaagacattagctcaacatgtagtattcgatcgagcgcaatatgttcgagaatgaaaaggtaagagaaacaagtcagacgccaacttacaggtgtgtctttgtcctcccatagcacttccagctgttcgagcgacagaccggctccttctttaatgaagaagaagacgatggccataccgacaaagttacagcacgcaaagacgaagccgtatctataactaatagagtcggtgatgaaaggcgtgaagaatgctagcaggaagttccacagcctgtgttatatcatccggcagagattagactcattcctttacttttgttagattcataggaaagaagaacacgaattcagatcatctaaaaagagaacaaaccagttagatgaaacagaaagggactgcatctttgctcgggttcgtgtcggatacctaggtagagggcgcgaaaaaagtatcgtcgtattcaaacaaaacttcgttcacgagacaacgacatgacgcgggaaaaagaaaggcagaaccagatggatagaaacatacatctcgctagtaactagccaaacaccaggaccccaacaagaagcaaatccagctgggcaagtgaagcagagcaaacgtgataagcagacatctcttgaaatgtttcatcacaaaacttacataccgatgaacaggcagctagctacaatctgatgtagaggaatcatatgtaatatgttagagagaccacatggacatgacgataaccagtagggtaaaacttgataacacgattaaacagcagcgcaccatgaagtttccaatgggcttgcttgtcaaggggttcccggcagtgccagcaatggaatacgcgaataaccctaggacgaaagagtgcatgagatgacaaaaaggcagttcttgttagatggatgaactgagtaagttcggatattccttttggcttacagaaagactgccaaatacccccgaagatcagtggcttccttcttccaaagcgctcatagaagtatagcccagggaaagtgcagacaacgttgactgcaccgaggatgatttgagttgcactacagtcaaggcaaacgaagtcaaagtgtgagtaaacacagtgtcagtaaccttcctgcgcttcaatcttcactaaattatatcggatgaggacataaccactaactatccatcgcttaggcctacaccagcgaaaagagttgctccgtagtagaagaagaagttggcacccgttagctgttggaacatctgtaggaggattcccagtaaggtccgcattctcattcgagaagaaaagcattcggctggaattacaagaataggtcagtaatgcatcttctcgattgatcacaatgagacaacaacaacagaagacacatacaccaggttcctttcccgtaggtaagttctatttcgcatgatttttgaatctcatggaagtcgtgctcgacatagggatcaactatgaatatcaaaacaacctcaatacgatgggtaccgaagaacatcgacaccaataacgatcacgctcacgcgcatcgacagtagttcctctaactctagcgagcgattttcttgcttcttctggtttgccgtgcacttaccaatggaataaagtttacatcaggaagcacaggagaggttagtcgaaaagctcctatgtttgagacatatcacgagtcaaagacccacttagaagccatcgaggtgactcaggcatgaacaagatgccaactccgaggataaagcagaagacaatacctgtccaaacgaagtatcatcgcgtttacaatcactgattgagatggtgcaattagaagaagttgacccacagagacctatcaaagttctccaactggcagctgaatcaagtcttctaagaccgattccaaaacattcagcgactaggatgcccctgagtttgatatagagcatttgaatgtcagataactgtgaaataggctaagaaaatctgatatgcagaaggtttaggagatttttttaaatctacagtgtgatagccaattggtaagttccctactagccaccaaactcccaaggatatcagccatcgagtgatcgaatacatatcgagttccaagtactaaccactagagatccccgaatttgctttggagcaagctcagcctggtaggtagggacattggcggacagcgctcctacaccaagccccgcgacgaatcgtcccatagcgaactacaatttaaacgggccaaaatccattgaggattagcctaccgacatcggaacaagatagagaacagtggaagaacgaaacttgttgccagacgtgagtggaagtcatttggatgatgatacctagagttgaacaacgaatggaggaaaggtcatgtgtttttattcttgagtgaccagcatggtcgaacaccatacgaaccgacaacaatcattgaggcagcgcaagtcatggctttccttcgcccaataatatctgccatacggtttgccgtaagagtattagcacatgcccatgagcccgatatctcggaaccaagggggaatctcaagtcaacagttgtctatctacctgagatgtagcctccagtcaccgctccagtcaacgttccgatcgatactgtgaaaccgacggatgcaatcgcgtttagcatacatgctaaatagggacaaagctatctgagtttgagcctgccaaatgaggcagagtatttacaaaggccaacaatcaacccgtttctggcgtttgagaggtactttttaccagacgcatcagtttgtccgaatcgttgtagctgggaagattgaaaggtagctggttatcattaagagtaatccctcccatccagaggaatggtgttgcctaagcatgcgatcgaaagagttgattcactaacaaaatctggaagaggagtgatgcaagcaatttgtcctatatgtattgaaacaggagaagttttcatcagtggtcagcatcacatctgtctgagatcagccgaaaaggaggcaacaagcgaaagaccgacgaacctgtatcgtagccaaacacaaatcctccaattgaagcaaagacctatataacgacataacgacataagaatgtctcacgtcaggaccctcaacacagtccatacatagaaaagacgactgttggcaagcggccgtagccgatcccacgtacggtcaaggcgattgatgtaagccccaccggggcatcgtagattgtgaattgcacaggcatcctaacaagtcaaaacgctgtcaatagccagatgtagagatctcacaagagtgggatagatggagatgatgaggtctgggtttgatgcggttggagtgcaaggtctctctctaccagtagtcaaagaaatgcatgaccttcagtcaagagaaggatcatccagattccttgaagaagaaaagagatctagtttatattagtgcttctttcctgcatgaacaacgaaacccaagtgttagttaggtcatccgatcagccagagggaacgtcgcaggaggactgaaggtcttcaaggagggggagtcggaatgatgaatcctatcagtctttagtcagtttcgtctattcatgaatcaaggccgatgtttatatccgtgttaacgtcagcagccggcttgagatatgtctccagtgtgcttgctcgctcgtcgatcaaagagggagagaaaaaggagatagcttatgattaagagtgggagagaaagacgcggccgttttcaaaacgctcaaacaaaacaaagccgagctccaacgtagatcgttttgtgccgaagcctcggagatatagtcttcggcggtcatagtttacgccttcaagacgtgctgcctctggtctttcttcgaggttgctgaccattgtctgatgatgtacgtcaggtgacgagatggcgaaggcagggcaagcgagccagctagacaacgcgtacggataatcagatagatgcagtaatcatattatgctctacatgggtaaataaagtgggcaaaagaagaggaccatagaggcaggaagcaggaagagcaacccacgggaagaaacagaatgataaaatcaattgatagaaaaaaacaaatacaaagagatagacaaaaatcgaaagtgaaaggtacgaatgaacagaatggactatgatagcagggtagcagcggaaaaccgattagaggaaagatatttacaacgaatactaccacattagaaaagccctacaccgctcattcgcctcgagccagcgctgccgctgttgaagctctgcttgtgtcctgaagatgaatggtagctcgacgggagtgatgaccgctgtatggcataggaactcagatggaacggaatatgatctcgtttcttcgcccactgttatgagagtttatgatacatcataaagcagaaccgttagacaggagttcaaatatatcaacagtcgtagaagatgctttgaaggacatacgcaagagatgaacagaatccgcttttgtttcctgagcaagttgaccatcaagacacaagtagacgtcagcggctacatccaggccgaaattgacagcttatggccatagccgtagagtagatcacgaagaactgaaaaacagagacttactttgaaacaaagaaataattcaccgaccataagcaacctttccttgtcggctcgttaaatgcgttcttgctctccccaaccaaaggaagagagttcaaactaggcggcaagaacccctcatcatcactctcactccctccagaccttcgccaactttctctcctatgacctttcccatgggctgtcgatcctgccctgccgccgccagcctggtcatcctcgaagccttctaagaagtcgtcgtcgtagcttcggtcgtttgcttccgtcatatcgtccttgccttcctcatcctcatcatcatcttcttcgctttcgtcctcgtccgaactcgcggcatgcgggtcagagtccatatcgggagagtatgagtagacttcgcaagagtctaaatcaccgttgaggacttgattaagtactcgaatgaggtgtgggtgagtgaatcctgggcccgcgttgaaagaggtgctttggagagaagtcgaggtaagagaataaggagaggtcgctagaaccggcatggatgtcggataagaaccatacgatcgactgtagaagataaaggatgtacgaggtacgagataagcttggtaagacccactcatttggtatatcaagatcatgctgaacgaaggatgactcacgggccctgagagcttagctctagaacagttgtcgaaagctgtcgcagaacctgattcacactatgctctctacgtgaaccaaaacagcacggttagctcgaaacatcactcttacacgtccagtctttcgtttgttggataatatggatcccgagcagaggtagagagtctgaacgtacttgacaaagtgatcaggcgccactgaggtgaagtcatgatcaggaaacgcgacatttaacaaagcgacgatccagaaccaagtttgtctgtgatgtgcggaagagaatcggaagaaacatgttcagagggtgatctaaacaaatgagcgactagaacggactcaccggctgtccttttggtccaacctcccaaaacagctctctagaccagcatctcggagttctgggctcagcgagagctgctcgtccatctcggcctgttcgagcgagtgaatcgattcaagatgcttgaatagcttgcgttccttcgagacagatttgcaggaatagacctctgtttttaagaagggaaaaagaaagaggacggacaattacgtgtcagttctttgaataaatagtgtttcgagaaggaggactcagacgagataggcagacagaactcgacagagctatgaatgcgattaacatgctcctatcaagaaggtctgttccgtcagatccaaaccaaccgaagaagggttcatgctacaaaacaactacgcatatagttctctttatctctggcctaaagtaagggagaagagggattccagcccatccctctcagttctatgccaagcgatctttgggctccatatcctgctcttacgtcggcacatgtacacacacagagctccgagaagtgttcgttcccagctttctcttttctttgtagaatgaaatgtccggagatgaattagaacataaagtgagggtacgaaccgaaccgggtgtggaccttgcattccgctccttcgtattcgagcctttcagatagatggttcagttcgggagtgtcgagatatttcatttggaatggtagtagatggtgatggagggtttgatttgtatgcagcaaagagagtgctgaacgagttggcaccggattggatacaataacaacaataataagacggatagaattgaatcggatagggttgaagagatagttgcagaaacaagggagatggcagaaggagggcgaatgatgggaaagtacttccggatgcgggaacttgttacgcccacaaaatgacgcatcctttggtcagctcgacctgtcatcgcgaatggatacttccatccgtcctagctcaccttaagtggaacagatggcagagtggctagacaggataagatgcggttgaacgtgaaggagtagcgacgacatttattctcatttcagtcaaacgtttgttttctagtgttgttgtcccatggtatctcatcaacgtgggtcgaaaggtgcagaccattcgctttacgttcgaaacatgggtcatctctcaattcaacaataccttcagtcgactctgcccgatcttccaaacatcatccaccgcacgcttgacttcgctcttccattcttctgatcctgctggtcggactcttttctcgtctggcgtgcctactcttatctgggtttccatctctggaatgatggccgctcgagatcgcccgttgacaaaagtgatgtatcttagaccggggaacagctcttcgtatgaagtgttgagatctctgagtctgaacgatgtgttcgaacacgaatggatactgtctgtcagatatgaggggaacatggctcgagaatacattgatcataaggagagaaaaaaaaacgaaccggtcaagagtggcctgactggtaggggctccggtagctccctgctcctttttgctgagctcactaagaatgtcgccctcaccgatacgggctgtcgagtttcagttcaacatcaaacttatcagccatgtgaaagctttccatgcaagcggatacaagcaagaatcactcacgatgtccgccgataaagacactctgatcttctaacgtccattgttcaaccatgataccctgtcctctgtccaatacatctctgtaagcatgaggaggatcggaagagagggattctgccagacgaggcactagtttctctagtaaaatcggtgtcggctcgaggagtgtcgacaggaagttggccaaggcaggcgacgacggctccgaaagggaggagagcggagggagcgttggggagaccattctgtgttgaagagttcagatgtatctgtataggatttgcacaaaagacaagatggtttcctgggtagatctggctgatgctcgggatacagagtaggtcggatggtatgttgagaagtcgacagattgtctgttgttctctaatctcatctcatctcatctcttcgtctcgaccggagttggtctgacgataagcgcgagatatttggcgaactctcgtctcactatttacatcaacatcgtttcattacgtttttctgtcttcgtcattccatctttcctcattcttttctacagatacatacatacacatactctcttatctgaatggggcctcagtcttcagcccttccgtttggttctaagcctggagcttcgtcgaatcatgctcgaagtccttcaaccgtccagtcgatgctcggcggctccctcccgccctcacttcaggtccctccgcggccgacgtctatctatgataccctgtggatttcttcaaacgaatccggattgtacgttaggagtgtcagatggaaatatgacgcggtcaagggtggcatcaagatcggttggggtctaaagggcaaagtcgaggttctggaagaaggagagctccagagcggtggagaagaggctgaggtcaaaggacttgttgggatcgttcggttgtggaatggtatagtccattctttttcgccggatcttctgcttcagctctcgatgcctgatactatctatcactaccagctggctatctgttagttattgtcgaatccaaacaggctggatcatgtatgtttgttctaaaactattttgatgggccatgtctacgaattgatcagatcttgcgcacgcataacatagttccatcctctgtgcacccgatttacaagatcggtaacgtccaggccattcctttggtacctaccgaggcccaagaagctatcagaaagctctgttcctttgtttctcatgttcgatctcgcgacgcgccagctgactcaagagcatccatagaagagaatgcagcccgatcggattggcttcgatcgggagaagttcaaacgcccggtccggagagagaggagaaccagactgaaagtgaggaagagacaacggccaagtcgaatgcaccgggtcttttcaactggaaccctttcatcaaaggttcgtcggccgtctcgtccgccattcccagtaggacgaccagccctggccccagaagaccggccgatgaaccaacgcaagctccatccgagttttccgccccttccatcagtcaatccggacccagcctgacaccggcatcatcgacctcagcgtcgcgttcgcagctcgagtctaaggtggtactctcgatcgcctctcagtttgcctcagggcagatgtttttcagctatgatgtcgatctaacgaccaacctgaacgccaagcaggctaaacttggtggatttgaagggagagaggaagacctgatcgagccttcgttacatcttcctctatggaggagagttgagagaaggttttggtggaatgagtggttgagtcgggagtttgtggatgctggagtaagtagttcttgagttaagggcttttgaacggaatttatgtgagactcagatgtacaatgactaactagctaccttcttttgtcaacgaactcaagttgcatgcatatgttctaccgatcatgcagggttgggttcaaacggcgacgttacactttcctcgatcaattaacactcttacctctaaatcagaatcgacctcatcttcttcatcctcatcttcatctgaggaagatgagaacgatgatgatactgagtccaagaaaatatctggcaagatgccggtccggttgaccgtcatttcgcgaagaagcagagaccgggccgggctgagatatcagcggcgagggattgatgatgagggtgatgtagccaactttgtggagactgagcagatcgttcaagccgaggtatattcttcattccttctattcggttgttctcagtttgagaaatatgttgaccactcgatcactcacgtctcgtatctacaaatggcggaaaacgaaccattgatggtatacgtaccttaagggccgaacgttctcttttacccagattcgagggtccatcccattattctggtcccagtcgccttattcagcctcggccttggccctaaagccggcacctatgttagatagacctgtagaagactcgaaaggcccgatgaccgtccatttcgatacgctcaacaaacactatgggcctcaggtacgttctggccatgagacacacctgcgtgccttcaatcttgactgattcttcgcaatgatgttttattaggctattgtttctctgagcgaattgaccggaaaagaagctgtggtgactaatggatacagagatttgttagccagtctgggtagggatgacgttcagtgagtgattaattaattaaattcttactgtcgtctacgttcgtctcacactcatacctggatattgctctcttcctgttcattttagatacacacagtaagtcgaaagagttgactaggaattcagatcaacgctctcacacattttctttcttgttgtagatttgatttccaccatgagtacgtgaattctttcgataatacatctctcttacaaaggctacgacagccatatgcaataattatccattctttgggaggttcgcttctagatgccggggaatgaagttcgagaatgtttcaaaactagttcatcaactagacaggacattcgctaatcaagggtacgtagttacaagttccaggaccttatttctgagctctctgctaagcctttggcgttatcatttgtgtgtgcagatactttgagcttggacccctctcaaagactcaaaaggggaccttccgaacaaagtaagcatcggttttctctgatgtgtcatggcgcgattctctgaccatgtttctgctttgatagctgcatcgattgtttggatagaactaacgtagttcaggtgagatttacaatcaatcgagagagtggaacgcgaccactgatttaatttcccctgcttttagtctgcatttgcaaggagtgtcctcacgacccaacttgccagtgttggattgaccaacttatctgctcttccaagatcaactctggagacggttttcaacgacatctgggcgaacaacggagatgcgatttctaaagcgtatgcgggcacttcagcgtgagtttgccctcaattctatatctgatcatgacgtccgttcttaactattcgcttgtttttatcattcaatctttatcagcttgaaaggtgatttcactaggtatgttctccaatcaatatcgaagatgatctcgacacattgagcattgataactgagtggacattctcaaatgcttaggacgggaaagcgagacttccatggtatgatcaacgatggactgaactcccttgcgaggatgtattcatcttcgtttaccgacttcttcgctcaaggtgtgtttcgttattcttgtcttgatttctatcgcatatacactcaatgataacacttatacttcttatcgaaaatcgaagcgataatctcattcatgttggggcaacggagtatatcaatctttaccgagttctcagaaaagcttcaggtctcggagccttcaaatcttcttcgactgagcatcatccgagctgaagccagtcagtcaatttgctcttatgattcttcctccagatatgaccatctaaccaatcggatgaattacaaaaaaacagttgagacctgtacagcacgggttctgaatgaaggagagactcgtcaggctggatggactcttttttctcccgtggagcaaagtcgaaccattagtccctcgtttgaagagaaggttctgcttctggtaagtgcgatgttgattcataactacctgtagaatcagtctttgacaagagctcttttatgttttcgtgaggatagacagagcaagctctctatgtctgctcgtatgaattccaactagaaaagtgagatgattctctatcttatttttgattatggttgtgttcaagattttagcttcgtctctgtttgtcacacagggttgtcagttttactcggattcctcttgcaactgtacttggattacagcgtggagaatatattctatctcctttacaagagtccggaaaagaccccgaagagaattatgggtgagtttctggcttgctactacgatcttctaaaccggcggccttgctaacccgatcatgttatgtattcactttcagcttcaaaatcatctatgaggatacggatgagtcaaccactcgactgacttcatattctcttacgaacaaaatatccagttcctcccactctcaatatgattcgtcttcgccctcagtgtctaatccggccaattcatctacaactcagaaaagaaggagcctccttaagccgttttcgttctcgaaatcttctgccgagaacgcccctgtcccttctacgactactgttcctatcccaccctccaagttctttgcattcaaagccattcccagagatattctgcttcataaaagaaatcgaccagacttgacctacacattacctgttggtggaactgaagacgacgaaggtctgaacgacggtcaaacgtgtagggaattcatcgaaggcgccgtgtcgaagatcaaggtcgcatgcagcgaggcagggagcggttcagacgggctgttgggtcctgggaagaagtttattgaggaagagagtatagtatctcttgcgcaggcagagaagcagacgagttggtcagacagggtcgaatacggaatcagtgagttatcaagctttgatcttctcttgtctcatcaatataagaagttgagatccaaatgctgataatttcgatgtcaacatctcgtagagcgattcctctggttatactaaatacttagtatgggtttagctactagaaagcagtcgcaactgatggtgttcgatacatgacccttttggactagggtgtcctcagaccacagaccacagactcccatgggtcatacgtccagtctgcccccgttcctagggcagcctcactgtccgtgtcggtgtcgactgtaacgaccagagcagcagcggcagtgccacacatcagcagtctcgccccctcattctcctcctggtgcatggccaggtggagtatgttgcgggacgcactgacatctatgttctgccaagtctgagaacaagcacagagaagacagggaagacagggaagacagggaagacagagaagacagagagagcgatcagtactcgagacactatcctgagatagtgaagaacagacacacacacacagatatacgatacacccgactcaccagacagacgcttcgacagtctgtcgacgcccacaccctgcctcttcccgagatctcgctacagcactcggagcacatcctcgacgtccgctactcccaggcttgacggacctggagcagcgcagggacatccagcttggcaaacagtatcttcgccgtgtcagaggcatgcccacaagaaggcgacgagaaggcgccgtcgccgaagaccagaaagatacgtaaatgtccttccaacagacagaccggcagcatgtggtacgcttgctctcggctgaagtgtgcaccctagcgaagacgtctccaccgtcgagcagcgaagaacgtcgcgagcgaagagtagggctgagagtgcaagacgagagcagcgcggagaccatcgagactggcagatctgaacgaaggaaactctgaagatagaagccgaagcaaataattgaagcgagaaaccgaggtgaacaagacagttatcagcgttggcgtaagcgtgagaagcacttaccacggagagttatcaacaagttcgcatgctcttcatacacagtcaccatttccgacggtctctgcccacccccacaaggtgctttcttgagttatgagagagcgacatttgagtgccatgctcaggcagaccgctgttgttcagagacat

SEQ ID NO: 3018 - DNA, 19968 bp, Xanthophyllomyces dendrorhous
ttcggatcctcggtctccattcatagtcatcagcatacgtcggagacgatgtgggtatcagcgctccgacagatacgccgataccgtccgtactaagcgaccgggcgaaccgtcgtcgttgggactctaaaattggcacaggcggtttgatctcattgagtgatcaatccgatggtaggctgagcatctgggattgtcagtcgcaaaagcgagagaaactctgccagggactgagctgttctctcgcgattcagttcgaatggaggaaagtaatactctctgaggcaactgatgagcactctgatgcggaagactgttgtatgatgaaagattgttctagtgtggcagaatgttctcctctcccaactgctttgtgtcccataagctgtcgagatcgatgcctgctagcttgcatgcaagccatcctctctggtcagtttcactggctgtgggacatgatggacattgtcatgatggccattaatgatgcttctacagttgatgatcaaacagagacagttgaaccctcgttgaaagagatcatttatttgatcgagctcctaacacagtgattgcaaacacttacgtcatcatcatctttcacgacacagatcgaacaatactctcgatgatcgttcaacgtttcgttcactggcaatagaaaggtaaaattggagacgatgagaacggtctttcttcattcgatcttttgctctgcaagaccgatcttgagttctcttcttcatcactggagtccagtcaaattcaacaccctccaaccgcatcgttcattctctcgacaacttgctttcctttggcctcatcgcgcaaatcatgtcgcccactacgaagccaaatgttttggttctgttgtttcgaaacgatcttcgaatccatgataaccccatcttgaatcactttccaaagtcaatcactcatgttctgccggtttatatcttcgatgagcgagttatctcactttcagccttgcccggctttaaacccgatcaagacgagaaacttgaagaaccgaagagcagagtgttgggtacatggagatgtggtggaaaccgtgtcaagtgtgtacacgatcttctgctgttttcattgctgggtacacattgtaataatgtttttttgtatgtgtggacaggttcttggccgagagtgtctttgatcttaaatctaatctccgcaaaatcaattctgacctgatgatcggctatggcctacctgagaaggctatccctgaagttgttcgccagcttcaaaacgacggcatggatgtttccggagtatgggtagctcaagaagtcagtccgaaaagtatctttggtctgtctaaaagatgactggtttgctgaaccttggtttaccaatttaggtcaactctgaagagatgcgacaggaaactcgtatacagaaagcattgggaaagctctcgccaccagttcctatcaacatcctagagggatccaagaccttgattcacccggctgatctcccgttcaagccctctaagacgcccgataacttcactgccttcagaggtaaagtcgaagggttggacgagatgatcagacccaacctacctacgcccacatctcttccccctccacctcctcggccaaagtcgcttgatgtctaccaagcccctcagggaaaatcttccttagagcacattctgcctcttcttcttaagcccataacagattcctctttagattcctttcattccttcacagctcacccatatcatggcggtgaaagctctgggcttgaacgaatgaaatactactgtggacgtgaccatcagaaagccccattagcaacctacaagcagacaaggaacgggcttattggtagcgacttttcgaccaaattttcatcctggctcggacttggttgcctcagtccacgaatgagtacgtcgtcaatcagtcttgtttttaagtgatcagttttgaactctatgtgtgtctcttcgccgatagtcgggaatgaaattaaagcgtgggaggaagtttggaccgaccgaggaagaggtaccaaggattcgtgagtcaaaattatgaaagcacatcgagaactttacggaggtgcttacctatgtctaaacaatctgtgcgactcgatgttctcgaggtactggctgatcttcgagttgtacgcataattcctttcactatggtttgtttcgcgaattgcgctcattttgtgatgacatgtgatttcacaggctctggagagactacttctcgttcctctcgatgaagtatggtcctgctctattccatgtggacgggttcaattctgtcacgcgacctcaacacgaaggtccggactggaagtatgcgggcgaggatgaagaaggcagaccgctgttagacaagtggcgagatgggaaaactggtgttccgttcgtttcaccttcatttctgacttgtttggcaatggttttggaccactcacttttctttacacttctggtttggctacatttccagctttattgatgccaacatgattgaattgaaggaaacgggcttcatgagcaaccgcggtcgtcaaaatgttggttgttaccttaccaaggactatctagtggattggagagctggagccgaggtcttcgaggaaggtcagtgtttgctctgttatcttggctttaatcatcaatgctctcgttctgaagacggttctgtactgctctgtcgtttagagttaatcgattatgatacgagctccaactggggaaactggcaatatgtggcaggcgttggtactgaccctagagaagcaagatatttcaaccccatcagtcagtaaacgctctttttaacacattcttttcagattggaactgattcttcattgtctcaactttcagagcaagccaaagattatgatcctcagggagactatgtcaagctctggattccttccctcaaaaacgttccaactgaacacgttcaccatccatggacattgccttcatcccatcctgcgtttgctgaagtcgctaacttgtataaaaccccacctaaagaagagcgtggtagctggcggtcgcaataccaacggaaagttggtgaaaacgaaaagacgtcgggcaataaggccgaaagagtcaaccgagggcctaagggcgggcgaggcggacatagcgttagaggcacaggaggaagaggtggcgcacgaaagggtaacaattgatcatgtaatgtgtctatcattctctttcgttgttcatattggcgatcaggccagagacaggggagtcatagatattcaccgcacacataactgagaagaaacgcgagccatactaaaacatactcttagcatcaaagacaaaaacatatgaacagacttcatgacaagtagtgctacagcttatgaggtaacccgatgagacttgaaaaggcaagatcgcctctagtttttcttagggactattgtgatcggacagaaacatgagctcagagatacagtcaggggcttgtgcaagcatacaaagtgatcatcacaagataatcgtaagatcatcacacaaactgagagcactcactgtcgttgtggaggacgtatcggtatctgacctttccatcgtacaagccctggacggcctctccagcctggctcatgttgagctcctggatccaaggcttgacgcccttggcagcggcaagctccaacatctcgtttgcctccttcttcgatctgcgcacgtcacctcctagttctgtcagtataccaatagatcgaagcgtcagaggaagatcatgagactactgacccaagaagagacgaagagaagaggcatccgttgcccatgaaggatctagcgtggataggaagggtggcatctccagactatatgtgcatcaatcaaggcgtctcgcaatcagtatccagtcatgaccgtcgcaggtcttcgcaaatgggcaactaagaacaactaacaggaagtccgacgctgcatgttcgaaataggcatgactggtcagttttggacacagcttcacaagaaagagataggagctacgtacgtcaccaatcggccgttaacgacgagaatcctggccagcttgtcaagaggaagaccctcagtgttgtcgacagtctgcgtgtttgtccagcgtatggagaggtcagacagagttgcatatacactgattgaataggaaactgtccacatacggagaggatgagatcgagctgatggtagaacttatcctggaagttctcttctccgttggtgacgatctattacaatcagatgtgttaatcggaagtgagcacagccagtcgtagagcctcgaacgagatgaaaaagaactgacaatatgctcctcatcagcaacacccatcttgaggatatcgtccttcttcttgagagagtgggtcagagcgtacacctcagcacctgtaaaaatcgatgtgacggtgtggggtaagtagctttgaatgtggtgtgagacaaactactatgaagcacgaaccgagagcagcagcgaactgaagggcaatgtctggagtagagatatcaacacatgacggattagaaaccgcgttcgatggcaagccatacgattaaattaacgtacgtccaagtcctccgatacctgaaaaaaaaacccatatgaaccattgaatgagaaccagaaactaatatatgattagagaaacgatcagattacttaccaacaattccgaccttcttgccaggtccacatccatttcgaaccagaggtgagtagacggtaagacctatcaaaagacaacaggatgaatacctattccgttccgaacagcgcggagtaaatttaaaaaactaaccggcacacatcaatggggcagcgtgctttccctcaattccctcagggatggcaaagacaaagttctcgtctgtatgaatcgccaaattagttttgcgcgccttgaaacaggatgcgaaacgtgccatgacggatacacttacggactcggatcttatcagcatatcctcccatggtgcgatccccgttagggtacttgtggttgtatgtaaacacactgttccaaatacaattggccgatagtgagctatgaatgaccagtcaagacatgcgaaatgtggactgacccgtgcgaacagtactgcctacagatcaaacaatgaagacatattagtgaagagtcatgtgtggataaagagagtgctgccatggcggttgcgtactcgttgtttgcggtgcctatcgaacagatcatgagcgtatccagtcagtttgatagtacatatcttggcgaaagtgaacagagttgagaatggtatgagattccacagaagaaaacaacatacagtccgggcacttggtgcaagatccaacctgggctccgacaccaacctgttgattgaagatgatagagaggtaggcttgtttgagaagctgatccaggagagcaataattagatagtgtgctgcagacttacgagttgtccgactttgaattcagaagaagccttagggccaactttcgtgacacgaccaatgatctcgtgtctggagtattaaagagaaagaaaatttgatgagcacataggcttagagaaaaaaaccagaataacggatatttacccaacaacagcgggaagcatcacgtcaccccctgaaaaagaaacgctgacaagatcagactggtcccgacaggttagcagtacgaatcccgggactactcacagccaccggtgatggtatgactgtattgcaaacgcggaaaacgcatatgagcatccaccatacattcaagaagcgaaacatattttattaaagcggcaacatacacatcacttccgcaaactgatgatgttgatcaaacattggtcagtcagaaatgccgagcttgtcagatgtaacggaagcaggacaaagctacacacctccacagtctaaggaggcgacaaaagaagtgtgatatgatgagtaaaaagattaattcaacgtgaagaaggacggaaataaacgaactctcgatattaacgtcctaagaaccacgtcaaagattcgagacgcgtcagtaccagaagcacatacacaagaatgaaaaggagaggtcgaacgatatcgtgatcctcagcactgaacaaagtagtatgcagccaacgtcagtatatgtgcctcgagtgattgattggtaagtcattgagaaccaggaagaatcttacgtcttaagagggtactcgataagcttgaaatcggtccagttctgcagaagtccaaagagggtagttagctcaggcctaagatcggtacaatggtatcaacaaacctttgtatcgctgtgtttggagcaatgtagggtgaaaagcgtgagtagtcatgttgatttcatctcgagacccagtcatcgttcgagacgtactgaatagcgctgcatgaattaacaagtaaagtaataccagatcagactccgcctcaatagaaaaccgatgtatgtctaccaaagatatgaagagagaaagaatatggaaagaaatagaaggattctttcctctcgatagcgggaagaggactcactatctgagatatccggagatgaaacccaaaaaaagccagacatcctgttcagtaagtgtattgcaaagcgagaaacgatcgtctgacaattctgagaatcatctcatgtactgacccttgagcagtcatggcaggctgttgtaatcttgtttttgaaaataagggagtgtaaagatgggagaggcaaaaccgatgatgagaggaagaagtgttctagggggggtgtcgaaaaaattcaaagttcggagagaccttcaatattttgtacaagttcagaagcagctagttttggaggctacgtcattctccggttattcatcccagacctccaccttttactcgctgaattaagatcggctatatcccccaagtttgtaagcacttgagaaaatagtccgacaaaaggcgtctaggttacactgcgaccgcaatcttactcaatcccgttcgggcttactcaacgaccttcgtaatacatacgcaaccgcttgtttgtaatgtccggtcaagacggtgaggtataccggcaaaattaaaaacgttcttgtaaagtacaatggcaatttcgagaagatcagaatatcaagcccaaagagtttcaatggcgatcagaacggtgcaaccggcgaggctgttgccgctaatgccgatgctgatgccaagactaatgggatcgcaatggtctatgttctgagggcatccaagtccagacgggtcacctatcgaccacgtttggttagggttactccccatacgtttactggatcaatgtaattcggtcggtctactccgtcggcttttgagctcactttttatacattccttctcctccattcttccatcgctatctctacacgtcctcaaactttcgtttgattcctctgtatcatgccttccgtgtctcatctgccgtctactcaaaaacccgtgaacaaccagctggtcagaatcgccatcggtaagattgtacccttctttgtctgctgtattccttatctttcctgcccatcgcccgaacatacagctttcttccttcgcaaacagatcgaggaggaaccttcaccgacgtttgtacaacgtttctggatggcacacaaaagattttcaagctactctccgtggacccctcaaattatgctgatgctccaacagaagctatccgtagagtactctccgacttgtccggtgaggagattggacgaggagataaacttcgattagacaatgtagaaagtgttcgaatgggaacaaccgtcgccacaaagtaagactatccttctcatataaaggtttgaattcattttatgatttttccctttgcttactcaaattgtatcacaatagcgccttgttggagaggcaaggagaaagatgtgctctcctcgtgactaaaggttggaaagatatccttcggattggtcaacaaactcggccgtgagtttgctttttgatgagcccatcatgagactactacttgagatgctcatatcgtagtttaaactcgttataacagagatatttttgatctgtccattcaaaagctgtcccacctgtacgaaatggtggttgaaattgacgaacgagtgactatcgagacctcggatgaggtaccttctgcttctcctttttcatcttctacttcagaaaaagaccttccagaaggtttcacaaggggtctaacaggagaagtcatcaaaatcatcagaaggcctcaggagtccgagatcagagcatctctcaaaaatctcaaggctcaaggcttcaagtgaggtcgtatcaatcgactctttcgcgagtcttgagaagtgtatcaattaaccgctgtgtacacactcttcttatcacaggtccttagctattgctttgcttcattcgtataccttcagcgagcatgaagacctcgtagcaaaaatctccagagagatgggcttttccatctcagtatcaagagaattacaaccaatgatcaaagtcgtttcacgggctaactcggccactgctgatgcctaccttagtcctgttactcggaggtgaaatcaatcgttttttgtgttcatctcaatcaactaagctgagaaaataaaacccatcggcctttatgtttatagatacatcgaatccttctcggaaggatttgaaggaggtttgaaagcatttggaaacaagcttttattgatgcaatccggtaggtcatcagcatcctgtctttcttttgtaacaaccaaaatgaacttcttctcgattcaacacagatggaggactctgtacctgggacaaatttagcggtctccgagcgattctttccggtccggcaggaggagtcataggtcagtagcccacccatcttctgactcttctccatcaattctcggttaccatatgcacagtatagcttagaagtcttttatttgctttacaaacacgaaggtttctccaaaacctgttacgatccggaggaagggacccctctagtggccgttgatatgggaggcacctcgtttgtccagtcattttaaaaacagcacgaaactgtttactgtgtctcttgatcatttcttacgctttcacgacaggacggatgttgcccggtttgctggccaagttgaggtcgttcatgagactaccacagctgaagttatcatccaagcgcctcagcttgatatcaatactattgctgctggaggtggatccagattgttctttgaaaagggcatgtttgttgtggggccagaggtataagcgcattccttcttctatcaacaggtatcagtcctattatgcgactgattcatttacatcgttcatatagtcctgcggagctcatcctggcccggcgtgctacaaaaaaggaggacccttggccgtgacagacgcaaacctcgttctcggacgactcttgccagaacacttgtatgcattgtttcttttgaactcaacatcgatccgattgtttttgatttgttggctgatcctctatctgatttaactttcaaaaaagtcccaacatttttgggcccaatgaagatcaaccgttagatattgaggcgagcaaaaagctctttcgagacataactgacaagatcaatcaagaaacgagtgcaaatgagccgatgtctatcgaggatgttgctcttgggtttttaaaggttgcgaatgaggcaatggctcgacctatcagaatgtgtggatctttctctgcttttccttttttgatcgagtatgataagacttgaagaaacaattgctaaaatctacttcttctccatataacagtttgacagaagccagaggttttgatgcttcaggtcacaatttggtcatgtgagttctttcgtccgtcttccactgtgtgtgtccattgacctgatgaccaatacatgccatgacagttttggaggtgccggccctcaacatggagccagcatcgccgcttcgctcaacatttcgcgcattcttgtgcccagattttcttctgtcctatccgcctacggaatggctctcgcagatatcatcaccgaatcctcagagccgtcttccttctctctctccgcttcttcagctctgtctactataaagtcaagagtcagtcgactccgtgagaatgccaccgagtcgcttcgtagtcaaggattcaacggcccgtctatcctctttgaaacatttctcaattgccgattcgctagttcatctactgcgctcatgattcaaggcgacccggaaacgtcgaacttcgaaaaacttttcatcgacactcatagacagctgtttggcttcgttttggagggcagagagatcgttgtcgatgacgtcagaatccgggcaactggcagcagtacaggagggatagagtgctcgctgtataaggattggtcgttttataaacgaaaggtgcctgagctggatggctggaaaaagaagaaggttttctttgagcaaaaaggctggtcagacactccagtcattcctctagcagaacttgaatttggtagtcaggtttacgtgcgtagaaaattcaatctatctcagatttattaatttgacctgttgaccgagtacgctctttacacagggacctgcgctcatttgggatgctactcaaacgattctcactcctccagggtacatggctaccgtccttcctaaacacgtcatcattgacgcaacgaaagaaatacagaacgatcaccaggcagagttggacctcgatctatctaccgcaaaagttgacccaatccagctttcggttttttcatataaattcatgagtatagccgaacgaagtgagtcaacctgccttcttcagaatggttgaaaacacttggttcactcgaaactctctactattaatagtgggtcaaactcttcgtcagacagccatttctgttaatatcaaggagcgtcttgacttgtatgtcttttcttagttctatcctgggttggttatatccgtaacgctttaggtgtgtgatcacagacagccctgacgtctgagtcgcctcttatagctcctgcgccctgttctcgcctgacggaggtttggttgggaatgctccaaacatccccgtgcacctcggagcagtctcacatgccgttcggtatcagatcagacactggggtgaggacatcaacccaggagacgtgttcctgtcgaaccatccttctgctggaggatcacatcttccggacctgacagtcatgacaccggcgttcagcgaaagcggagagattgtgttctggacagcctctcgagctcatcacgcagatattggtggcattcgagcaggttcaatgcctccattttcaaaggaaatttggcaagagggtgctcagatcaccgctttcaagctcgtatctgcaggcaaattcgatgaagccggcgtgattcaccacatgtatgatctccctggcaaataccctggatgttctggaacccgaacacttgccaacaacatttctgatctcaaagctcaagtttctgcaaaccatcgaggcgccgtcttgatcagagatttgatcaaagagtgtggtatcaagaccgttcaattttatatgaaggccattcaggacaacgccgaagcctctgtcaaggatcttcttcgattcatgtccgcgaagtttgcgggaaaaccactggaggccgtggatcatatggatgatggctccgctatcgctcttaagattgatatcgaccctgtcagtgggcaggctatcttcgattttaccggtactagccctcaagtgtaagatttattgttggctctatgttctggtcagaatatacatttgctaatttaatctgtgtataacctgtattgggccttttaggtacggaaacctcaacgctccgacggcaatcctttattctgccattttatatgtgttgaggtcgatgctcaactccagtattcctctcaaccaaggatgtttgcttcccattaccctagttctccctgaaggaacgattcttagcccttctatcgatgccgctacagttggagggaacgtagaaacctcgcaacgagttgttgacgttatcctcaaagcattccaagcgtgtggggcttctcagggtggctgtaacaacttgacatttggatctgagccaggagagaaccaaaccggtttcggatattacgaaaccattggtggaggtgctggcgctggacccacttgggatgggcaaagcggaatccagtgccacatgacgaacactcgaattggagatcctgagatcattgagaagagatatccggttatcattcacgagttttctatccgagccggaagcggcggtgatggtcagcgtaagggtggtgacggtgttattcgagacatcgagtttaccgctcctgtcgaggtcgccatcttgtccgaacgacgatccaaggcgccttatggaatgaaaggcgggttgcccggtcaaacaggatcaaacttctggatgagaaaactaccagatgggtcgtttggaaagagacatctgggaggaaagaacgaattcatggctgcagtcggtgacaggatcatcatcagtacgctttttgtttatttcttctttctcctgtttaaattatcgcgatcaagaatgatctgactctgagtgattacgctgtctgactaccctctgcagactctcccggtgggggtggatacggtttgcctgactcatcttacgagggggacaactctatgtacggcagtgaggagtacaagcgaaaagcagccatatccagagccagagcgaatggctctctcgccaactctaaggatacggagaacaccaactagacgtgtgtctcattgttcctttgtctacttactgctttgcttctttacatgtacatgcctttgcctgtgatctgtagagccatcactgatggccatcatgacaatgtccatcatgtcccacagctagtgaaactgaccagagaggatggcttgcatgcaagctagcaggcatcgatctcgacagcttatgggacacaaagcagttgggagaggagaacattctgccataccagaacactcatcagtgatactggcatttaatacggctgctgctgttgaatttgacgctaaggctgcctcaataacaacgacagcaagggatggggttgaatatgtgacacatctgctgctgccgccgccgacgacgacgacgatgctggtgcttagaataatgagatcttggtctgtagtttaagaacatccgagtccaaaaggaccatgtattgaccaccatcggctgaggtctttctcaccatgctgtacgcatataatcttcatgacgtggacgtaacttcgttcaggtatctggcttaagatggtatcctcaggtaaagatggcattcaacatttttgaagtcgagaaaatatcgtgtatgttcattaggtaaatagatcaatcagggccaacagatccgcgaatgatattgactagtagatacagtaacggggaggctaggtagagcgatggtaatcataaaggttattcatgataaaaaaaacggtcaacatatgagcatcgaatagcagagactgtcttcgactaaccaagtcgaggctccagtataccaagctcgctcggctataccgttgttgtcccccctcctcgtcgacgtccaccgcaggcaccacaagctaaacaagataggtcgcatacagatcaacactggtagaacttaacgatagtgtctgattaaacagaagaaaattgactaactgatgaagttcctgtagttcaaagcgaaagaaagaaaccagtcaaacacaccgtcagtttatgattaagagttgcgaagtagggaaagcaaatataatgaaggtatacgaaccaaatggcaagaaggacgttggtgatacccgaaacaatggccatgataactgatccaatggcactaacgacgctgttgattcctcggcctgcaaattcgtacatgagccgagagaagtcagaggtcagaactcagaacccaagagtctcaaagcggtgcgagggcatatgttcgacaagagcgcaggaaccaaccaatggcactgatctgaatcgtggcggtacaagtaggataggccgtcagctgatatgaaatatgagtgctcaagacaagataaaactcggtcacctacaatgtttcccatattgaatccgaaagtttggtggcggtggtggttttggtctttaacaaggtgagttggtggagagaaagagagagaagaaaagatgtttcgccagaagagtcagccttttatgctgttctgtcttgcgcgcctcctgaacaaaattgaaagaatttgtgggcctgataaaaaaggccagaacaaaccttgcggggtcaagagtcaacaagatatccagtggaactttaggtcaggaaattaagcaagccagaaacagcaaggcgttgaggttgatgtacaggactggatgggccggacgggaccggcgatcattctactgcgcatatgcctccaggccacgggggcaggcaccggaggattataacaacgtcatcaattacgcaccggtaaaataggggctgaaacctccacagataaattggcaagtgccggatttgttctgcctcttgcctgccccctagtctatatcaggctttagagctttcagaacgttcctgctcgtttcgtgactattatctacccctcagtttttctccattctcttctcttacattttcgtttctttcgcgcgctcgacaagcaatgacgtaaagaagagagttctggactagacaaggtggtttatctctccctcaatattttgtttcagctcgagaggaaaaaaagaggtgtcattactatctgccgccgccgctgctgatgctgatgcttagactaatgagatcttggtctgtagtttaagaacatccgagtccaaaaggaccatgtattgaccaccatcggctgaggtaactctcaccattctttttgccaacgcttgatcgaccgactgatatctatattattctgcctgtcaattaatgagtggagcgtttttaaacgtctgtttgcaagataacatagtcagcgatttgttttttcgcttcttacaatgatggctagagaggtgtgaaggcttgagcactcgcgacgtacagtactcgactttggttcccaaaatttcctcctcaaccaaaccacttcctggcgggttccgttcgtcgtcatagagctcctttccggttctccggatccgctccttcagccattcttcctgagtcggtgcgcgtccgccttgatcaatccgactttggaacgcatttttgccttctctttgagcaagaggtgattctgcgatagggttcaacatcgtatccggcgcggctcgagcaaaatgaatcaggatgtatcggatgatgtctgcctgatccgacggaggtctgatcacccggtggcgagttgccttaaggactcctccagataagactgtacaagtcatgaaatccctcgtttgtcagtttgtctggaagcatagacaacgtaccacaccatgagatgtgtgatgcttacagtctagtgcgtcggccacattcaccactagcgccccaggcgtatgtttcacccacttccacttattctctccaggcgtcagaacctgaagagctgaaattggctgagaccagagcagactgagcgtgttgtagtcggtgtgacccttcgaccagatcccatctgttttgctttccgcgtcttcatccctaggaaagtatcccatgaaacgctggcaggaagccccgatgggtttctcttggctatggagcttccagagggcatcctcctccagctcgagcacaagagacacgagcgtgaataatctgcgcactatatgattgttggtatagtctgcaaaagcttgaatttcgggcagaaatgggagtaccgaagggtgatgttgtttggttggagactgaaaggaggaggactgcatgaaaaggtgattaaatatatgaacaaaagtgagcgatgatatttcgagagctaggagatgactgagctgacctccagattgtaatgctgtattatgatcaaccaatgtgatatcagacacgaccagatccgaacaagacgatccaagaatgaaaacggtcaacacacctcaatgttgtctggtatatcatctctcttccaaacgcctcttaatttgtatcccttataacttccctcatcgagcttagcggcataaggacctttttccgattgaggaataccggagatgacatgctgagcgatcgcgagctgtctctcgagtgtctcctggggaacccctgtgccgatgacataaagaaacccgtctctatgtaaagggaaactgttagtatgcaaagccaggatgttcgtaacttgcatgaacgatcttggacatacgtgctcagcgctttctttgtcattgcaaccaactctttccgaacttgaggatcctgagaatcaagaagactcaagtcgatagtagccaaagatgcccagttgacttgatgagaattattttatgagaattcagcagaatccaatcgttagcacagggacagcagagccaatactcgacgagttacgtacgatcttgctttgtctctggagatgacacccatttgggtagatgcggaggttcaaccgaagcaggcaatctgggtatatctgcgcgaagagtggagttgcggacggttccgacggttgccatgatgttctgtcaagtcttcttttttgagggcctgtaagtgaagatgggagatggatgagttgcgaatagagatgcacatgcaagcgacggctttatatcaagtcatcctcaacctggagatgagcgaaaggctaacaatcacttcgggtgacgacatgctccgtagaactgattaatcagctgtaggcggataaagcgcggacgccataaggtcgatgcgtggtcggtacgacggatgtcgccttgtgggattaacatagcgtcaatcaagctaaccctaacactatcttgttcaaattcaaaaagaaaaggtgcttgctcactgtgttctatgcttactctgtgctttctctcagacatgttggaacagagatgtgaatgcgtcgcgcaacatgctgcacctaactctgcaccaggaaaagaacgaaggagcaagaatgctggtgtttgacaccactactgctacgctgatcgctgaggctgaggctggcacaaactgaacccataacccatggggatcttggtggttcatgatctgaggacaccctagtccaaaagggccatgtatcgactaccatcggtcgaggtaattttcaccaagcccaaggcttgtaggcatccactgtatgtatagggtttcaaatttcttctggggaatacggaccgcaacatttaactctctcgttgaggggtttcagaccggtttggacgacagagccttaatagcgcaagattgaggtctttacaccagccaggacaatgcggagattatctccttggatgcatcttcatacacgacaggatgtttccgaccttgcttccaacaattacatactgggtgatgccaagtgcagggtacctcggattaatttcaaccgcgaaagtatccaaaagaaacattaagatacccaattcacagaaggtttgatcatggccatctctatataaggcagagttgatgagtgtccaagaacgtcaaaccaacctcaacttctcccgtccacatcaatccaaagctccattgacgactctcaagcaaaatgaacatgtctcgccctgctcactcctgcaaaagtgcgttcaaaccttctatcctgacgtatcagtcacatgttgttttctgcgtttgactcatcctctcctctcttcactaaccactgcaatctaccacgccgagatagtttctatgctttggaactggaccactcttgatgcttgtttcctttcccgctcatggcacgtcaacacaaaagcccagttcgctggttcggtcatcggcgttttccttctcacacttgctatcgaagctgttcggagactcggtcgcgagtatgatcgtcgcttgatcttgagtgctgaaatcggatctgccgcttcggatagcaaacctgcatgttcgaatctcaagaccagcaccctagatggagcgagtgacatctctaactataagtaagccttcagtgtataaggtgatgcagaaagcttctgtttggtttgattttacttatcattcccctcactaatcatgctctggcaagcttcactccctcctggggtcaacacattctccgaagtatgatttacagctctcaattcacagcaagcttcctagtgtatgtcttgttttctgttccgcaaaatcttcagtcatttcaagctgactctactcgcttcgatcggacatcagaatgcttctcggaatgtacttcaacggatatattctcttcgccatttttctaggtcatacattcggatactgtgcatttggaagggacacttgcgcaaagtctggttctttcaggcataccagtggaaactgttgttgaaaggccttatgattgctatgaaatgcacaaacattccatcttccgtcatatcgtggctcgtcagatgcacacataacggtaaactatttggtcacattgcgaagtgtaggagatagttgaaaggtgaattctctatagtgatgacgactgaagttttgagacctcaaaacatccttcgaactattttctatcgattctaaactaggcaaatgtgtttgcttctgtgtcaggcgctgttaaggttcgttgtgtcttttgttgagcattatccatggacttcaagaaatttatctcaaaccctcaactgctagttggtaatgtgcgcagtttccgtgccgacatgtcaatgcgctctagatcttcgaaagtcacaatatcatgatacaacacttttgtgagggatatgggacttgaaacaattgtaaccaccaaataagatgtttggtacaaattcataagaatattgttatcactaccattcatccaagagctcaccttgtattatctgagcatgttgtcctgtagaatttcagccaatatttaattgcgcttatttctttttttttccatgaatgtgagcaactaaaatatcggaatgttttctcgtcaaaatttctctcttttgcagcttgaaagcaaccttgatctaagtttaaccgtgaaaaaagcgtcactccgtttggcgaccattgacctctgacacatcgatccaaatttggtctcatgtcaaaaccttgctacttacgctcgcaccaggtgccactaccgatgataccatcttcattactaccgtcatgaagaagcgacatcgatgaacgataaaaatcttgcgaacgctgtcgcataatgaagctccgttgcttcggtctggtcgatacaatttcgagcaaaccttcgtgtgagagatgctcgacagctagcttagggtgtttcttcggcgagttcaccataattctagccagttttggcctatgaggatgtctttgtgtattaatggcctgaatgaaactgagaagctcgacatttttccaccccggcagctgacaaaggacgggtggggagacccagagaatccctcagaacttggagcaacgatctatacagtgcctcctcatcaggcacgaagacagatctcgcttgttcaccgttgagctcgcagtctgaactaagatctcctgcttcacatagacgtagttcacgtacaggatccgcatttggatgctccgtgcattgtccttatgacttgactgcacctatcaaccacagctcttcgtctgcagtgggtctggaatatgcgcttccgctttcctctcaactgtcaagcagtgcttcgccgatgttatcaatggacgttagggttttagattcatagatagttcttttagca

SEQ ID NO: 3019 - DNA, 504 bp, Xanthophyllomyces dendrorhous
tcctcctcgcacgaggcgatacggcctcttgcgactcttattcaaagagtcccttgatgtccgatgactttcccaagggctctttgaatccttttctctccaaaccgaaggtaggagagcttacggagaagcaaaaggaggtgtaaccgagtgatgcttcttctatgcgtctctaaagagtcgctcgtgagcggaaacactaatttcctcgagtgagccctttagagacaataagtcgttatgcctagcataacgctcataaaagctcttcttgcgaagaagaagctcttcgacgtaaaaatacttaaccgagagcttcttagagcaagaaagagacgacgattagcctccgaagagttcttcctagaggaggcttttctagtctcccacaggaggtggaagagacgaagtcgatgatacttttacaagcgccgcaggcacaacaagaagcagaaggagcgtagcgggtgatgctgattccaggaggaaggctaaagccacaaa

SEQ ID NO: 3020 - DNA, 347 bp, Xanthophyllomyces dendrorhous; identical to SEQ ID NO: 192

SEQ ID NO: 3021 - DNA, 416 bp, Xanthophyllomyces dendrorhous
ggagacgtctgcaagctgcatatattttgatggaactgtcgaggacgtgaccgaggtgacaggaatggaagatgaagataaaatataattaagagcagcgtttgtgtttgaggccggtccagatgttagttttgaaacacacttagtctgacagtcagttggcgtttttggatcagaaacgggaatcggaatggaaacagggtggttgggagattgatgacgagggatgatgatgtttttgttataatcaatatcaggattgttttttcgatgccatggaacacccaagatcacttcgaccgaagagatcgcagccagatgtaaggacaccgactcagtgtacttcccgagcccaagctcgccagtcacgatggagtcaatcggaccggtcgtcaacggcgtcccgtcaactgtga

SEQ ID NO: 3022 - DNA, 373 bp, Xanthophyllomyces dendrorhous
gaaggaactcgagtcccggttcaccatgaaggacatgggcgagatggccttctgtttgggactcagagtcaccagggacagaaccaaacgcacggtcagcatcgatcagctaccatacatcgaagagatggtcaagaagttcgaagacagggagacataccctgtgtggacacccggcatggtgtctgtcgatctctcaaaggagatgtcaccgaagaacgctgaggaggaggaagaaatgaaggacaagccgtatgtcagccttctcggctcactcctttggctcaccatggtcaccaggccggacctcgcatactccgtgtccagactggcatcgttctcgtccaacccaggaccaagacactggaaagct

SEQ ID NO: 3023 - DNA, 458 bp, Xanthophyllomyces dendrorhous
atgaaaagaaatggaaggaaacgaaaaagaaatgaaagagattggaagaaatgcgcaagaaatgtcgagaaataagttcgagaccgggcgcgggaagtcaacgagtgaacgaaagatcaaacaaatcaagcaagaaagagatgaggaaacaaaccaggacgaaaacaagaacaggaagatgagaatttagtagtaaaaagaacagaaggaacagaaagaaccgaatggaatcggaaagagaacaccaaaagatccttgtctggtcgagaaagagcaaagattgaggatgcaaagtggtgagcttttctggactgggctggaaaacaaacaaaaattgacttggagaatatcttcccttttcaccctgtttcctttcttccctcagatcaacacaagtcccccaccgacatcttatctcccaccgtctcccactatcctctgctatctcccactatctc

SEQ ID NO: 3024 - DNA, 1741 bp, Xanthophyllomyces dendrorhous
gagtggaacgactagtccctatgggaaatacctttgtaggggagtcgaggaagatctcctccctgcgctttatggtcaaaatagctggagccattaaacgtgaaacatgaatgacggcgttgccgctgctactagcatcggagtcaccgctagccaatgcatgcttgcagcagcaaaggcaatcggtgcaggtctagccgctatcggcctgacaggtgccggtatcggaattgggtcaatcttcgccgctctaattggcggcgtagctcgacagcctgccgttgcaggtcagctcttcagctacgctgtactagggtttgcactagcagaagccacaggactattcgccctgatggtttctttcctagtgctttactcctagtacaactagaagagagctgccccacaatgggcaggagattctgctggaggagtcggtggactcacggtacctcgcgaggttggggcgagtaccactattcatgtttccgtgtaccccaacctgccagggttggtgagtccttgactcaggtttaagggctgggagatcataaagagaagatagcattggccccgtaatccctgacgggtgagctagtacgtgttatagagtccaaagactctaggggataagctattggtaagcttatcttctaggcgaagagagacagtggacagtctaggctgaaaggcatagactgtaaggctctctctagcaagagtagattgctcgagaggagcaactatggcccgtggaaagggggactgtatcagagacatgctgaaatgcaaggaagcagtaaggttgtattgcgtttctcatacgccggtaacatttggccattaaggcgtatgaggtatatttctttgaaaagcggcgggaggacaccgctataggggatcgataaatctcaatgagctctccccaagcgtggagaggcattgagagtgaaccatagggcacaagccgagaaccgcgagacaaagagatgaagagcgctaaactggagtcgcctggtccgcaaaaacaatggaagaacgtcagggtaaaggcgccaagtaagcggaacagcacgaacagaagggacttctattactgtggagttttatttttcttgatccgaagcccccgtgggtaggtgatcaagaaggaaatgtgttgatgatcacctaaacagagcacgtttgtgtcttcgggttgagtagcgaaaggaagcgggtagaaccgtgggcgttggtgaaaggcgcggggggcacctactctgagttagagagtttgtgccccgtatgagaatttattcttgtatgggggtggggcagtactagagctgtcgccattagtcctgctagaaggaaagccctttggggtatatctttctgttcactacccgcaggtagctcacaaattctgttatctacggatcactaatgcccagagatacccccgttttcaacgggtttacctctattatgggcatttaatagtggtgatccgagctcgcgagataccggaggtatttcttcgacaacgtcttgttaggaagaaatagacacctttcggtatagacgcgagcacccctagaggaccctcaggaagaacagcggacgataccgctgggacaacgggaaagaatgagcgagctcattctgagggttgcgagagacgatactctcgccgaagggcctatggaggcctggtgatcaaggggcgatacccttggggcagcaggctctggaagcc

SEQ ID NO: 3025 - DNA, 485 bp, Xanthophyllomyces dendrorhous; identical to SEQ ID NO: 197

SEQ ID NO: 3026 - DNA, 324 bp, Xanthophyllomyces dendrorhous
ttccgtgcgccagctctcccccttacacttgtggcactgtgtctccctcggctgcctcgtccactatgaggtcttcagttgtctcgtccagttgcagcaccttggaatagccctctgccagtatgttgcttaccacgaccgtagcatcatcgtacatgcttgtgaccggtgtgccagggaacaccgtgtcctccggtacgactatgtagtccatcagtggctgatgttcctcattatcgcccatcagttccattgccctggaaagccccagttgagttctcacctcacgtccgcccacatacagcttcatgtcggatacacggt

SEQ ID NO: 3027 - DNA, 536 bp, Xanthophyllomyces dendrorhous; identical to SEQ ID NO: 1483

SEQ ID NO: 3028 - DNA, 1422 bp, Xanthophyllomyces dendrorhous
tggaactggaactggaactggaactggaactggaactggaactggtgaaaggaacaacagaagggacgagagatgtacaggaaccgatagatgtaccgcacaggacagtcagagccgtgactgtggatgtagtcgtttgcaaagagaccgatagacccatgtcgtcgtcgtcctctccattctcttctctgtcgtcaccctcttcgtattcagatggcggctctgcatccgaagatatatagatcggtccctcagctacaccgtcctcggtcctgtccagtgcgttcactctctcctccgtgtctgccttctccaccgtcttcgccttcttcttgctgtcccgacgcctagctaccggatactcggcacagacccaggtaggatggagctcgtccgtcgagtcgtccgactgtggggccaagtcggactggtggctgatgttcggatacacgaccggaggcgacagagaacgtctcgtggctgacttgcgagccacccgagcagacacatagagccctctgaactgtgcttgcgagaggtagacctgtcagtcagacacggatgaccaagaccacaagccggtgggagaaaagggatcgagtaaaggaaggtgcgaaacaaaatgaggcagagaagaagggagagaaaaagatcgcacaaagcagaaaaatggaaatgcacaaacatagagagaaaggcaaacgagtgtgagcacgatgttcctccgatagcaggcaaagaaagagagaaacgaaggaaacaaagaagaaaagaaaaagaaaaaaggtagaaaaaagagaaagaaagagaggaaggaaaggaaggtcgttcgacatgcgcacctctttacacgcgtccagctcgtcctggatcagctttgtgagcgctgccttcgtgggcgttccgttcacgcggatccccatcgcacgggctatctcctgcaatctgaaggggcggtggagagatcgagcaaacagccaacgcagcagccgataggtggacagacaggcaggcagaacgatggaccacaagatcacgagttcgcaagaccacaagaacagaggaacgcgcacggaaccagcagaagaagtaacagagatagcagaaggccagtcgcaacagatcagtgacaagaaaagaaagaagcaacaggacagtcagtcaagagcctgtgcaaagctgcgacgtgctttcgacaaggacatcacgatcaaccatcgctcggtcggccgtccgtttggcaatcagagagaagcatagtccagacatgtgatcaagggtcggccactcactcgtgcttacgcttgttagcgagacatccgccatagatcgtctcaggcattgccagagcagaagaaggctggagacagaaaggagtggaaatagggaaggagagcagaggagaaacaaagagagaaagat

SEQ ID NO: 3029 - DNA, 756 bp, Xanthophyllomyces dendrorhous; identical to SEQ ID NO: 201

SEQ ID NO: 3030 - DNA, 480 bp, Xanthophyllomyces dendrorhous
gaacatccatccgtccgcctgtctatcagcatcttggctcggtcagcagcaggacatcacgaggcagcttgtcgtgttcgaggcagagcaagaagagacgatggatagcaagaagagacgatggactgcatggtagttgatggaagaaggacgatcgaccgaggcccgcagtttgcgtgtcgcgtgttgttggcggacgcgttcggtctgcctggtgttctctcgtctttcctttccttccattctccatcaccgtccactggccacggttggacagtatgtatgtgtgtgtgagtgtgtatatatgtacgttcgtctgttcatctgttcgctcgctcttttctcctcacttcgcatgtagatgaccgttggctgaccgtatgcctggtggacacagcttgggtgtttatgaaatgcagttggccgaaagggaagccttgtcgaagagctatctgacgacgatcactcgacattcttcgg

SEQ ID NO: 3031 - DNA, 25978 bp, Xanthophyllomyces dendrorhous
atcactcgacattcttcggagcatggctcaagatgggcttgataacttgaaagacgtctgtcactgtccgcggtgaagacaacgtctctgttgaccacaaggaccgaaagaatcaccgtcccgatgtagctaatataggcctatcattcagtaaagaggttgtcacctagacgagtcatccaagatacggttacctagtaatgctctaagctcttgggtcttgcgcccaacggtgactcaggagaatcagaagttgggaggagtttcgagatgcgatgtcttacagccagttgctcattctcggaaaggttctcatgtgtatctctggcttcttgtacctctgaatttgttgtctcgacccagcatgctttctttcgctctcaccttcgtcttctatgcgttcattgctttctcccattctgtggaagcagatctggtacaggctcctctcatcaatagcacgttttcaagtaataccacgctcggtcctctgttcaacaccacgatgttcgctcccggaacagagccaggcatgtactcgtccaacttttcccgactcgtcatgttcggcgactcgctcagcgacaacggaaatggctcccgagtgctctcgaactgaacgaaaccggatcccagggtaggtccttcgtctggtttctcgtctagcttctcgtctgtttttttgtctagtttctcgtctggtttctcgtctgtctcccttcctgtgggtcacacgatcgctgggtctgatgggtctgcttgtgttccgacctgacgaaacagatctactggaactaccggtggtcgaacggaccgatctgggtggaagacctggcagagcgtatgtcttgactcgtctgtttctctctgcatctgacacgacgtccgacgtgggctatcgcggttgttccttgtcttttcttggctgacgtcgccatggtctctctggtgtttcttcggtgactgtgtgatatctctttgggtcgtcccaggactgaacatcaccttgtttgagtacggtatgtgcatgctcgtctccttgaccagtttacttcttgatctaacgatattgaaacttgctctcattttttgtaccaatcctcttcaccatatgtttagctactgggggagctacggtgaatagcacccgaacgcctgctgtcgtggatgaagtcacctgtcttcatgtcccatcggctctcgagcagatcgaggcgtttgtgaagaaggcgaactcttcgcttgaccacgacaccctggaatatactctgtttgccatttggatcggagcgaacgatatcattactatggtcgacagcaacatttccgtcaccggagctgagatcgttgacgatatctttgtcggtattgagaagctgaaggctgttggtatgttctgagataagctttagccctgatcaactacacacaatgattgaagtcattctactccttcttaagtgccaaacatttccttctcaactctgtacctgacatcggacggactccatttggctcacacgtaggagagaaggcggcatcggtgctgacagacaccacgctagaccttcgtaaagctctcttctctgtcgtcgatgctcagacggctatcgctcgaaacatgtcttcaatgcacgcgatgatagtactgtctaatggtatcgtcgtggtggatatgtttcgggcggcggatgagatttatcagcatcccctagcatatgagctttcaaaaatagagataaatcagagttgtgttcacggccagagcgctttcgagctcaaatacgtgattcctgtgagcttgtgcacagattcggacgtacacttcttttgggactcagttagtctctccctgcccctctctgattgatctcgatggtaggccatggttctgactagttggccggtcttcttgttccatatacttggcctgatgatgtcagatgcatcttacgcgaaaggttcattcgttgttctcaaaagctgcagccgcttctctgcttaaggcgggttggatctctcaaagatgattgatttgtaaaaactcaggtcttggcctaattaggagtgtacataggttaccaaaaaccaatcaacctgtttgtcgtgacctagcatgcattttctcgcttcttccagtgttagcgcatttgtcttttttcttccttgtgcgggaaatattatcaaagactgtgtgtattagacaagaaagaacgttcgattttaagataactccattcaatctgtatgatatgatgacaggaggtgttcatcatatcattgttgttattatcattattattatttgagagttctagttctacactatatggtcgttatctatacaacagaaaggcttgaaagaaaaagattcgaagacaaaggccacaaggtcaaccgatcaaggggaagtgatcaaggaggatgaaggaacgccgattcagccacctactcggaggttcacaccgatggcttggcttgatcttggggacaatggagtaggagtgtctgctctggatagttttggtctggtggacctagacatgggtgaggagcgcgagaaggtggaagggatgaactctgtgggcgaggtcaccagcggtgacgtcggttcaatcggacgtctctctctgggcgtcaggtttgccgggcgagctgaaatggaaagaaagaagagggatgagggtgataagtctatgtagacttagataaggatcaagtgagagacagggcagtatagagacttactgagttcgtcctcgctactagatccggaagccgagctggaagtccggcaggagggccgtgtccaacgcttgagtcgtttgggcaacaaggcggcagtggtagtagtggtagtagaggcaagagtagtaaacattgttgtttatgcttggagtatgatcgagcttgtctagttcaaagcttgaagagtgtttacttggatgcgagatgaggatgaaaccaagattatcccaactgaaaggccatcttataagccaaatctcgagcgaacgtaatgtacattgaaaactgcagaccctcggtcatttcgagcaacgagggaaggcgatggttgataatccgcgcccggtcgttcgttggcaagggtaatcgtcagccgagccgagccgggcagaagcagagggcgtggagagaccgcctgtaagcatcggcttagcaagccgggcaggggtagctgacaaagcctatggggagtgcgcatgtgtgggctgaccgggcagagatgaccgagcgggtccgggggccgaggctcggatgacctgtaagctgtgcagaaaggttggcacgtggtgaccgcgcgtcatgcaactttcttttcaattaagtcgcgaacaatcagatattttatcaggaatactcttgtctaagctttttacgtaggccctgacatatcaccttcttctctccttctctgccgtcactcgttcattcctctgctttcgtgaatctctcatccatttgatcttctgcttcgtcttcgtttgcctgctcttatcccagagcactctccttctgttagctgtgggaagccgggaaggaagaatttttaacatctcaaatagtagggatattcaccgttcggaaatgacgatcaacagaaccaacccgtccacgccttcctcggccgcaacgaccttcagccattcatccttgttggcctcgtctcccaactcgacggccgcagaattctccgcctcctcctcacaacctcctcttccgcctgcatctagaccacctctgtcttcccgggcgacatcgactacgctctatccagattcacagtcgtcctcctcgtttcggccgagtgtatctagaatgcgtagcaggtcagtctctaatttgtgcctctctcggacaagcgtttatcttttcctgcaaagtccatccatctctattggctcgctgagcatcactgggctacgtctttgtctctggctctggttttcctcacctcatcttttcttctttttcttctttctgtcccctctcaatgagtgctaatctgtctactcccattctcttttcccacccaacagaggccgttcgatcaccgcgaccgatccgtccctgttgctctccacgtcgtcgccttcacatccctctttcttaccatcccaatcgtcagcctcgactacccaccatcagtctccctctcaaagagcgtctcccttaccctctgttgggcttaacccaagcatatatcctcgttcgagagcacctaccctctccgttcttccgtcgtctaccaggcagtttgaatcaatagaggacgaaccagacaccccaagtagaccgagagacgcggatacctggatcaaacctaagaaccctaatcagcctacccacggtcgaggcaggagtctctcgcttggcgttcagcctctcaaaaatccgcccagttcgaagcgacagagtccagccaatgggcccaggtcgacgaccacctcgacagcccataaacacggacctcccaagcggtccaagccctggggagaaagtctttttggattctctaatgccagtgtaggtaacctgggcatcggcacgaactccagagatcaactttggagatatccagaagagtccgataccgaacattctccaaccgacagactcgaatcttaccatcatcaagacggttctgactcgagtgatatcgactctgatgaagaaaatgcgtctggctcccaggacggctcggaggctagtctccggatcagggtacagcagcacggatccaatcttcatctcccattgatcccgttcaattcgcttccccgcaggcccacactcacatttacttcctcttccaccaccctactttccaacccacccgagacggatcagaacgcttcgagctcgcatcagacatcctacttctacgacgaccagaacgcattccctccgtccctacccactcccgcgctttcatcctcgtcactctctagctacaacttccgtcctgcccattctcgatctagcatcgatctcgttcgcaacggggattccctgaatgaggtcactaccaccgtcagcacggccaggcgagtcaccaccagagaacttcgccagctcgcaaagggtatgattcctactcttatcgccatcgccatcgcctttctatgtagctttgggatcgttatcggcctcctcagaggattgcctatgtaaatattgcaattttcgtttgttactctcttctgtaaagtctctttttccaaatcactcatcgccctttcgcggtacttctattgtttctttcgaatccagcccaccaagttttgagggaaggattccaaagtcctcagccgacatccaacttgtttcttcagccatcaatcgctacatggaacactcgacctcaggttatctgcacaccatgcttgccttgggcttagctggggtttggactcatgcctggagtgtccctggttcggttgtacttgtaagtctagctcaattgtctattcagatattcttgggaaaacaaattccagaattaacaacatctttcttctttattccttctcaccctgaccttttcccacctctcattcatttagaatgtcctcctcggtgctcttctccctgcagttcctgccgtgttctttctcacttgctcgaccacactcggcggtttttgctcctaccttctctctcgacccctctctccgttgatcactctgctgtttcccacccaactcgccgttgttcgggcctcgatcgcctcacctggcttatccaccaatgctggtggtagtaagcaaaccggctttggatcaggcccctggagaaaactgtttgtcatgcgagcgaccgggcttgtcccctggagcgggatgaacgttgcatgtggggtggtgggcgtccggtgggatgtgttctgtggaacgtttgcagcaggcagtctcagttggaacgtatgttcattttctcttttctctcttttccttctcggcgcatgctctgttctattgctgatatcatccacttcgcctcttgcctctgctctttgttttctggccagtatgtgacgtcccaggtgggcgctttgctcatgcagatttctcaaccaactaatccatcctccgacccacaggacccggccccatcggaatcaattacttcccttttgcgggacccgagcatcatcatcaagctcgttgctctctccctactgtctctcgttcccgttcttctcaagcccaagacgacggtaaccgtacaggacggtcggggaccgccgatcgagacatccgcctctgccgggtggtgggcactaccccttttgacgaggatgggtcgtggtcgaggtgcagccggcatgcttggtatccttcaacgatctattggctccatcggcgccatggctagtaaatggatgggagtcgactggatgcgcggaatggaggagggttccactaactctggtcatattcgagaaggtctgatgtctggaactcgttgagagccagtgaaactgctcatcacttttgtatctatacctgccctgtcccctcactctttcggtgaatgcgcttgggagtctcaggtgtgccttcatgactccacccctttcccccaaatatctttcaaacgcatggtttattatccatattgctagatcaacgcataattgttaaacatatcaaactttctgctcactctacttgcggagttatttctttatcatatcttgggtcattctttacttgcatatcttgacctccaccatttgtctcgtacagtcagctctcaaccttcttctctgccctataattgtatcactactccatatagcctctatacagttctatcgaacgcctatcactagtaagcacttgtggccgttactcaaagtatgaggatgttatttctgccgatcgtagccttgtctcgtggaactcacacgggaacgttggggacagatcaaggcggaaagtgcacgtgactgtcgatccttgctgtgctcaacgtgttagggttgacaccatcatgcccgacggcccccgcccgtccggtctaccgatgacgggaacaaactgatctacacttccaacacgcaaacttgagttctacttccccatcaaacctcatccatttctgtttggacctcgacatccattcgtgtaggagtcatcgaccatgtcttacaatcaccatcttccgaagaaacttgagttcaaagtcaagaagcatcatgggttgaccggagccgttatgatcgccgggtttctcctgcctccccttggtacgcgtctcattctcatcccctttccttcccttctgtctatacctcttttttcccccccccttgttcgatacctgacagaaagaccttgatacaccgactgttcactcactgtcggtatactgattgctctctttcggggttaaattcgaacaaaaagccgtcgctcttcgcttcggaatcggcactgatttcttcatcaatgtcttctgtacgatctgtggctgtgagtttcttgtcagctttgatctgcacacattcgttctcttcccgaaagagtgctcatatactgtaaacaactctattctgacatgctttgctttctgtttgtaaaagactttcctggccacggacacaatttgtaagtctacacgtcgtgaattcccgggaaaggagaagtagtcttggcacgactctatactgaaccatacttacaaccatccattttggggggagggggtttctctttcttttcttcttttcgtataaacactgatactgccagctatgttcaaaacattcgaaacaacactaacaagaagcggacccctaaatgggcgttgaaagccggactggtggatgattccgaacagcagaggagaaaagcgaagaacgcgtggtccggaaggtaagcccactttccagtcctcagaacagtagtctcctttctcttccgatgtcttttgttccgactccatccctttgctactatatatgtaactgaacaaaatctttcattactcgattggaatgacgctcagatacgaagagcgaaacgcccattcaactttggaaggccaggattacgaagaaggccagatcgcggacgttttggccaatccgactgatacttccatggccggcggaggaggtgcgagcagaggtcgagaagacaggttatgggacgagaacgaagtcgagttctacaacgaaggcatgttatcaattctctgaatcttcctttccttgtacatcagctggaatgttttggattgatcaaggttctttttaatgttatcgttctgacgatgtcttctcccttttctttaatcatgtttatcaatatgttttctggctacctcgtctctctttatacactctagccgaagctcccaaccaacggcatcatcattacccgatgaacttcgagggcgccggaggctcttcgcgtagccgaccctctcagtatacgttcgacaacacggtggacgaacctaagaaatctaaaaagtcgagcaaaaaggtatccaaaaagcaggtcaactatgataatgatgacgacgtccccgcatggggcgagacttatggagctgtcagtcattcgttatcttcttttgtgttctcgtgcacgacgttcatccgagaaaatatatgctagatttactcaagttcactgacgtgaaacttacactttctcatctgtgtttttgcttctgttctgttttcagcctcgacgaaaccgagccccgtctggctcatctccttccttgatttccaactcgtctggaggtgatcatagcagaggcaacagcacaaggccccgggacgatttggatcatcagttctgagcgaacgcgacgtcttgtttttatgacttctatacgttaactctcctcctttttgccctctgccacttctgtttgtttcccttttcgttcgttctgcaagcccgaccatgtgggtttgcggaaaaaatcaaacccttttcattgctattcgttttctttatcgatcggtaatacccattgaaatatgcccataaaaattgatagaaaaaaaacggaccataatcaattggaaagcctgacttaaatcgtttgatattgcaaaaagtacaaactgcattggtcatagggcccagatatcaacatttacatcgtctcaatcagtcttcccgtgcaccatcgcccacttcagcagtcctttgatttccctccaatttctctcatctaccgtttttctctcctgttccgatcccgaccgcccagcatgctcacaatccaaaatgaactgtttagccccctccttggcttttgataggtcacctcctgagtcaggatatgcttcgaggaggaacggatgcgacaaaagcggaacccattgggttgcattccagaacccatcggcctcaccctcgggctcctgtgagagcgatcctccttcagatcgatgcaggatcgtatgcaagctggaagtcgagatgagacatgagagacaaagacatgccgattgttgtgattagcaaaagcagaagaagaagtagtaaatgaattagtcggaccatcaggcacgacaaacgaaaataagaagaaacaaactaatcgaatatcccttgctcttctttctcgtggtcctggaggatcatatgtggagcgtcccagtcggaattgagaaggtgaagagcgggtaaggcgcagaccggaacatggtcttcatcttcatttcagcagtagaacaattatagacagaaacgaattgccacgtcagccaagttgagagcttagcaacagctgatcgttttgtgactgactagcatcgattaggctaacaagtgaagggtcccaagatgttcctttcgccggattgacgggacctggaggtcggaggagcaacggatggaagcgagcctatgactcagaagaacgggaagcagtctcagctttacatacaatgtgcatcgagaagctcttctgaatttcgtacggggatcttggctagtaaaaagtcttgaagcttgcggtccgtctgttcttggtctgaacctgaagttgaacaagagactgtggacatgagtggctttttcagtcgagcagtggcagacaagtgtttcaaacgcgtatcaggagggtttacactgagaagagaaggatgatacaacaaggaagaaagcgatatgccgttcgaccaggatggctagcaggagctgatcgagaaaatgaagctgaacggtgacgatcgtcataaagaaaaaaagaaggtgaaaaagaaaggtcgcttatagtgtttttgattttcgatcgattcatctatttaaccgccgtcagctaaggctcaagaccaaggcgctcatagcatgttgggtttgcatggttcatattataatcacataaccacctttgtcttctttcccctcttctctgctcctccaggctcttcgttcgccctcttgacctcggccgcatcctctcggagcttgtccaaattgagatcctcctcggcccattcgagcacaagatgtcgaccaagcaaatgggtatgcttgagagcggccatagcggcctcggcttctcgacgagaaaagaagtcgaggaaagcgaaacctcggccctgagcattgaatttcttgggaagtcgaacagacttgacttgagcgtacgcgctggagagaacatatgaaaatgttcaggtaagcgagtcatcgatctcaacgagcaaaagagagaaaatttaaaggacacgaacgtaaagagctctcggatatctttcttggtggcctcgaacggaatattcttgaccaccatcttggtggtcgtctccctccatcccttcttcccaccctccttcttgtcatccgttccttccatgtcgtcatcatctgttccccgtttcgcgaagccaacctcgagcgcatggccctcaagcttgaaaccatgcatagccgccttggccgcttgagcagcttcggctgaaccaaagccaacgaatccgaaacccatgctctgtttctgaccaggccgtttgggatctggtttggtctggacccgtgcgaacgagaaagaagccaagtgggagaatgtgctggttagaagcgcggaagtggtggtaaagttcaaattcttgatgaataacgttgcgttcggtgcagccgtcctagaaacagccgtctcatcgtcgtctttgacgacagtggcatcggacgtgtcagaggccacagctggaacagtcttggccttaggtactccattgaacagtcctttcgggcccttctcgagatacatgatcgaattgcccattcgcttgtacgcaagcgctttgaatgcggctcgagcaccaactgcgtctacaaactcgactatcgccatcgtccccgccggcggaagaagcagccgaacgatctcgccatgagcggcgaacatctctgtgagcatagcatgggtcgtaccgtaagggatgttcttcaccaaaagaatcgtaggagaacgaggtgttgacggcgagagagagtctaaaaggagtccttcctgaagaaattgataaccatggcgaaaccccatcagtaaaaaaaagagaaacagcatttccctaaattagactgacctcttcaaagtactgcttcgtttcctggatgacatgggtctcggccaaagcaagcttcacagctgcattaccagattcggagttgaggatgtcggctttagaaatgttcatcctgtcggcaatagaagaaaccacagcgtcactctgagagaaaacaattcacagtcggggtagttaataaatgaacatggtggtcacattgtatctaaagagtgtgacgtacgttcatgaacaaaaagccccattcaaactctcttccttcacccatagcgtccgccttcttcttttcctttctcttgtctttcaagctcttatcctcactgtccgtcgtgccacccaacggcgctcgaccgggtaggatatgtaacagccgacccataaagctggatccatcaagtctctcccaggcagcaagcgcagctaggttggaatcaaagagaacgtaagcggtacccagtggcttagggggtacagaattggaatgaggaagatggacagaagccagagagccaaaggggctcagtagttgacggagatctagatcggtgcacgagaatggtaaattacggaggaataatcgagaggtcgagaggatcatatcctgaggctatttcataggaagggcagtgaaaaaaggacgggcagtagaggaatagtcagcaatgaacacctctttaccaaagcggagagagagagagagagacggaggaagacaagagagcgagagaaaaaaccaatgaggaacggagagattcttacagtttgttcttcctgacttccgtcaacagctctcccgtcagcatgcacgacctcgaccttcttgagcttgtcttccgcactaagattatcaccctctgtttccacctcgtctttcacctttccactcatcatcttcttcatccattccgagtcgtccatctcggcgtctccatcattcttctgctcctctacttccggaacaggctcaatcttgttgacgcctgagttagcagcatcggtggccgcggcagcggcttcatcggggggcaggtcttcccacgacctccctccaacagccgtgctagctcgtttagaagttgctaactgtataaactcttctttttggttcttatctttggcagatgaagactttttgagccttttggacgtcccaggttgatccacaggctcacgggtggaagcaggaggagacgaaggtcgtttgagtggtcgagattctggtgtaggcaagtgattcggtcgaagtgacgttgaagccttggactaaagacgtttgtaaaaagaaaaaaagcaaaaaagaagagaatagaaggaacaccctcaaggtgtctcagtcctcaaagtccccgatggtagtcaatcaagttgaaagagagagtacgagaagaactcacgtcgtccactaactcggccttcagcctactgccttctaaccaagctccgttccaccaatgaaccgccctttgggcttcatcagacgacctgtagcccacaaaagcgaatcgtcgtctggacagtagtttgagatcagtgatagaagagccaggtggaggcaacggggtggtggaagaagaaggagctgaagccgaggcggatgataggtgggaccgaagcgactcgggagtagtcgtcggtggaagattgaggaggatgatacgagttgacctgatagcgcgtaacaaagttcatcagcttggagaacatacttccgacacggctactgaggacgacaaaggagccttacatgctgctgctgctgatgatgatgttgaaagcgaggtcgcttgctttcggaaaaaatgcaaaatattgaaagagttgaaactttctcgctcttatgcgacgcgcagcaaaaaatcattttggattttattattgttattatcatgattgccattaatgttttcttagtatactcatcagatagatcctgcgatccaacggccaacacagaagaagagtgtggacaggatgtttcatagaaaatcagtgtagcgcatccattcagtagacagcttgtaattttgtcattagagaacatagagaagaagattcatatgcagcttaaaaaattcatcagataatctgtaaagttttgagagagccttgacttgatatcttctcaagaacaagatgggataattgaaggccactgattctggacatgcagaaagtaagcaaagcgaagcccatctgtttggtccaatttcttttagtctgcttttatgaactcgtctttttgggttcggaaccttcagcctcgacctttcgattagccttgagccgatcgaggaggagggtagttccaagcagaagtgaattgcgctctcccacagtcgaatccccacatcctgcccaccggatcttcaagttctcgtccttgacaagacaaatagaggaacggacgacccaacaagattaggcctgtactctcagaacttgatctgacaaggagatttaaaacgtaccaccagatagacgtaaccagccaagttattcacgatccccatcatctcatcctcaagcgagctcttcaggttttgggtcgagatgatgtaattatcatgctggtctttcgggacgatctcacgaagattcgatatgaagaaggtctgcatccaagcctttaccggcaagttttgaagtgatacctattaccgatacattgttcaagattagcaacaattcgagatcatgggataaaccatgctgacatactgagcaaaatatcaaatccttctcatccttgtattcggtccgaacggccttgacaaacgcctcgcattgtctctggttgtaacgatgagtttgggagaagagttgaaataaaagtcaatcggttttgcaaagatgctcacgctatgggacggagagaatagataaaaatgctcaccgcttgaggaattgtgccgaggatggacagtacagtgatcttgccctggcagatgtctgtggtgtgggtcttggtctctggatgggccaaggtcttgccgtaaaggttagggaggtacaaagctttctgtttgccatttgaacagaggcaggatcaagagaagcgtatcagatccagtcatcgagtatcagagtacaaagtctgaaagtagtgccgaacctcttctttgaacagcgtcttcggtgccaaccagccttttccacctcgactcgaggcagcttctttaatgtttctcaggttcgacctaccgaattccgcaagactatccagcgatgaacagacgagagatccgacgaacagaaacaaaagtatatcaactcatttgcctttgagtatatcatgtacatcacgccgactaacattgcctgaagctttgcttttcgaaagtctgagtccaggcttggtaccaaagcctgtaaccaggtgatctccttggcctctggcctctccggtacacccagcgttctggccagtccgggaagagattctgtactggctttcttttgagttggcgaggagacaggcgtagcatcgggtgaaggcgaatggacgaaaggtttgggaggaagttgaggcgaaagctcttggtgaggagcatgatctggaataaagagcccggaagaagagctgacagatgcaggctcaggagcaacgggcggaggtgtcggagggggcgtcggcattgtcggtggtgctggaggaggaaggatagtagccggaggttggtcatgatgcttgtttgctaacggaacggcggaggcaaaaaacctatagggatttgaaggtatggaatgagccggatacctagagaggatccggagagcgaacagaccgctcatgatggattgatgtaatgtggggtcaaaaatgagatgcaacaatggtttgtaagtggtgaaggatgatgatggtggtgatgatgatgtagcgaaaggtgcaagttgtaattcattaggaaatctttcaacaccaaaccataaagctgcttttcgaattctattcaactgtggatctgtcctttttatccatcatctacattaaatcgcgaccatagaaaacacttcatatgtcataagtaaaagaaataggaacgtagatacaacttcgtacgttcatcagacaacgaacgcagcagaggacagttgaggtttctcaagcgttgacattggtcatgtcatggtatcgatctcctttgatctggatatctttcatcagctttcgaatcgcttcatgttcatccttggagatgttgaccgagacggcttgattgttgtcctccaggtctgtggtgagcaggtttaaggaaggatgatggaaaatatgtcagtgcatcaatctcaatatgtccataggttcaacgatgtggcctgacatttgactcgcttagttccaggaatgggaattgctccttggtccatgacccaagccaatgcaagttgattcgcagtgatgttcttcttcgcggcgatctgaacgttgacaaagttaataatccatggagggaaggtttagttggcacttgaatcactggatggcacatattcacatcggaggagcatcttagcgcacctctttgagaccttcgacaagcttcatgttggcatgaaacgcatctccctgaaaccgaggaagggccttccggactaatcctcgtcaacgaccaatcaagttggtttcatgttgagcaagtaggaagatgaagatgatgagatcaataacgggaaagatgttacatacagtcaccctcaggaatctcctcagaagacttccaggtacatccgatgattcctcgtcccagaggcgagtaagcaaccaacttgacgtctaacctatgaatggaatgtttactcatatcaactaaggatacagttaggcgtacagcggtagacgcaaatctagatacgtactccttgcaggcatcgaggactccattcgtctccacatcaggagtgaacaccgagtactcccactaatcatcgggccgacagcacaaacatcgtcaatcttgctttcgagccagagctgagtgggcacaagctgaatgattggcatacctgaacggcatgaatcttggcgatcttgctggcccgtcgaagagtatcggccgaacactcggataggccgatgtatctgatcttaccagccgtctgaagctccttcaacgctctgacagtatcctcaatgggcgtgtttgggtcgactcgatgctgatctatgttacgaagggccccgtcaagaaagctgatatgttggaaggctgagcgatgcaagcaccaagaatatagtactcacagtatagatcaatgacatccactccaagtcttttgagcgaggcctcacaggcacttttgacatattctggatctcctcttaatccggcgaaggaacctcctgggccacggacaattccaaactttgtgcaaataaagatcctgtcccggtcggatttgaggaagggcgcaaggagcttttcgttctcgccgctaaagtcgaattccgaagatgagagacgtcagatgcatggatcacctaggtatttgtggatgaaggatcttttgaagacgctcacctgccatacatatcggctgtgtcaatgaaggagcaacctctgtttgatgacaatatgaatgcgtacatttagtaggatacccatcttagatttgagaacaagaagcataaatggactcactgttcgatgcaggttcgaaccgtcttctgagattcttcctcgttaccagggccgtagaactcggacagtcctgtagtcgacacccaagaggagaagcagagtgccaggaagcgtttttgtcagctctatctgtctattattgtctctatgaacgtaaggatggacaacatatacacaccctatagtaacagaagataattccgtttgtcatgcgaagggtttggatgtattagtgtgacttgatcagtgttatatgtagaagaaaggaaggtttcgaaccatggctccgaacccaatcttggagacctgatgaccgaagaaatcgacagtgggaataaacgattgggtggacatgttgttagtcaaaagtagtgagtatgtatgggtagatggctattctcgaaggagaacctcctaaatctaaacatattgattcggtttctatcattcagatttctcatctcagagatggaagtggaggtttgaaaaggtggaggttcgatgggtccggcccgccaggataggtgaccgggtgatgacgcgtcctttcctttatgttccggtcacctttctatgccgaacttggacgtggacctctccacctaaagtacacttgccatcaacaatgagtggggagatccttaaagttggttggaagcgcacatttttttcacacacatacacatatgaacttcttttgtaccagagaaggaagagcgttgatatacgacataatcttacaaaatgtattcaaaacaacaccatttcattgggatttcattacaactaagcttcagccaactatattatcattattttttatggagagaacatatcagtatattgaaattcttcaagaacgaaaccaaagatgccacgtaagaatgaggcgtagaaaggaaggggcatacctcacggtatcgaccaccctttcgaaggaattgtgtgtgcgtcccagattcaagaatctgcccacagtccatcacgtaaatcacatcggcattgagctgttatcacatggcgaggaagaagatacattatcttatcaaatcagttgggccgataggaaagaggagaatgacaagaaggaattcacaatagtttataattgatgactgtgtattttcgaaagagtgcaaaagagaggaaagaaatgaatcattaaaacagcatatgcctctcaataaacgagaatcattcgaagaccaacgatacattcacgtaatcgtaattgtagtccggttgatgaatgcgcgatctaaagcttgttgaacaaagcgcctcagacttattatccagcgctctatatcggtagaccaagacaggaatgagcgggttgtcatgacgtcttgaggagtgaacgttggcgcagaaattacgtacgaggtagattcatcaagctatttaagcagaggacccgatcggacttgatcgtcagtgattttttcttctgttttggtcaacaaagcacgatagggacacgtacctggagaatttgagcatctcttaacaacgctcttgctatacaaagcctttgcttctgaccaccgctaagattcgatcctttcgtatcgttgggcggatctaacccgagctcaggcgtcgtcacaaattccatcacctgagcatctcgacagacatcaatgatttcttgatccgaaacttttcggctcaagcccaaaactagattgaaccgaatctatacaagacaattggaaaagtatcatacaaaatccacaaagccatcattcagcctaattctaggttcgtcagatagtaagaacttacagttccttcgcgcaagaccgcatcctgtgagacaagcgcaattttgtccaaatgttcgtcaggagtgacgcttcggacatcctcgccatctataaggatcgctcctctactaaaagggaaaacgaagtgagatacagcaacaaatcacgatatggtattaacagccgcacatatagaccacaaatgaaatgcgatcgaccaaccaaggttcatagaaccgggagagcagagctgtaaatgaacttttcccgcttcccgaagcaaccatcagacaaagattcaatacagcatattggatattaatctttcacaacatcaacccacatagccatcaaaaaaaatgtaaggaggaaaaccgatcaaaaagggttacgcactacagaaagcgaccctctgacctgcaggaattcgaagatttagattctcaatcgccagttgttccttccgattagagtattcaagattcacattcatgaactcgatttctgttcctttcaacgctaatttcatcatttctggcaactgccgctctaccatcgaagatgaatgcggagtattgagagcggccccgagaggctctctcctagtctaacaaaaagctaagagcgcatgcacagcccgactgatatcaccaaggaaaacaaacgtctttgagaagaccattgcgcaaaccatggcggcctcgaatgtagagaagagctcagcgacagcgacagatccgtcggcaagttgatatcctccataccaaaagagcagcccgcatacaaacttatcaaatcgaaaagtcggagaaaaaaatggacgaaacaaagaagaggtgaacatacgtcagcggaagttcaagagataaattaagacactaacttacaaggaccacagtttgtgagagcccaaatataagggaattccatgatacagcctgtcgatgctccttgatatcaggttgctgcttcttgttgaacatctccgctacgtgtgtttctcgcccaaatacagctacagtctgagttgaagagttcaaccaatataaggtggtcagacagagtatgaagagaaaagagaatagcgtacaaaccttcatagagttgacgttattcgacgcgcgtgaaatcgccaagtttataggtttgctcagttcttgttcgagcttattcatatgaataaacttgtcataacctgtgggaacaagcaacagagtgggaagagatccgatcagaagaatatcctaacttaaagggcatcaagaggaagagaatgcaaaagcgatgagaatgagttgtacagggggaagaatgaaaaggtaaaactttgtctcgagtctcccctgaatatacgtccaaggatgtatggaccaacaacactgtgtgatcatgatgaaaagagatgatttcaatctctcagctttgcaaaacacgccaaagttatggtatcacttacttaagaacagatatgataatctaatcatcaaccaaaccgagaggcacagcggcatttgaaaaatatgtcgccagatttgaggtcagacaacccgctccgttctcttcaatatcgaaccaagcgactttctgtgtttacatatttagaaagaattgagttttgaacttaatatctgcgcattcggccgaagtcgagcaacgtatctgcttgagaataacctcagcgccttcacgtcgtatccgtctgatgatcctgttcgatgctccatcaaaaaacctgcccagaaccagattgcatagcgactgtacttcctagcaaccatgcggacaaaggccaattcgtgccactgtccagattgtcattgacagacgagagacacaggcgatgcattccacggtcagatagagccgatgtagcttcgctttgagaaaaactggaaatgtggggaaacagccaagtcattcatcagcttgttcgcgttttcaagctaagatccgaggttgacttcggaacgcgctcaaggatgagaagattcgatcgtcggacaagagccctagccacagcaactaagtaagagagaaatttatcagccacgaagaacatgcgccagaaggattccggagaaaagccgagaataagaagatcactcacgccattgacgttgacgttgaccgcccgagagcagcccagtcttcatcccgtttatcatggtgtctaggccttcgggtagctgaaagataaactcccagacttgtgcccttttcaaagcctcactacatgactgtcttaccctggcttcattttttctatcagcagcatattcatctggcgtgcctgttagacagatggcgacgttgtcgagaatgctaccagcaaatagtgcagggtcctgtagaaccgtagccatctgttgacggagaaaagagggctgatagcttgatacggggacaccgttgatgaacacgttgtttgcaagcgaactaggatcaggcacatcatattgacgaagtagccattcaatatacatagtaaagatggctagagaaaatggtgagcaatattggtataccttccggaaatgcccttccgctgattaggtgaaacagataacttactaaagccactagggtaaactttccagagcctgaagctcctacgaatgcggtcacctttccagcggctgcgtcgagagattattccgtccaaactcttctggttcggcttcgaaggaaatgagaaagtaagacctcgaattcgcatactcaattttttcgaaaccttattgtagtggcctctcttgattccgagattgacagacggtagagtcgtaagtcctgcaggattctgatagtcgatttcagatatcctctcgatctcggctctaacttgggcttgggccgcgaacgcttcatggagcatcgtgaggtgcgacaaaatacttatgaccgctgatcatccattaagtgagaaacgtttagattgataagcctcaggatcagatggaacagaaaatatttctgatgacgaaccgaatatggcgctgtaagttgagaagaatgaggtgaagagattgccgcttgataatccgtggtaagcgactctaactccaccgcgatagactggagggaatgaaccaaccaatgccgaaatagtcaagctctaaaacgtggcctctcaccaagaaataagccagatagaggcgatgcaagatcgaagtttgaaaagcaatagtgaagacgatcaaagaaaatcttacagcaaagagcataggccgcaaaaacactaaaacaagcggtcgaaaaagcaaagcctttggagagtacaacgatgtttccgtccttctcgatctttcttagataactgtcatacacgctcacgagcgtatctgaggcttgaaggaccttgacaattctgacggtggagagaacctgctctaaaaacaaagcggcgtggccttccatccgcgagattttggcgaatggtcgagaggaaaactcggttgacagatatggtctacatgagtgcgggtttagagagacaacagaacaagatgcttgagttgagtcaaaagaggaagagacggaggctgaaacaagcgaaaggccttacagtatgccagcgaaaggaaaaataccaaagaggacaccaccgacttgaggagataccttgaacgccataaccactacaaccgttgcaatggaacgaaatagaagttgagataaggttgtcagtcagttgaccaagagataggagaccaataagaaggtacatgagaaacaacgtacgactggagcagatggttccaatactccataatagaaaccctaaaatttctctaatacctatctgaagacatcttatgcccttggcgagtctcgagccgacttcgccagcaccaacactctcgaagcgggccgagtcctgggcggttacagaggagatataggctatcctaattcgggcgcacatcctcgatgaagccagagcgacttcgagatgtatgcgcagggtattaaaggtcagtgacacacttcgaatgtttgaagatagcacaagatataggaacagacagcaaccgaagaacacagaagagaagacccagaagccaagtcctgttgcaagcatgatcagagcggtgaatctagacaccatacgaatctcttctggcgagccggttctgccgttctggacgactgcgcggaggtatcgatgtagacagtgcacaaagaaaaaaccataagatctccgagaacaatctgggtgacacatataggtaaagatggtgagagaataatcgtacgtacggccagatgtccattgtccgtacatatagtctactaagatagttggaagagcgcctgcgggaggaataacaggatgatgcacaatggagaacaagtatgaatctcagttcaccttcagaagtagagatgaagaaagaatttgctgtcagcgtgagaactcgcttacaacaaagactaccgaccaggccaagagcatatagaataagatctgccctggttgcgtatgagagaaagctacgattggtgatgtaggcaagaaatgggaaaacaactcggtataagcatatatgtctctaagagatacttgatccagctcctgactgataaaaatatgaacgcgcaatctctttgatgtcagaagcaaagacaagagagaagacgaagaggaaaacggactacaatactccaggcaatggctcgaactttttcaattccgggacgtttttgatgattgatgcgtactgtcgctgtttgaccagttcgtctgctgcttgtagcgcgtacctgtcttggctctgcgacgacccgatggctggagctgttaccattggcatcaatgtcgagtttacagtataacgtcaacatcgatgagggaagatgaggatgtgtgtagagtaaggagaaagcaaggtacccgactgatctatggtttatagggaaaattgtatagactactctcgggaacacgacataggcaagagggtgggtaagtaggtcatccggataccattaatcaaacatctatacccagtggccagagcaattaatggaagcaaaacaaggtgtttttatcaatgttcggggcaaatggggcataagtcattattggaagcgacactacatgttgtgaatgtatgttcatcaccagctttgtgtaaataaaaatgaactatctctattcttctcaagagctagcactgtgaccgatccgaagctatcgtttaagaaggctgtagtgatcattttggaaagaccggcttggcgtccagaaaagcaacttccctagaaggctgaatgaacggatctagtgcctcagcctctgatcgcgaataagcattcgcgccgtttggggttctactgtttaatcgtacaagtgaatgcattgatttccgatctgcgtctagaaaaccaacttctccatagggctgagtgaacgaaacaagcgcttcagcctccgatcgcggataagcatctgcgccaatcagggatccatcatcactttatataaataagtgtataggcttgcggtttgaatagttctcagatgttagtatcagttaggtcttcactgttgtgggtggacttacaaaaaataaataatcacgatgatacactacagaattctctattgctctttttctcgacgcgtctttttctgttttgtttttaattcattttattttattttcccgggcggtgatttcttttcctactaacacaacgaccatcaagatacatacacaccgaccagactgacctttctcttcccttctctgtctctcccgtttgccatcagtatggcttctcctaacccctgggcgacttcgttcaggcaacagctacacgatgactcgaaccatttggataacctacaggaagccatcgacaccatcggttacggctggctcaacggctacatggacgccgtattctcccatcggacggaaactgcccgatcgtaggtgcctttcgtttgggtttggtctattgttctgtctcctttactccttgcattcgcaaagagaggacaatctgtctcacacagtcttcttcttttgttattgttgttcttatctacttcacgtgttatccttgacaccgccatcctcgtccatgtttgtctctgattgcagagctatcgcggacctcatcaagacaccttcaggtaaacggaagacaaagactaccactcaggctgaaagaatcgccaaagcagaacggatccgcctggtgaatcttgagatggagaatgaggctcagacgttggccaagaagaaactcaaggttcgtcgatagctttcttatgtcgtgtcatgattgaactcccctactgatacaggatgggcacggctcacctatctatatatctatatcccactcttactccactcgccacatcacacactgttctcttaatagacaaagaagacggataagaaatcgacaaagaagactgtacctgctcctcaacctgaaccagccatgtcagaacgcgaatccacccctgttgccacccctgctccaatctcctcaccaccgcaacctctaaggcggtcgaaacgttcttcagcttcattccaaatctcaatacctgcatccgtcccttcatcacctccgctaccaccttcttccgtccgttccgtagagcctgctcaattaacggaggaagacgtgttgatggtcgaaacagagcaggcttcggttgagacccgctcggtagatgcttctgaggctccgatggccgtccaagagcagaacaaaggagaagccgaagacgagtttgcagatcagggagaagagaaggagaaagcggagatctcggcagaaattgatgagatggaggacgatccacagatcgaagaggccattgaggtagaggatggagaggaagaggaggaagcggaggagggagaacagcttgatgacgaacaagcggaagaggatcatgaagtcatggatgaggagacgcaggataaagagatagagaaggagga

SEQ ID NO: 3032 - DNA, 27013 bp, Xanthophyllomyces dendrorhous
aattctgcctttaaagatgagaatctctgtggagcctcatgaggagatagaagatatcaatgctgctaggacagccgaaaagatggacgaccaggacgaagtggacgatcaggcagaagcggaagatccacagagaggagaggagttggctggagacgctcatccgaatgcaaaggaacaagacggtttgactctggacgccgaacataactcaatagagcagctcaaagacgccgccgagacggctgagagcacagtaacccctaggaccgcctcccatactggccgtcggtccgcggagaggaaggtgtctctttctgattcaaagtccactgccgctgttgtatccccagttcccgttctgggatcagtcttggagtcaacctctatctctgctcctcaagaagtctctcaatccgctgctgcaccatccttaaaatcccaagaacctcccacccccgttgtccgacctgtcgttcagagttcctggttaaataaggtctacaacggacctagcgcttcaagccgactatctcaagccgcctcatcgtctgtgatcgatagacgcgagagcgccttaccctccgccacaagtcttggcctcagccggatctccggcatcgggggcgtcaggggagtcccttcgtcaaaaaggaagtctggggacacgtttgaaaccgagtctttctctttgatgacggcgaccgagcaaccactcaaccaacccgctccgaccgaagagccggtcgtatctcgtccttcaaagatctcaaaaaccgatgaccaatcttcctccacccttcctatgctttcgaccattagggcttccattgcgggttcatcgagcgctcagaacttaacctctcctgtggctgtctctgtcgatggccgaagtcgtctccagcaaatgatggatgagatgaaggctagggaggaggctaacaaagagaacgcgaggaatcgatgggctggagggtcggtggcttctttaggactcggtacagtaggacggatgagttcggtttcgagtacactacttggctcgactagtagagcgacgatgtctggcgcaaacggattttctctcttgacggtcgaacccccggctcaggaatcgtcccctgtgcctgaaccggcgcctgctatcactcaggagagtaagtcagtcttgatcgaagaagctgtgcccgaacaggaggcacctccagggcctcaagaaccatcttcaccgattagggagcgttcctcatctgttcgagagcgttcatcgtctccccgtaaacgatccatctctccactggaagtcgaggaagagatgatttcttctcgtgaagagactgtcctttcaatcgctccttcgcctgcacgaggaactgttccttctgcgaaagaagcttctcctcctccttctcctcctttcgctcctgctgttcaatcgaaagcttctctccctcgctccgtaccaccttcgcccaaatacccgtctactcgaactgtaccgttcaccacaccacccgcgttctttgacgatgatctaatcattgtcgtcgacgaaacaactacacctgctaatagccctcctgcccccgcccctcgatcacatattgttgctgttactgctgttcctgctcctgctcctgctccctcttctgtatctgctcctcccaccgagcaactcaatgcatccgggtctgcaccagcgagcgtgtatgcgcagggtactaactttgctgcaaaggttctaggaaagaaacccaaggtggacccgccaaagagtgtccagctggctgctgaagctgccaaaaaggtgaagacgctcttctgtatttcgtgtgatggagttaatctgagaatactgatatttgtgtaacattgaatactacaggaacaagacctgaaggatcgtaggaccgctatcagtaaagtccatgagcagactagaatgcgagccgccgctcaaaaagcagctgaagagaaggcaagagaagaggaagagaaactcaagaaggctcaagagactgccgaccggaaggctaggatggctgatgtcgagagaaaacggaaggagagagaggagagagacaagaagacaagagagacaaaggtaagaacgcatccacgcctccattagaaagtagtacactaactagttctctttcttttgcgacccttcaggctcgagctgcggaagaggaggtcaagaaacgcaagctggcggctgagaaggcatcgtccgcctcggcgcccaaatggctcgcttcttccactggtcccaaaagctcggcaaccgctaaccttccgaacaagcccgttggcggtttgacttcttctactaacaagactaaagtaaatccgtccttccggcatctccctccgtcctccggtccgtcttcacagcaattcacgacatcaaaccaatctcaacaacaatctcaaccgtctcaatcacaatccaatgctggtccttctacaatccgggtcatcaacggaattgctagtggtccagttcgcctatcggacatggccaagactcagagcaccagaacatcccaagctcagggtgggcagtctgttcttcaggcacaacgacgtgccctcatccttgctcaatctcagtccaagctgccagcgggtgagcaaaacggagagtccgaagctatcgagttgcctgatattgcgagtgaatactcagactcggaggatgaagatcgagcgcagaagcatgcgcagttcccggtttggacaacatcaccatcgatgaaggccgctctgaaagagcaggagactttcaacccggatgatatctttggaccaatgaagcctcttgccatgggtgcgctttgcttccttttctgatttagacgaacgtgtgtccatagatcactgatgtttctgtgcattgatacgctgtttcattttatcaacagaggaggtcttccgggtcaaagcaagcaagttccggccaagaagtagttcggcaaattggtcaaaagatggtattaccgcccgagaagaggccgagtatgccaaaaagatggggttcaagaagcttcaatagtttttttcattgtccttcagtcttgtttctgttatcattctttcttgctttgtgctgctcccttgatttaccgttcctgtcgcatctatcgctgcgagtttcaatcctgcgcgctctaatttctctgcctacgtgttcccactcagaggacttttatactctctaacttttgtcattatcacatataccagtccgtttttccagacaatggccatcattatcatcatgttactcctttatatatgaatcaatcagtgtctgcattatactatggaaaatgtatcatcatttacattctgttgtaatcctgcttgaaatctatcaaagatccaaccgaatcaacgtatactgctcagaagccgtctcagatcgtgtcagtgcgagtgcgttctgcagacggctcgacttcaactgatttgaattagagaagcattcagagtttactacttaatcaaggagaaaggaccatttacgcggcctaacagagtagattcttatgttatcaatatcaaagcaaatgatgagaggtttgagctggcaaagagagatcagtagtgaaggtctttgttagggttagcggagtttgaaccgggctggcagtgacaagaaaatccggcaaaaattggacgggctacatttcctcgcttgctctaacagcgacccagacactctgtaaagagtagtgtgtactcactcatatccttctcctttggtgaagtcttaacctttgttgttgttgagctcccttcggtatcatggttgcatactatgatgaagttgaaattgaggatttcacttgggatgccatcaagcgggtcttccatttcccctgcccttgtggcgatcgattcgagatttctaaactcgatctgagggacggcgaggagattgctacgtgcccttcttgctcgttgattgttcgagtgatatttgatcctgttcgtgaaattttgtctcagttcttcgaaacttagagtatccataactcagtgttccttgggtttctttcgattacacagcttgactgggaagattatgaagattcagaagatgacgaaggcgaggatgttcccggctcgccagcctcctccacggtctctttccactctgccgcatccgagaccgtcaagcctgcttccgctgaggttgatgccgtggccaagggtcttgagcttgtcggattgaaggacggtgactagttcatttttgtatatgtcttctgtcttttcctacgttggactgtttactaccttgtaagtgccttccctttgttcaatccatcacggctgaggaggacttggtccgtatattgtcaaggatgatagtcataaatgcatagttcaatcagactcctctactagggaactgctgaatatcatcatcgaaattagtctttcacccctatctgaacatccatcgcctgtctgaaacctttttttttgccttacacccatgtgaacaagccaatgctgaccctgtcttttcctcgctttggtaaagtagtgataaaagatttctccataaaaccaccgcctaagagctctacggcttcaatgccatcaggttagtcaaccatccgtttgggccactcttccttcccttcccttgccagggtttcaatgatgaaatacttctcagacctgttccgaatttactgaggacaaaaagccgtcatctcaaacttaactcgacacctctgacgaatccctggcatcccatctttcttccaatcttaacttcgataagttttaccaagtagttgatactgaccgaccttgctctggatttcactacattcctgaacttttagtataggttgaaacttgccgtttcgtttggttgagtttgatcaagagtccttatgctccatacattcgatttacctgcgcacatgtctgtacggagttgagactttgacaggaagcgttgtagttctgtacgtcgttgtaaaccgataggatgtatgctatctttatgtgttcaatgtaacatcaggtcaaagaagaggactatgaaacatgaaaccacgtgttagctgactaagcacacgaatcttgtcaagctcaccgctttcgtgtcaggctgagcgaggattccattctgcaacatttttcgatttctcctcaaacagaccatcaatcaacctataacctctaacctcactctttcaccttgtccaattctgtgctgctgctctcctacgatggatccatttaagcttctcacacagggaactcacttctctaaaaagtctaacaaaaataaccaggttcaagcgctcttcaaatccacacaatcagctacctccgcaaacccaactgccacctcggattcctccgttcctccgacctcccacgctttacctgcggcacttgacttctttaacgtaggtgctgatgccggtactggtcaaaatgaatcagcatccgatgggaagaaaaggaagcgagaggagaaaccgatgagagcggttgctcctcgaattctaccgacacctacacaccgagtgaatctgacaggtagagctgcaccaactccgttggcctcacttgaagaatttgtcgaactacactcgccaccgccatatatcatcagaaacttggctgaaatgggaatcactgagatgagcgaagttggacgaggtgcgggaagtgtgatcatggctgtaagtttttctgcgacattgttcacgttaacttttctcacaaacaggggatttggatccgacgtctctttagctgacgtcgtttctgttttgatcattgctttttcatttgtgaaaaaattatagggacgagaccttaccgctttggctcctaccggatcaggaaaaacgatttcttacctgctgcctcttctcactctgcttcgtcaaccggcgtcgtccctcaagtcagagtctaaagcgtctacgtcttcgtcgtccagttcgacatcgaaatctcctcgcgcacttatcgtgtctcccactcgggagttggctttgcagattcagaacgagtgtgccaagttgactaagggacgaaaatggaggacggtggtgctgagcaaagctaaccaagatactgtggtcaacggagatattggttcgttccggctgtatttatccttgagggccgagatagagagggacagacgtgaaggaaacactcgatgactcattggttgattcttcccatgtcgttgtgtttggcagatatcctaatttgtacgcctcaaagattgatgcaaacgattaaggacaaatctttgtctctggaaaggtgaggtttcaaacctatcacgggtgcgcctaatcctccagaacccgtactaactcccatagtcatcctcaactataacttccgtccccatatagcactactcatctgatcatggatgaagccgatcgattactcgactcgacgttcttgcccatcatggatgaaattctctctcatttgacctcggctgagctaaagcgatatctcttcaccgccactcttcctagtacactcgaggagatcgcccgaggactcggcaagggagacggcatcagattggttgttggaataaagtgagcatctctacatatattgatccatcatagttcatgcatgcatctaacgtcactcttgcgttgctcagggatgcggtgacatccaaaatttcccagaagctaatctacacggctaccgagaacggcaaactgcatgctcttcgatcactcctcaaagcaggatcccttccacctccgtgcttaattttcgtccaatccattcaacgagcgaatgatcttttccacgagctcgtctacgacgggttcgcgcttgatgtcatccactcagagcgaacccccgagcagagggacaaggttgttcgagagttcagggaaggaaaagtctgggttttgatctgcacagagttgatgggtcgaggtatggactttagaggtgtcgaagttgtggtcaactacgatttcccagccggtgttcagagctacgttcatcgaattggtatgtgaagcgggtttcatttctttgtcacgagagaggaaaaaaaagtacggaggtgtaataactcttgcttcttgctgttactcttcaggtcgaacgggacgagcaggtcgagatggtcaggcaattacattcttcaacaatgaggacggcgccaatctcaagatgtaagcttcgtttgccatggattcaccagccctacgatccgtgttgggcctcataagacaaggaaaagctgacactgcatcgagtctactctttgaacctttgatcaggatcgctaatgtgatgcgacaatcaggctgtgaggtcccagaatggatgcttgcgctgaagaatccatcaaagaaggaccgcagaaagcttcagaagaaaccgacggatcgaatggaagtccgaacggccgccggaagtggtctcggccgacagaaggctaccaagagacgggagatggtcgagggaagcaagagacggaagacaaagggggatcaagaaagtggggatgacgagtaggaatctgtcgatggcatttagactcgagctccagaatttgaaatggccataagctgatagagagtaaacgacaagacgtcatgaaacaagctacgcatcatccagtaaagtagaggaaatactagaatatacaactacacttgatataaagaagacctgcactcgcaacaaacctctacctacaaccactcttttccctaacaccgactatcacaggcgattaagaggctgagtctgagacatcacgcactcacaagctcgaccacaccctttttcttttttggttgagaattaaacgatcaagtcgaggagaaagaagccaagcattgccttctttccttgctacaattatctcactcccgctgtcactcttctcttgctaattttctttgacttggaatgatgacatttgaccgggtagcaaacattatgacacaatagacgaagcccaagagtttgagaggagcggagttcttcatcgtcaaaccgaagttgctttgggttgacagatagtagagtgacgatcatgtagcgtcaggcgacaaacactaagattgatacaacatcggatcaaaaaaaggatacaccaaagacaaacgataggcaaattgaaaaatagcgcgagtgtacagacaactttattcatacgagcacctccagaccttccatcgcctcagctgcctcgacaactacatcaaacattccactccatgttctcgacaaacctgcaaacgctgacagatcgaccgttttcaatccaagatgttggcctagtgcccgccgctcttttaaatcggttaggaaattagtgattaatttgagctgggaagcagcattttcctggagagtccaaagaaatgtaagcgccacgctctgttatctgcttccggatgacacgcgaaagattaggtgttaagacaggaaagaaggtactaacaccttgccaggatgggtgcgtgagagaatttggacaggggaacggcgtgctgaggagaaaacttaatcgctcaacactcgttggaagtcttctccaaagtgttggcttcatatgatgcacgttcatcgaaccatatggtctttgttcatcctcagacggtcgtagagaggtcgttggaacgggtattgggattgacatgtttggcgggttgatctgaagttgaaaaatggacacggacaagtgttgataggtcattttaattggacttaacaaagtccgtttgagtgattccgaaggggtaccgtcgagtttgagctcagtcagttcgagatgaattccttccaggtttacccctccttcactgccatctgtaggtacgttctcgagcttctcccgagcggccgatgagcaattgaagaggatatgcaagactctgagtcgccgaaatcttccttgagcgagtctattcagaaactggttccagagcccagattcaaggatctgatcggtaatcctaagatcaaactcaaggacgctcgaccaaccaggtcggccgttcttgagaaaccgttgccaggcatcatatccggctaactttatggatgtatataatttcggcaggatagtgtcatggaagagatggttgacggtgagaagaggaagtattgagcggaagcttgctgggtcagacgaatgattggcacagaggtggttcgaaacaagataaagtagttctgggatatccagtggtgagcgctgagcaaaagcattcatgacgatctcagagcagacaagatgaacctggagagagacgaacgaaggtcaaaagaaggtatcgcaagatttatatggagactggcctatgactttgttgtcctcgaagtctccctcgggcaatcaaaggcccgaccgagattcaaagtcacgtgacttcatggcccgtatccggttggcgccatgctacgcacacactcatcactcggaatcgcttagacagattggtttcttcagagatcctatcacacaggattcgtctgaggaatggcccaatagtttacgtttcacgccccgttcggcagagtcaagtgtccgtcgagcttgagtgagatcagcctcggtcagaccgaaagaatggaggacgtccaatcggatatctctaggaagctcgagtaaggtgggcaagtcgagttcgggaggaaaagcgacgggagctatgtgtttgactggttgaattgtcccgttggaagatgcctttaaagaatctgagaatccgaagagggtctggggaagatcaacaacaagcgatgtagctgccacatttattctatacgttgagtaagaagcaaaaagccgtgaacaaacaagcgttgtcagtggacgagctccaggccaggagttcctctccttatgtagacttacacatatagctcaaactctccgttcgggtttgatcccaaaagtcctcttagcaaagctcctatgacgcctccacctccgacgctcttcgagtctgcgttgcctagcatccgatctacccgttcgccgattgacagtttccagtcatacacgaacactggcataagtgtagattgtgagttcttcagacctgaaggtattggcttcccgaacgatcgccgaacggacagacggagggtttcgtagaaccgaacaaatttgatcggaccatgaacgttatctgaatattttgatgatgaggatgtgcaaagtgaagctgactggaccgaatcatcattcatcagttccccttcaagccgaacgaggagagaatgcagcagtcgcctggtctctttcctaactcggacccaatcaaatcggggatccaatgcaaacgaatcctcgacggacgtttgagcagggtaatcgggtgacggtcggataggctccttatctattccatatagaaggtcccacaacgagtcagcctgttgggtaggatacatcgctcggaactgagcgcgcgagagatgttcaatcgtttgagagacggtcagactcagtggatccaagggggggccatcctcttcggaagagagcggaaaagtacgattgagagtagaagcgcaaaggacattctgaatttgtttctcaatcgagcgcccaaatccaggtaaagatctcagttgatatgcgcccgtaaacgctgttattcgagcctgtatctcgtcacttagaggccagtcctcgagcgttagatcaatcgaagtctgctgggctggcttgtgaaccgaggcgatcagcttggccagaagcttgttgtgagagattccggccgagctggttagtccaacgtctgcaaaaattcgggagcggatataggccgcaaggtgagaagcgagctgatagggcacgcagctgtgtcctactatggattcgggtgtaggactggtggaagcggtgggtgagaggatgagatggccttcccatgtataggggatgtaccagaaccctgcgtccggagttgagtcaagctggaaccaccttcggccgtcttgagactctcgtacgtccgatccggcttccagttgaaagagatgaaggtcgatgagtgatgtcacgtcgataaagagctcgtccattcctagtttctctacttgagtgcctactagggacctgacaagtcgaaagacgagccgggagtgtcttcggtagagcgtgagatcttctccattgacaagaatcaactagaaacagaaccaccaattgcgctcagaatgtcagctctagttggccaaggttacaagtttatgatgatgatgggcaaacctctggacctgtgaacgtacgcgtcggaaatcggacaaacgcgtccagaggggatggacgaaagcgatgaaagtcagctctcgtgacgttgtgtgcatcttcaagcagaacgacttgcaatgtttctttgcttccttgactgacatgagctttcctacacctcttgccctggcctcgtaggagcatgtggcaaggatagccttttgctggatcccgatcggcttgcccaagagggacgggtcccggatccgttcactcgagacatcttgtgaggaaacaaaatccttagcaggctgctttatgacaggcatgtttgaaacaacatcgagcgaaccatcttacagaacgagtccagatcgagcgcgataatgatccttctgcctgtagagcgttcggttgtgtccatggtatgatggtatgtgaggcaagatgggtgtgtaggaagaagagaaagtattgaaaatattgggaacttttgtaatgatcggattagaacttttgtaatacatttcctacgttttttcttcttctcttccttccatcaccaactttcgaccatccggcgaacagcaatatgccttctctctcgaaacttcagcggcttcatccaggaaagagtttaattaggactgtggaatcacttggtcttcgtctggtgagtgtcttatcgagcattctggctgtttgcctcgatcggtccgttccgtattggtctcagggttttttttctttttttttttcttcactctcggtcgtttgcctttcgtgaaacattgtttgatcattatccttctcttatctggtgtggttgatgttccgactatcttttctcgacctgaatctccgtcccttcccactcccgaatctcttgccggtcctggctcgctcaacactcatctgaatgactgttctgacgaaacctacagggtcaagataagattcctccgtcgctaaagaagagcggggtggtagtcccgatctggcgaaagaaaaactcggcagaaccccactggcacaaggctaccgttgttctgccccatgtagagcttgttgacaagcctttcaaggagactaggatcggagcattcatgaatagagagtggagaagaaaggagttgagcgacaagtacaagcaccacgaatgtttgttccttttctttccctttctgggtctcatattcttgcaaataaggatgggtagagaagtccgcgtcgaatggtcatctactgacttgcgatccactaacctttctcttcagtcaatcacatccccgaaggtcaaatccgaaatccgtttattccttggttcaacccagttatccgtcggtttgagagtccaatctacaccacgcgcgagcaacggcggttggtagaggaagctcgaaggttgaacatcaccgacgtccttccttccggtccgaaaacgcctccagagtttgcaaacaccttcatggacgtgtggaaggagacagggaaagaacgaacgcggacggagctcgggcgaatcatctgggccggggtgtacaagaagaagctcaatccttggggagaaggcaggttcactgaagacaggttgagtccggaaaagatcaaggagagagaggtcgtcgaggggcttcctaggtggggaccctacaaaggaagacagatcatgttcaagggctctcttccggaacgacaggcgcctgccaagaaggcggccactcaggctaggttggatacaatggatcagaggatcgccgcttggaagaaggtttgtctttctcttcttcttcttcttctccttctctattctttcttccgttctgacttgtctgaccttgataatccgattattcttcttcaccacaggaaaaggcagccgagaaggagaaggcaaaatccagcttgccttattaattatcaaaatacgaatgaaaatctatcctttctttcgtgtttccttctatcctggacttgtctgtccaggatcaaatatgtcacataaagacacaagtgaatggagaggagaaatactgagaacgaaggcatgtatgattgcataagctctttgtttagtttctatcttttttttttcttcagcatttccttctcttctctttcctatatctagttgttcttctgagcctcttcgtggactggtaaaaaaaagaaagaaaagagtataatcagtctgatggtattcgattatctccgaaattcctttccgccaatgatggaaactcaaagatgattgtaactcacatcgatcgttcaaaccaaatctgtttcgagcaatctcgatagcgaagaactaaccaaacaatgtgaacccaaagattcaaaatcattattgtgtcagtgtgaagaaaggaaggagaaatgaggagagaaagggaatcaggttttctcatacctgagctcgcagaacgagagtagtgttctcctgggcgtaatctccagaagcatcggttctgaccagagttccgaagttgtaatccgggaccaagttctcgtactatcaaacacgcaggcggagctactgtcagtgctcgataggaaagaggcgaagaaagaataagcagggtggaatgagcgaaagaagaacggacctccttgacgtagttcctccaggcttcctttcccttgacactcttcatttcatcctcgttgaggactctgagagcggcatagtcgttctctggcgagaccaacgccgggaagtctcggacgaggtgggcgagcatcatgtcgtccactctacacgtagagagcaagaggaaattttaaatgagaacaagataaggtcagaatgagctgctagaaaagaaatgaaagaaggcgacaaactttgtcagtcggatctttgaaggagggatgctggagatcaatttctcataagcctatattgccgttcgagacagacagttgatatatatatcgatttgaaagctttagttcaagtattttcaaggtagaaacagtcaagtttgaggaagacataagacgaacgatcatatgctcgacgacagcgacagcgaactgcttctcgatctactttcccagagtagagaggaataagtatcaccagaggaaggagaaatggacaaggagagagaagagcggtctcagcattcgatcggttgatgagggcgtttcagaagattcatggaagaggaaggaaacacgaacatcctgaaggttatcagctttctcggcgtcaaatggagcggccatgatgagtgtttgttcgagtgtggttgggtgttggtgttggtgttggtatcaagaacgaaagggagaaaaaaatcggtcgtgacgtcggcggagggagacttggaaaaaagactataaaaaagactacgttttgcttataagcttattacgaaaaaaaaagaacattgcacatttaagagccctcgagatcatttgttcttctatatcactcgggaaaaatcacattggattcgattcttttggaaggagatgtatgcgtgcgtgcgtatatatgtatatggatgtgttcgtacggataagctgatattcacaactttgaccaactcgcgctaggtttgacgccctctccgttagtccccaacccatgaggattcgccaactcaaactctgcaaatccagaggcagcttcaacgacttctaacgatgcgtcgggcacgatatgacctcggtcattccttcgagctctgtgtggtttgttcaggagggataacaaacagttagtaagcacgatctagagacgccatttagtgtccataagagaggaaactcacttgaagaaggtgtagttcaagacaacgtcatcaacatcgtccatcttgggatcactatggggtttgagagagagcggaagagaaagtgagatcagaaaagggatcttcccaaaagcgcataaaaacctcaaagtaaacaagaaagaatggcatactcgagcaggtctcggtcgaggaagaagaagacgggaagatcgacttcttcatttgctcggattctttgttcttcgaaacagaagcattcgaccttcgcgaagtagggcgcaatcttgcccggagtgacctatgaatgaagaacgattaggacgccggccaaaggagcaagatgatagcaaagaggaaaggagagttcaagactcacattataagtactgattccgatgacgtcctgatcggtcagattcttggcggtgtagaatgcgagcgcggtctctccaggtcgaacagtcacctcggactgagcaggtttgaattcccagggaagaatgtctgactttgcggcattaaagtgcactttgatccgtcggtcagaagatgtaggcaagagtcgatcggcctgcatcctagaaggctgggtcattggaataccggcaaaaccggtggctccgcagaatgcacggtagatcggtacggccgcatacgaggctccgatcatgacgataaactagaatcgagatttgaggggaaaaatcagagtgaaatttaagcgagtgggcatacagttagctcaggtataacatcgaaagacagcaaaagggagacagaacgcacgacagctgttccatagagagcaagactcttggatcgacgtgtcttttcttcgtaatacttttcctgggtctgtttgaccatccgagaatgagccgcccggagctcttcctgactcatttctggcaacggctttggccgtatcggcgaggatgaggcataccggactgacgaaggcgaggaagacacgaaagatgcacctcgagaactaaaacatcctgcaagtggagagaacgtctttgtgggcacagtcgatcgaaacgaacgactgaccgacggtcggaacggaggaaacacggatctgaaggaagcagccgtcgatctaggaagcgcattctggtggcggaacaagagagcgaacacgaaggtaagtacggcgagtgacctcgacctgagcaacaccaagcacaactcaccaagcaagcccgaggaacactcatcctgtggaagagagtaaaatagttggtcgtcggtgtggtcgttttggtgcaagagggagccgagcaaaggagaatacggaggaagcttgcacctcaaaagtcacgtgttgcctatgattcaaccctggctctttgcgctcatccacaacgctttgttccaagttctatggaacgatagaaagagtgagatgtgttctgtcattctagtccaaccgaccgaccgactcccatcccattgagcttgccatgaacgaagcaggttgaggacgagagccgatgaagagagtgctggtcgtcccggctgtgccgccacagaacatgttctccagcttcagcactcatcttcaacctcactccaactcccaccatactctgcttgctcatcccgcctttgacctcaggaatggcaggatagatggacctgctgcccacaccgatatcgccgctgtttcctgttctgatctttctcgcgctcatactcactggctatctcgctttcaccggcgtgctcgaactcgtcctcgcctgccgatcactcgcccgtcatctccggaccatgtttggttttctttttggatccacagggaagcctgagcttgagaggccacccagaagaaagagaagaccagagaatgatggcgagtctttctgtttttacgttgctcggttatcaaagctaaacccgtgaacaccgtccaaacagctcggttcgtgatccctatgaccgcaccctctccgggatattacctaggaatcgtcaatatgtccggcacgttttgctttctcaattctgttctccaggtgagtatagatctagagtctgatatactgagaggaatctactgtaacgctgttggttcttcttcctttctttctttcctttcctatcaaggccctctcctcgctcacgccttttctcgaacatctgagcgcactctccgacctggccatccgtacagatacgccaaccccgttattatccacctttcttcccgtactctttcagcttctcacaccatcacccacaaaatatcccaggcctcttcggcccaccgagctggtcgaggcgctccgtcagtcagacaccgtcaagcgatccggcatgtttggcagacttcgcgatcagcaggatgcccaggagctgtgggtcttgttgaacggctgtgtcgaggaagaacgcgttgctatcgagaaaaacgacaagagctccaagcttggtatcaagggtctcttggacggtaggggtggcggtgatgataccgagcgagaatcacgggatagaccgtggcagagtccgtttgagggaagaatggcatttaggagaagttgtcagatgtgtggttattcggagggaatcagactcacaaagttcgacagtcttagtctgcccgttcccagagcagtgggtgtttcctttttttttcttttttttttcttcctctggacagactctttttctcttctcctttctctctgacaaaaaaaaacctctcgtccgttttcgatcaaatcctagcggtcaacgacgttggaatccatgctggaagcctacacctcactcgaaatcctgacagactctcagtgtaggaaatgcagagttctccacacgctccgtcgacttcgagcgcgcttgccggagaacgaacgtgaagtctctgagcaagccgggcagatcaagacgaaatcaatgttggcatcgacgaattcatatattccgttggaagacatccttcggtccaacacggtgatgaacgatcaaggagaagaagaggaggagggaaaggaggggaaccggccgatgacaaactcgaaaaagaagcggctaagagaagcgaggaaagagcttgaaagagagagggaactcatcaggcagatcgagatactcgtcagtgaaaacagatgggaagataatctcgatggtgtcgcttgggatctggtcgacggtggaatcagcacaaggtttgtttctacatttgaaacaagaatccttggtgtcgggagcgagactgagcctggctgaaccgtgtttccttgccttgcaaaaacaacacagacaagacatgttatccctcccacctcggatactgacgcttcatctgaatcggtcatcttttgactatcactatgcgtccaagaacgcttgtcaggtcatctatccagcaaaattagacctcaccccattcagtacgaccggtacactatccctctcgcccagttccccgatctcatcctgtgcaccatctgaacctgtcggtctcctctctggtccgctctcgtacgaactatcatctgcggtgtaccactacgggtcccacacatctggacactatgtgacctatcgtcgggttcccttcacagacagatggctccggatcagtgacgacgacgtggcagagctaccgaacggagtcgccgacgtcagacgggccgccggagaggctttcatgttgttttacgagctccgcgaagggaacgccggatcgaaacagcaagcatgtcagcctgagctgagcgggcaaccacaaacaggccggtcatctgtctcttctttcaatatcctctcggacagagatccgtcacctatgacgaacggacacgttgccgtcgacgacgatgcaaaaatagaagtgacctgttcaacaggctatctgtcagagaaaccgaaaaaagaacaagaagaagagaaaagagtcgatgaccgagagcacgaccgcgggtcgactgaacaagaccggtcgagttcaaaaccgacggacgatcggaagaagaagcggaagaaaaaaaaagatcaaggagggactgtaacggagaatttataaacatgtatcttgactatcccgcattctcacgcgttctatgacccagagggaaccggaagaaagagaaaagccgaaatacaaacaagaacaagaaaggagatcaaccggaatgatcaacagcgctcaaacccaatggacccagccgaccggcacgatacgatgtagaatcctcagtcaacagaattgtctcactttcaactttatcatcaatcttttccttcttttaggaaactcaccttctttcgacattcattctttctttcttcttaccgtcgtctttctttctgcctgttggatcgttgtagcccgtgctccattcccctcctgtgcccgcttcgacttcccactcgcattcgctactcgtgttctcctggagagatgtcatcgtcaaaggccatgttttcaagcgcgctggtcgcgcttctcgccgtttccccactcgtgcaggctcacatccaactcgccagtccttatcccatcaactctgccctcaacccgaacacgccagaggccgagaaggactagtgcgtctgtgttttggctttctcgatcgttgatgtgcatctcatgctgattgcttttgattcccataaacaccatcagctccatgacttctccgttgatctcagatggcccgtacccatgcaaagggttcatcggtcaaggctatgaccagggcaccatcccgacctatactgccggtaaatccatggccatcacgcttgccggaactgccgttcatggcggaggttgtgagtagatctcttctttcttcttcttcttcttcttcttgttttctagggtggcgggttctgccgtgttgttctctgggacgcgtcgagtatgagtgcatgagaaactcgtcaaacgtggctggtctttgttctcgtcgatgttgttgccatcgtcgtcgtcgtcgtcgtcgccagctggcctggatgagaagctccctcgctaacatatcaattatgccttgtaacagcttgtcagctctcgctgtcgtatgacaatggaaccaacttccgggtgattgagtctcgtatcggaggttgcccctcagactcattgacattcgacgtgaacctcccatcagccgctcccgcaggtaagaacgtgttgttctcatggtcctggtccaacaaactcggtaaccgagagttctatcagaactgtgcgatcatcaacatcgactcggccgccaccgcacccttgacgggaccgacgatccatgtatctaacgctgacgtcaactcgtgtactacaatcgagggcacccctgtggtatacccgtaccccggagatttcgtcacctacggaggtgaatacgccgggctgtccatcggaaatgggttgacctctggagcaggtatctctgacacagactgttttgctcccggaagtgacggtgctggaacgtcttcgggtggtgccagctccactaccgttgcttccacttcctctgtcgccatcgctacctccacgcctgcagcgtcttctactgccgtcgctcaggcttcttcgaccactacttcggctgccgtgaccgcttcgatcgagccctcaagtgtccaagctgtggcctcctcgaccgtatctgccatttccgagacttctgctcctacttcttcctctgccgtggccgacgttgcctcaagctcggtcgtttcttccgtcccggcggaggcttcatcaacgagcgctgtcgagtcatccgctactcccacttctaacgtgggagctttcgtgtactcgtcctctgacgtctcttcccctacttcaacggtcgtttcttcatcaccatcaagctctgtgatcgcttccacctctgcccccgcatcttcatatgcaccacctacttccacttccgcttctgctgccgcttccaccgccgaaaccgcctgcacttctggtgaatggcgatgccaaggctctgtgctacagacctgttcctggggtgcatttgtcagcatgaaagactgctcaactcaggctggaacggtttgcaatcctgtggatcctgtcggttgtgtttggcccgatcaagtagttgctgccaccgctgccaccactgccgccgtcaccacgacatcaaatgtgctcactacgtctgtttcaagcacgacggcgaccagtgcggtcacggtcaacaacgcggtcgtcaccaacaccaatgctgctcaacccactacaacctcggtgaagtctgtggtttccacgcctgctacgagctctgccaccacctcgacttatcccgcttccaacgccgcgaccacatcgaccacatgtgcggcaggttcttgggcttgcaacggatcagtcctccaacaatgcgtgaacggtcgtctgatgaacctcacggattgtgctctccaggcaggcacagtttgcaactcggccacaccggtgggttgtgtgtggccctggcaggcgacgagcgctcgcaagcgggatgccgtcggccgtgttcccagaggacacggaggcgacagaagagtggttcatggcaagaggagggcaagaactcactaatgttgaagtggtccttgcctttttttccttctgtttcttttctttctcttttctttcgcatgcattcaaattgagggaaagggagaatggacgatataaaggagcagaaagggaacctaacgagcaatgttttcttccttagttactctcaatgtcccctcatcgtttttgctgtccttttcctcaaatctacctttacgtccagtccagcctctgctgatagtcggaatcagaaatcgagcggaacaagagaatactcaccgacttgaagagcaggttctctataaactccagcggttccattctccttcttcctcttcttctcttgttacctttatactttgtctctttggcattttgaatcatatagcattacttttgctcttttattatcgttatttttatcacctcttatccaattcggcctcaggacatatcgcatatcacccctactcactctattcaatgacggaacgtgtttatctctctcatctctctctctctctctctctctttcttctcgtccagctttgaatcgtgttgatgccaatgagggacgatgatacgacatggtacgatctgaatatgaatatgcatttgtgtattgattttactgagcgcgcaaccgagtcaagtcaagcacgattcctccagactattgaaacaaaaaatcaacacgtcagcgagggaaaaggcaaagagagcagaggcacgaaagtaaagaacccacagtgctcgaagtgatatccttgtaattgatcaagggtctggggagacaaccgacccgcaaaccgtcagacgaagagaattcgatcagtctctcatcctcattagaaagtatgtcggccacccatggtgtatccagggttatcagaacactggatgaaccgggaactcacatgctgaacttgatggctgtcgagacgactctttgaatttcttccgtcctgtgaaagccatgaccgatgtagagatccaagatggttgatcagggtcagggtgagtacaaacctgaatgagatgagcaacgaatgtcgaagacgaacctgagagctcggacgacgacagtagggtttttatatcctaacatttcccaaccgccaaagattaagcctctgtgttctctcatccacacaaaagggaagaaccgaggagaaagcaaacgaaccgggtccagcaggctgaacgaccacatcatcctcccttcccagtgtcctgaagaatgatctcagttcttctatcccttttgtcaacccatctggctcgatcaggtgtcctcctgctgcctgctcggctgctcgcttcttcaaagccgcatacggcgaagccggagccgaacttgccgcccctgtggaatagggtgaagaggtcgctccatcatcagcggtaggaggacgaggggccttgcttccgataaggattccggttgagaatccaagaagagtgagtccaaacatgatcgtctttatgctcaacggggtcgcccgaagaatgtccagtcgattttttgtctcgtttgatgatggcagggggacatgaggcacagatcgagatgtcggcggatgggcgtaagatctacgtgcgacagctcccaggcgacttgagtggagaggaagagctcgagagagaacgttcatcgtttggccgagattggtgatggaaggtgatgatgatgatgatgaagagagaagccagacggaagaaggccaggtaaaggaggatgtgtgtagtcacgtgacctcacgatgggatcttgctcacttggctttctcgtcgtgttcagagtcagtggcaaggcatgttcggcctagagttgagccaagcaaaggaggaaggattatagaatggataaaagagacatgttcatcgttcaacggccaaagagaccctttccaactttttccacacaccgcagcgtcagactgatccgtttcatccgcttgaccccgctggagtgatcaccctcggtcgtttccggtttgaacgcttgctgaacgtcccacgagccttcatccggtgcatctagcccgacgagatgtctgatggattgaccaccgaggagatgcttgttggcgaggatcggggcgaccgccttgaaatcatccgtgtatgcatgggagatcgagtgcttccactcagtgtatggcgcgtgttggagaatgagaagtgagcggggttcaagcagaatcgggattgcaggacgcgtcaaggtagctacttctgaagcgagcgagctggccgaagaagagggagtggacggaaccagaggagtggacggaaccagaggagtggagggcgggtgaagccagaggatacacggccagagtagagatatcgtcgtggtagtcgggtagctagatggaaaagtattggtgtgagctcggtgcgatcgaaaagatggagaatcaaacttggcgctcactatgctggtccatcggtgtgaggctgaaaagaaaggaagatgaacagagactcagcactgggcaagtcttctcatcaatgagatcaggaataatgaatcgtacgtcgataccctgtccgggaagatactcgttgacgagtacttggttaggctttccaatctttgcaccttcaaaggcgcctgtagatttgaccttggagatcaaatcggggctacaaagcgaaagagcaaaagggttcagtcggaagatcagacatcgggatgaaagagagcggagagaagcctcacaactgagtgaaaaacggagggagtggctccggaatgagtgtgtttgactttgtgagaatgccgcctagaaagagagttgaaaacagatcagtctgagtggacatgtatctgaggagcgagtgagatctttgatagcatacgaaccccagtgctgtagcctttagatcctgggtgagaagattgatgggggaacgagtaagtccatctgcgcgatcgaacgtaacgggtgtggcagacatgctgaccttcgacctgtgggcaccgtcttccacttcggcaaagcactctgatcgatctgaaggtagcatcgattggaaagactctcactcgtcagcatggagatcgagcgagaactcggatagcgagagacagaccttgttgaccagatgatcttcttcagccggggtgatgaattctggaatatagtacactgcatctgggaacgcatccagcctgtttgcctgtatgtcctccatggtatgtgtatgtgtatgtgtatgtgtgtatgtgcgtacgcgtgctgctgatgatggaggtggtggttggtggtggaagagagtgagtctcgctggatggcatggaaaacccaaagagttcaatctttcttctttcagctgtactctccagcctttctcctcatcgaccgtcacatgtagtagcaacctcagcgaggactctgttgtatacgcttggtctcttgtgttgaatgtctgagcgccgtacgatctgactctcggtgttcatcagaggactcgtgcccacacatgctgctctttcccgcccgatcgtgtagttagccatcgagaaacaaacacccaatgatgatcgcatcctccacatacccactctcctcctcctgctccttctcctaggcgacgagcgatgcacgctgccttgcagtatcagagccatcgtcaaagcgcaggtggtggccaaaaaaattcgccgcttacgcgcttacttctttccgtccgctcagttttcatctttttctaccaacgacgatcatcaacagaacagagagacagagtctttcctcgatcgttcttccttggctctacatcactttccacagaccatgttgatcaccgcgagatcctccttcagatcagtcgtgccgagagctctgcgacagacgaggccagcctctttgctcacgacaaccatccagaatgctcttcccgaaggcctgaaaccgtccggcctgccgaaactggagtcccctctgtccctcctccagacagagctatcgtctctccagtcgaacatctctcatctgctaggctctggtcatccttcgcttgacagcgtcgcaaagtattacttccaggcagagggcaagaacgtccggccaaagatcgttctcctcatggcccaagccacgaatgggctcggctcaaactggcaagaggtcgcttcgaaggatccgaacgaggttgaccgatggctcactcagcgggatgacgtcctgaacgattacaatcctggcatgccagagtccacacggagcttccagaacgttttcatcccttcgtcttcatcgtcaccccgagcgggccttcattcgtcacttaactctccgcttcgtcgctcgccttcgtctcccgcccactccgtccacctgccgtccggcccgttggcttcgttagctctagcagacccgacaatacttcttcccacccagaaacgactggcagagatcacagagatgattcatgtggcttccctcctacacgatgatgtgattgatgtttctcccaccaggcgaggagcaccttcagcacccaatcttttcggcaacaaggtctccatcctaggtggtgatttcttgctcggtagagcctcagccgcgctagccagattgggctcgcccgaggtagtcgagttgctctcgaccgtgatcgcgaatctggtggaaggtgagatgatgcaactcaaggcgacacaagaacctgagaggtcgccgaccgccgagggtttcgacaagtacatgcaaaagacctatctcaaaacggccagtctgatggccaagagcgccagagccagtgtcattcttggtggagccgaatgtgatgaagagcttaaggatgtcgcatatgcctacgggcgaaacctcggaatcgctttccaggtaagcagtcggaaattcgttttttctttcttcttctttgtctcctcacgctctttctatcgtcccaatcgagattagacaaaccaacacaagggcttctctgatccgatcttgcctcttatgcttttgtttattcatttttgtatattcattcgaatgtacatctatcgtcctccacccacagcttgtagacgatctcttggatttcacacccaccccgtcaaccacgatgggaaaaccgtcatccggatttgatctctcgctcggcctagctaccgctcctctcctttatgcctgggagtccaacccgtcgttgacgccgttgatcagacgaggattctccgagccgggtgatgtccctaccgccagagatctcgtcctcgcttcggatggaatggaccgaacgagaaagttggcgcgagagtacgcggaaggagcgagggatttgatcagggatagattgccagagagtgaggccagagccggtctggaggatttgaccgagcaagttttgaagagatgcaaatagatctttagagtttttcttttccttccctcattc

SEQ ID NO: 3033 - DNA, 8287 bp, Xanthophyllomyces dendrorhous
aaacataggagacggccattgccagtcggaaaatgtatcaatccccagggatcaagaacgctgaatgtcttctgaaggtctgctcgttgatccttcccgcaccaagagcgaatcgtcctctgtctcgccctggtcgttctgaactttctgtccgggtcctgttttcgatacctgttctaccggtggcatagtcacagtccccgaaggattcaccagtgtcccccgcggtagttgaggcgacacaggttgcgaccttggtgacgatacttgagagagcccaccgatcgtgggtgtagtcccaccgcttctaccccgtgttcgcgctcgtggccgcgtaaccatcggtggtggcgctggtggaagcaaatgatatttatactgttttcgtagagcggtgagcggtgcgcttcagtgtcaggagagggttatgtgtgcgttcaaaaaggaaagagcgagatagaaggaacaagacgaacagatttgtatgttgtgtagagaaacgcgatggacgaaatgatctatattgaataaataaaaaacatgacagggcgtccagtcagtcgtctataaagagaacgaggaagagaaaggggagagtgagaaggcgaaaccagatacatagacgaaccgcaaagacaagaccactccaatggataaacatgatgccctcttgattctcaaaaatcgcccataggacatatgtctttttgattcgttcgtccaaatcaacccgttgatcgattgacgtcagtctcatttgtaacagttagaacacacaggcaggtgttgacatatgagaagagaaacgacaacgaacaagaacagcgcaaccggcaaggtcacccgcttcagaggcaaacgcataacctattgaggtgagcgtcaagaataatctaatccccgctcatctgacgatcagtctcactctgttctacatcatttcctcggggacaaagaatgaggaaaagggcaagagaagactcacagagctaaccagacaaatactctggtccatgcacccgcgtgttctttgtgtacatcctttccaaatgcctggaagaacgtgagtaccatgaggactatactccatgcatgctgtcatttcctccccccacaaggcaagcgtgaagcaccatccagaaagcatcagcctcgtccgtcactcgggagttaggacaaagaaaacaaaggggccagagaaaagagagtaaccacaaacatatagagagaacggaagaagtatcgtcacttcgagcagcttgatttcgaactttgtcggttcaggtacgatccgttttctggttcggatgaggtagaatatcgaagacactaggagccagtacagcaaaagaaggcatagagaacgtaacctttcaagtttaaagagcaagtcccagcgtttacctcgaaattcgaatacaggagtatatacataccagtggagagcaaggccaccgagaggaggaatgcaaggatataccactttctgatttgaaagtacagatacgcctgtgacattcgttcaaaacaacatgccaaagagaaacaaaaaggttctcaggtctatctctcatgtccgagcagcatagagcaaatccgagggtcagaaagaacgaaagttcacttacagcactgatcacaccgaccgagacgaatctccatcggatgctatccacaaccaacgactgtgccctcgggaagaactggacgacggtataacctatgagaagtatatggatcactggcctgtatccataacaagttttcagaaaacaagaatattgagaaacttggtttaatcagatctgcagaacggaagaactcagagctcatcgagtccttgtttatctggcggagacctccgaaggtcaagacggcccaacgtctcccaaggaaagcagaaagaaggataaaagagaacgtaccagacccagaacgcgtatttcccaggcgtaagataagtctccttcggtggatattccggtttgtacgaaaactagcaaagtcgagatcagacggccatcagtgacgcgtccgaatcctgccgtgtagatacaagagagaaagagagaaggaaacagagcgggaaggaaaaggaggaagcaaccgacagagttccagatgtgaaatacgacaagcgaccaatatacgatcgagtttgacagcttcaggggaagctgatagcgaagatctgcgagttccatccgctttagatgtatgatcgaacgggatgaggtggttggtgagtggttagatggatggacgatcgttgaaacgagctgatgatgtttgatcttagatcagataaaaatacaaacgtttcttcttgtcgtcaagcctttattttaacttttatttccgtttctctatcgtctttcttctttcgtatctctcttgccatgtttgggtttgctccctgcgtgcatgtccacaaaggaccgtgttttgagtttgaaagtacatgtgtgacatctagaattcattctaataattactggtcagactacatctcttgccactcaaactctcctaccagtgctgttttacttggcagtcgacccatatttgggctcaagatggtaaaccgttttcgagggatatcaatgtttgttctgcaaaagagatcagaaggaagtaaatggagaacaacagacaatgacacatcgaacagacatcagtcaatccatccaacgaaagaattagacgagagaaaagtacatacacgacgacatagccgatgatttcactcttcgcgagctcctctcccatgtcaccttcgacgaccgtttcagctgctaccgtgccctcctcatcctcctccttcacttttgcagattcattgttggcgacagctgtggacgcggatccgttctgcacgatcgacgctggcggcttgatgagcgcgaggacgacattcagcaggtgagactctttagcaggcaatgtggggtcgactttcaccagctgagtctcggagatcgaccgggtcgaaccaataggcaaagccgaagagggagcgatgtattcttcaccgacacgccagatggagaggtcctcaaatttgacggttgtactatgcggacttagaccaagcggattcatcgctgtagcgcctggcagagcaaggagggaaggtgttgagggagggtcgccatagaagtaggattttatttgaagggcttgtgatcggactcgatgggatctatccaggtcaacaacctagaacgaggtaaaagtgagaaagagagagacgggatgaaccatggaaaagaaatagaacatatgaatatatctagctttggctgaaagaagatacgaataaacatacaccggccgattttgaaagtttgacgatcttgatgcgcgagtttgggccaccgaacatgcgttgcatttccatatgtagcttttcatgcccgatgacaaggaggatgttgactgagttagagaagcagaacaagaaagatggtcttaggatgtcaactgaggaggcgtggtttgagagctctaaggaatcttacttttgaacgcgtcaacagcctccctgacgaacgtgtacttttcttttttgtcgccgtcttcggtctttcccaaattggcatcgacaaatttcccgttggtgtcgacgattaaacctgcgctcgccagcggcttgtttccttttcttcgggtctcccatttctcacccatgtcttgaaccagttgttgccacagcctggatctgcctggttgaccgggggtctgatagccgtaccaccaggataaaggcagcagagtagaggaaagagacggtggtggacctgttggtagaggagaaccgaatgtttgagctggggtcgaggttggaagtggatgggctatcggtgtgagagatagtgcgcctggcggagagtgggggccctttttatgttgtttcggatgattgacagaggacggaggagaaaagatggaagaaatcaggatgtaagtagaatgatagaggttgagcaaacacactgattgaacccacctctgagggatccaggttgacaaataacgggctggattctctgcctgcacgaacggtccagttgatcaacgtcttacagaccgtggtcttgccacttccttccggcccgagaaccatcaatctcggactgtcctctagttccggatccatccattcggatgcttctgcctctgctcgttctgcaggtgaggcctgcttgagcgttctcgcccggttggtctgatatctgtgcgctcgaagtcgttggccttcgagagcgaggtgtaggttggagagagcggggaaggttgtctcgtgggagacgtactctgtcgagggagtgcctgctatgtaaaagatccgaatttccatcgatggaacagcatgtcagcctgagatgatacaaaggcctgtttgcgaaaggagagtgactcatctccagttgacaaccttcccaggtgaagacagctgctttgcactcggccatgaaatggtaccatctgtttggtgcgatttccgctccaaatatctccgcctgtccttgagtgagctatttatgagcaaaaaggaggtgagagatcagtacttgtgagtacagacgggtgtgtacacatgggtatatgcgggtgtaagtgtcacagacaggatggacagaacggaggtacaaagcgacggccatcatctgacgaaactctgccaatccggactcacttggatagcgatgaattcggcctgttctaattcaaacctatattctgactggggttctaatgtccatgtctgtgaggacggagcattggccaagatgttcatccagaggtttgactgatggtgatgatgatggtggtggtggtagtcgtggtgacgggtggaggtgacagggaaaactgaatagacaagatttgtagtcgggcattagagaaagcatgtagatttttgtaatgtgctgaaacactacaaacttcgggcggcttcattagggaatttctgtaatcttaatacggaatcgcaaatcgtcattctcactacgaacctttgtaatgctgcactacgaaaggccgcctaatggaacaataggaaatagtctgtagctcctcactacaaacgagccgtgttttttctaatgcgactttccatctgtcttctcatcaacaacggcaaacaagaacatcacgacaacgacgacgacgacgacgatagcaacaacaacgaccaacacaatccacttccgttctcttccatctcttcttcgttctcccaagtcacaggaaagaagaagaggtcactctcagggagcgttccttccgagtcttcagtcttgaatctcccataaaggatagagatagaccatgacacatgcgttactgtaagcccacacgctttctctcagcgatcccagggctgagaacgggttggttgacatatcaaatcgctgatcctgcttccctgtcgtgtctcgggctgtcaaactttaggcttcgactgtttctctctccgttcttcagcgtgcatgttgcaattcaatacctcaagtcctatccgggcaacatcgggatcactcattaccttacttccagactccgccagatgcattcccgagatgtcgagttttattggccccaactctggcaagtgtttatcagcatcttagaaagacattagcatagacagttttcctctgttctggctcccctttgggagatccttcagtgaaccatctgcatcatgtttatcgtttgaaagctaacctcgtcctctccctcttgctcttctctccgtcgcccttcctcctcttgtcttgggaccatctcatcagtcacctgttggtaacacaaccaactgattcagttgccttggaatgtttcattctcgaacgagccgaggaaagtactcattcggccatgctggtaagttgagcttcgtttctccgtctctcttactcctacgcgcttctgacttccggcgcgtcgtcctttcttccccatctatagaccttttggttcatgcaggcagcactgtgtgattttgcattgaccagaacgacaaatcctacctcgttcaacatctgccaacgggtccttctcagatgccatgacattattttcggcgatcctcccttgccaatcctgccatcgacctcgtccgacccctcctcgtcctcttttggcaaacgatcaccttacagcaacgaccgctcatctagagttagcagtaaacattcctctaagccatcgcgttcagaaaccatcctagaaaagtcaacaaacgcgttcaacgtcctgctcggcaagatcggaccgcctaataaactcattcccgggcacatcggagcggccgtcgtcggcatgggtatcattgcggcttcttccccaggtgtgggcacgctaggtcttgtcgagagcgtagggagagttgttatctcccaaggacgagtggactaccagcgtgattctggagtcaaacccaagtttgaagtcctcgatcccaacgccgaccgagacgatagcgagtctgacaatcttgatgcgaaagacaacggaacaggtcaaagctctgagttgcatgcagcgtatataaacaaagagcgagaaagcaactcgagtgatgaagagctctggtctggcggacagacttcaaaaacttctggaccgtccacgccttctgccgcttcggctacgaccccttcgctaccgatcgcgcccttccttctcagacaaaacacggtcgacccgctcgaccaactctctagcccatccccctcgtcttcctcttccaccagcacagtgactccggccattttcgcaaaaggcagatcttcctttgctccctcagagtcctcgttgccaacttctatgagaggacagaacagacatcttaacccttctcattcgtctccctcgctatcctcctcaaatagaaatcaatttctctctacatccagtcatccgactggcaggctttccactgatgtccttcattcccactcctccttcgcagcatctcgtctctcattggacccagcattcgtcctaagtactctgccgaaagacgaccaaaccaagcttctcagatctcactactgtcgatccgaagtcaggtttctgttgacactagaagaaatctgcaacaggctgttggtcgttcccaagttggccagagtaagtgcgttgagagcagaactgacgagtttgaaccatctgttgccggccgaggtttgtatcacgacatttttttcctcaattcattcagtcttcatatgccattgaaactgatcccttcgttctttttggctctatctaggtgtgcatgccaacgtggtgcgaggcggaccacgcgcacgaacaaggtggggagacctcgtccggaaacgatcactccgcccgtcaagacagtgctcccaaaccgaaagcgcatcatcgagtcgtccggatatcgccaggcgactcggttgtcctgaactctgcagaaaaagcaccctatcttatccatgtcgaggtccttgtcggtgatcttgatttcgatccagagaaagtcaagaacagagatctgttgaaacggatcgtaggggaaagaatcaagaaccaggagtctgcatgctcctctggacctggcggcatagatatgacgacaaagaagaaagaaggacctcaatcaagtctagggtttggaggcgccaggttggaccctctggtcggaatccattctgggctcgacagaggaaacggtccgatccaatcgctcgcttcctccattcctagttcagaatctcccatcttgaacaccaacttgtacgatgcttcaactgaagccgaagacgaatctgacatcgcaggcggattctcttcacgtcctccacttaacccaaccgagcttgaccggcctatggacgagatggatcttgtcgaacagatctacggaaccgagctttccgcgaaagacatcgatccgtatctagaggaaagaatgccggcggatctaaatccgagaaacaaggcaatcgatttagccgtctggtctggattgcccaccgatccaaaactgatgcgcagaagtggatctgatttgacgcctggaacaaattcgccttctttagcgtcaacgctcgaaacaggggacccattctctactgcctctcatctgcccaccaggcgaaatctcaccttggacgattattcggatagaatgcgcacagcagccatcatgctcgcccagcttaacgctaactctaccagagatgctgccccgccaccgccaccgccaccgccaccgccgcccccaacagcatcatcatcaattgac

SEQ ID NO: 3034 - DNA, 41707 bp, Xanthophyllomyces dendrorhous
gcagagatgttggcgctagaggaagaaagggtggacaggatgacagagaaagcagtgggcagtggaggatcgaatggcgttggctcagtcagccagacatctgtaggagggaagatggaggatgaagggatattaaaagccgttttagagaaagctgatccgtccggtgagtatcagcttcttttctcattcggtcgtaggcgggacataacttcaacacgctcatcatatctctcggcttgtctaaacagcggcggtatttagtgaatcctgggcggcgaagaaagcaagaataagagcttcttctccttggggtcatttggcatcatgggatgttagtcttctttcgtatctcattcttgagaagagtctctatgactgaacaatgccttctttttcgactggtctctcaggtattgtctgtgattgtcaaaacaggggcagatcttagacaggaacagttggcgactcagttgatcgaacgattcatgggcatctggaaggaggagaagtcttcgtgttgggttcgttagtaagtcgataatctcttaagttttcaagcccacgttctctcttttttcctttctctctctctcttcttcgctgcttagatgagccttccagacgtcaagccaaatacagatctttggactgatgcatcctttccatcgacggctgattgaatagctttcggatcctcatcactggtgacacgtcaggtctggtagagactataacggactcggtgtctgtacattcgattaagaaagcggagtatggaagacgagttgctagaggaagtactatcaatcatgttagcttgctggatcatttcgtaaacgtcagtccgagcccatttctgtccaaaacactttacatatacttctggatcatgccgtggtttcattgagtttactgactcgtggtaaatcatgtgtatgtttcaggtttatggagacccgtcttcagcgtcgttcgctagagcacaacgcaatttcatcaaatctgttgctggtaaatacttgactctctttgtttctttccttcctgaacaccgttcccgattgacagatgctgagcggtgtttgcatcattccgctgtctatatctgccaacaataggagcatcggtcgtcacgtatctcctccaaattaaagatcgacataacggaaatatcctgatcgatagagacggccactgcatccatatcgacttcggtttcatgttgtctaatagtcctggaaatatgggcttcgaagctgctcctttcaagtttactacggttcgtgttctttgtaatctcacctgttaccttgtcgagggtactttggtcctgatcacatacctcaactcttctcgcattcaggaatacctggacatcatgggaggtatcggaagtcctgggtttgctctcttcaaaaaactcttcaaagaagggttcgaggctgctcggaaacactcagacgagattatcagttcgttctccatctcaacaaaaacgttcactatatgaacacagaatttgtatcctgacgctcactcgcttgtcaattgttttcgaacgataaacagctattgttgagttgatgcaatataagtcgaaacttccttgctttgaagcgttcggcgatcaaactgctcagcatcttcgagaaaggttccagttaggactgactcaacaagcggtggacgatcatctggagaaattgatcgtcagttcgattgggtcgtattatactaggttgtatgattcggtaagcatcttctttctctttcgagacagttttcgagtagcaaagatggtctctaataagggtcttatctgatcgtatattgtgtttgctttgcggtttttagttccaatggctcagtcaatccgtattccaatgattcctctcctgccctctcttgctgctctcaacttccggtagtgctgccaatgtttacatcagctttgattatagattttttgttcacctgtattttcttcaccacaagtttgttttattcaagttttacttttttgcatgataaccatgttctctctcattctcgtatatctcacatcttttcatactattcatttcggatcgccatacggttgaactatcatgacgatgatacaaacggatctgtgttctcccttttctctccactggctcaatcgaagtgaatatcttttcctcagctaggtctaagtttacaaatcatttaaatcaacatgggtatcgtcgaatccattctcgaagatgagaagagaagttcttgatggaaaacagatagaacaaaattagaaacaaagagcgaagtgagatatgcattgagggtagatatagtgcattctggaaacgaaaaaaaagaaacagggaagagatatagcatcatctatctgcctaaaaccgccaactctagcttcttcagtgaagccttcaaactcttcccatccttgttgcatttctccgtcagatactgcgacatctccagtctgatagcagctagttcatcgacaataggtaacgtcgggttgaacgatttgggattgagcagaagatcgaacaaccttgtccagatatccgtttgccagtactacagtagcacgcggagaggaggaaagaggcgataacatggatgagaacaggttatgaaatcagaagagaagatatatagaaggactcactcgtttcagaggagtcgaaatcttgtatcgcttttccaccgtacttgtagagattaaggtggtttctatatatttgcctgtacaacagaaagtccagatacacaagagcgtggatgaaagagcatgaggacaagaaagatcagtcagaatacagcaaaacctatttcagagaagggatgtctctgcaagggaaagggacgactgaccaaagagcatgcagtagaacacgctggccaaaccgtggtaatctgtttggaacgtccacggtctagcctctctcatctccgcacaatctctctgatcaacctgccattcagccatgaacgtttggtctttttggaacaagcgcctgtcaattgctcttccaaagtcaatcaatctgacgcccttggaagaccatccgtcaaccccgtcaggatcgtactgactggaccaagcattcggtccaccgggcacatcgtctaaccgcagcatgcaattatcgattttaagatctccgtgaatgatgtcgactcgatgcagagcttcgacaagcttgagaagctcgacagcaaagaagatcgcaagaagctcatccaacccggcaggaccgcccgatgtagcaggagcgacgccaaaagcagcggcgttgttgacggtgtcgagcaaggtgccttgagaggagtagtcaagcacgaggtaagattcatctcgatagacgtacagacctcgtgtagaaataacagatgggtgcagactagaaggaagtcgagtccgaatgcgatcgaggacgagaccttcccagatcgaggctggtttctcgacctttagcgcaaccatcatctgctctccttcgtcttcgttcaaagaaaagatgtccaatggtttgttggtcaaagccaagaagaccgacccaaacccaccttctccaattttgtctcggacgtcgaaagtctcgtccccaagaacgactgaaccaaacaccgcaccatccttatcagcgccactcttgttgctgccgacactggctcttctgacgcgctgcttggctgtcttttgtagttgatctagtcgatccatcacaattgtcgatagatcgtggaatccgggtagagaactcaacgggggttcaatcgacctcagaaagctagcgataatttcttcgtctagagggttgcatgggttctggaagttttccgagccggggattccaaaaaccggctcagcgggaggcgtatctgattggagggacaatccgaacatatcatcctccataaagtttgtcttgggccttgattcttctagcagcggtggttgaagagataaacccaataaatccccctcgaccccttgaggttcgtcaatcgattgactaccagggattaacgcgtgcgccatcgtttcctcctcttcctcctccgcaatatcgaataagaggccctgagcagggataggcgagaacgattcatagtcaggttcggggaccaacatgatcggaggttcctcgtccgaattatcatcctcgtcatcatctgaatcatcatcctcgtcactgatgttgccggcattgaacatggacatgacatcgtccatggcagctttagtgttgattgtaggtgatggccgattaggacgaatcttggcaggaggcggaggtggaggggtcgatggggccagtgaaaccgataaaggcgatgaggctgatggggcagccaaagtcgtagctgaagtttcaaatataggtggagcagaagtatcaaacacaggagaagcaggagcagctgacttcacaggtagatcggcaggagagttaaattccactgaaggttcagcctcatcttcagatgtagtgtcaaataccgtcctcatctctggttcggcgaccagcatactttcaggtgcggattctgtttcaggttctgggttaagatttggtaccatctctactgaaggctcgacctcttgctcctgtgtttgaatctgaagttcgaacatcggtggggtctcttcatgccgagaatcaaccggagaagtagtgcgcggtggggtaggcgcagaaattacaggggatggagaaacgggaacatcatcgtaagcgttagctggctgaggtgttgtagaagtggaagttgagggagcagaagtaggagtcaaaaccgagccgagttcaatcacaggtagcggcgaggaagatggaagaggagttggtgaagatgggagctgagcctgttctacaaaaaattcgggttctggttctgattttggttctggttctaatcttggctctgtcacagagcttgacttgttaggagtagacggtggtgtctcgtctcggaagatagttaaacgcttggacgacgtctgaggtaccggcgatgacggctgagcagcggtctcaacgatcggctctggagcgggttctgagactggttctggggctggttctggaggacattcgccttgaactgaagagggcacgatatgttgaacaaaatgggagaatatcaatagtgaagacacaacaataatacacccgatgccactacggaccttgcttaacccaatagtccctccccaaacctagaagtcccattcgtctggctcgtatctcctcaaatgtccactcttttccatccctgtaaacttcgtcccaacagaattttctactctctggcttgcctgccttattcaacggggcggtcctgtctgggacttcccacttagtgaatcgagagagatagccagtcgacgaccccaccacggtttttaacgatggctttcgagattgcgttgtagatggcatcgtggatggaattgatactggagcagggaccggagcaggcgcaggcgcagagggaccaacggcgtaacgagagctcgacggtgccggggttgaccgcatgtttcgaagaggatctcttgaaagagccttccattcaggaagagcatctgaccggggatgaagagagaacacatcgtcagaggcttggtgagtgtttgatgtggcgggcgcgctggtatcctgctacccggaaaatttgatgaatgagtacagaaaaatattaggttttgctattctttgacgatcaaaaatttgttcgaactaaaggaaagaggtcgtttgcgcacctcgtctctgaagatttcgatcccaccaaaccctctttccatcttcttccccaagacaggtagcgcacccgctcggttccaaggcacactttctctttcattttcctttctgcctacatccctcgtaccgagctctccgttccatcctgacctgtcatcctcagccggttcatccccaccgtctacaaagattgccattgcatttttcttcccgttttctttagaagaactacccattgcccctccggcagatgctgatagtgtcccgagggcagttcgactcgtagtggacgacgacgatgaagcagaggtcgtggaaggatcgccagtaggcagccgggattgatagtccttgtttcgaactttgaaagcctcgtaccgattttttatgtgtaagagtggtttggctcttctagcgattccaagttgaagagttgactctgcttgggagtatctgtagtcggttgagacacaaagaggaaagcaatggtgagaaaaagcagcgcaattatggatgagagagaggatggactgtgaactttgacagaaacgccattgacaaactgaccttcccatggcctccaagacttctgcgtagatctcgtaaagtctggcccaatcagtcccaatttctctgtcgagcataaattcgaaaacgtcctgctgtctctcgactagagaagcgtagcagatccatagatctagataacgtttttcctgatgaaacatgtcgtcggagagtagggaggatgtgcatcgttcaagaagaggaacaagaatcgacgcgttgtttcgaccggatggatcaagagttcgaagccgagcaatatacctgggagttttttggccgatgggatgcttgtttctcgtcaaactctgcaagatatcagagcgatcttaacagaagataaagtagcacgaaccgttcatagacactcaacggatcagccgacatggaatctaatgggtttcccaaaccatcgacttcctcaccctccgcttccttcctcctcctctcctcgacctctgccaactcagtctcgaaagcctctttggcctctttgagctctgcttctacctgctttctcttggtaccaaactgtgtggccatagcatgtgcggatctaccgatggataatggttgaatgttttctttttgagcttcgatcgctgtaaaatcagtgacgggcgtggcagccggatgatcttgtgcttgggattgcccagatcccctagcaggcgtcacatctacctgcatggtttttagttgatcgttcgggttttagccttaacggattagagtatcgtttgtggttgtgattgcaagagagaggtggaagcgtttcgttcgttcgctcgctcggttgctcctggaatgttttgttttgctctctcggtcaccagaaaatcagtcgcgtcttacgtaatctgacggaaagacatgacttattatacaaacaacatcatagtacacccaaaacttgtacaggagagaagcgaacaacatggttgtacaacatgatggaacaaaatcaagatcgggctatggtataggaagtgaacgacggagggcaagttgtgcagaagatcaagcatctccggcttgtgcaccgatcgggtttccctcgacgtcgaccttccggcgcttctgaagataaatgttgataaccacggctatagccgccgtggtgatgactataaaagttaagcaagatgtcaatcagtcatctcaagctattttgtaagagaagaattcagtgtggaagatgggaagaaacaaagaactaacaagcggtggtgcatccaaacccgatgggatactgaggcccattagtactaggccaaatgtacgatccgtaaattgacgcgctattacccagcccattaatcaatgcaattgagatctagtacatccacggacgcaaaaatttgagaggacaaagaggagtcaagtcagattagcacatgtgtcttgaagagaacaaactgagaagaattgaacgaacagctcgactctctctatcggggaagttctgcagagcgtaggataggaacaatgggcaagcactccacactccactggctccaaggataactgttttgccaaaaccccagtcagctggttagttttgtacttcaatcttcctttgccaatgttcgatagaggaaaccagatgagaactgactgaaagcgtatcggactgcagacgtcttgaccacggccaccacgatgaaacacatcgctgcccacatgcagcaccccatgatactgttcacattcaagacaaaccgggaaatagtttagcaaagccatattttcgcatgtatttatattttgtaagaggatagaaagatagaacacactggaaaggcttctcgttgaacttgtctgcgctgaatccgacagtgatagaacaaaccaagacgacggagtaaatagggactgtgtaataattcgcctaatcatcatgatcgagaaattgagagagagagaggtgagtaatgttcttgctaatgagcgagaaaggggcccaaagatcataccatgactccggtatgtccaagagtcgtcatcagcgtggggactttaatgtccaaacgaacacaggtcaacttcagtctcaaaggaacttggacgcatggtatggaagacaactcacagaagtaactgattgttccagcgcccataatgcccctgtattgatcgattacaagaacaaaaaaacgggttagttaatatttaaagaggttcgacgagattgggtgatgatttccaattgatgagacttgcatgtatccctgttgatatacgcgcaaacttcagctgagaatacaatagggattgccaagcaggcccagaacgtaaaaacttgaacgtaccaaggcgagcaaccaagttttgtaactcttgactgccttaaggaaagcttgcatgtgggatagcgacggggcatcggattcttctgtcttgagtctctccacggcgagttgtctttcttcctcgttaaggaacggtgtgttgtgtgggaagtcgggtaaaacgaagaacgcaatcaaggatacaacaactgtaaagttgacaaattcgaagggttgaggaacggaccaaatttggtgagagaaagagaaagaagaagaggtatacatggacgaaccagtagctaagccttcaactccaaagagccatttccaaccggcaattccggcggtgccgtccatatttccggtaatagcacccgcaaggagacctccgaacgctccggacatcatggcggctgatccattgagaaccaagagatgagaattgtgtgtgatatctgggtcacaaatgagaaagagaaccgaccagagtaaaaaagagctagacgcttcgagatctcgtatggcttgtaccagcctggatcgtgttgtcaagacagaagaaggaaagggtcagcagggagtactagcccagaagaggtagagggcggacagactgacaagacatcaagaaaattactcccggactggtaatccagatgaaaacaaccaagttgatatgataagaattccgttttccgcacatgaaatgaacggagtcgaacagaagaagatatagaagaacgaacaagaaaccagcctcgatgataccgaggcagaatcggagagcgaccaaacctgagtatgagttgatacccatggctgagacagtcatccctccccagataaacatgattcctggtaagaagatcgatggccttgaccgggaaaggatcatgttggatgggacctctgatttgaagtgaggaactatcaggattatgatctgtgagaagaggcgaaagatgactgaggatacataccagcgacgagataaccaacaaactgcgacacaaaaggatccaggataatagtcaacactcataccggtagcagacaaacagaaagacagaaataagattcacaaagatactgagcgctgtggcatacatcgttgtagacaatttcaggtccgttgacattccggcaacctttgcgttcccgatatttgttcgactgagagacaatcccgcatattaaaaaagacatttgaacagtcaggtgaagatgatctaaaaacatctcaagggaagagaaaaagaggaagagggactcactcgatataattcaaaacatacatcacccagaacatcggcatcaaccgtttatcgatctggcagactcgcgcaaacgaacaccatttattcagctctatcggaccagggcgcaaattgaaaagatggacagagaaaatcgaaagcacaactcaccttcctgaccagtctcttctcctcctccgacctttcgaggagaaccgactgtcgatcgacagaggcgatatcagaatctgcataatctctctccggatccttctttggatcgctttctagatgctcgatatggaatgtctcttgtttggttttctcgtccatctgtatggtatggatacgggtgtactgtattctgagtgtgtgagagaggggggaacgagtgagtgtgtgcgctgtgtgtatgtgaaaaaggatgagaggggaaaatggaccggatgaagggaaccaaatgaaccagatataagcaagagatgtggacgattaatgattgagcagaacccgatagacgggttgtttccggaggtccaatcagccgatatggaactctcacgagccagccaggtctcaagatcaaactcggatactctccccactgtcggttgtgaggaccggacaagatactagaagagcatcaaaccgaagattaatgacgacgacgacgacgacagcggagaagccattacaattgaccgtctgtagccgacgaataggtgtatgtatgtctatctccgatgtgtgctaaagcatagaaaagaagatcaaggctaacttagggtcgacaagattatcggcctaatgatttgccgattttgccggccgcctgttggcaccgacatgctcagccaaccccatcacacccggtctgggctgtcgcttgttgaagagatgctggatttccgcttcccggcccggtctatagacaaaggtgccaagattgattctgttcaagagatgagaactcactcttgtccatcttctgttaaccgatcatggccgaaaccggatcgatatccagataatgttggttttatccgagaccgcgactggaaagtatgattggacagatatacagaacaaccctacatttaattcatgataagaagtgtctacaaagttccaataatcaagtaacagatgagaacgatatacaagcatacacacacacacacattccatgcaaagaaggtgatgaatccatagcaagcagcttctcgagaacaacccagttcttggatctattcctcggcctcgtcttgactaaactcgtcatcgtctgatgaaccgtccaacagctgtctctccctcaaaagcttaatatcctgagaaagcgagattgaagcatccaatgcgatccttatttcctctttgtttgtttcgcgtggtaattatgaaaaggaaaaaagatgaagacatcagtactttaaggcttcagttgaaaagggaagacttcatcaagagggatttgactcaccacacgtgtgagcgatgccatcccaatactcgccatacttttctaacccactcaacagaaccctcacattggtccagatgctctccaattctcgttccaccttggccgggttaaactcgttagccgtctggacggccaaagagagcagaaggaagcagtagatcgaagtcgtcagaccgcacgcacaaagaggaagcgccttgggaaagcttcctgtaagcgctatcgatgccgcccgatggaggacctgtaaaggaacagaaagccccgagttgtcagtccaatgtcgtgcactaggtcattttctcagaaacaacagaggaaaaacaaaacacacctcaagtcggacgaccgaatgagcagccatcgatattctctccaaactcaacccgggaggaaggacgatgccagctctgtcgaccggaatatccatcgactggccatccgtcgccttgatttcagacaaccgagacaccggcttcaacttttcgttcactccccatggtctgaccttgccaactcttgcacctgtgcctaactctccagctggcgtcttccagcccattatcgatgatgacgacggcgacgacgatgacgacatcatcggtggaccgagcaagacggacggtgtcctgttgttcaaacgcatgcttccggctactgggtttagagacgacgaaggcgaagacagatgggcagggaccaaaacgtccgagtttgtcatcgagttcgagcatgtatgcgattgtgagtatgtctgagagctctgagaggttggcgtgtgggaaggggatgcactggagtcggtccgcaatgtcgaaggcgacgattggcgaccgtaaaaaccgtatggtccagactggtctgccataggttgatatatgatctgttgctgttgctgctgatgatcgaaatgactcgggaatgctgcctccaattgatgttgttgtagctgcgatggatacacctccggctgagctaggtggtgttgttgatgagacatatcaagatgataaaggccctgcccatatgtgtttttcgcttgatacggttcttcttcttcttgaaactgaaatccgggggattcgaacgttttttgcatcgactcaaccggatcagacaacttggagtcgatcaatccgacttcatgtgggccgctgacacctaagactccgtctccgttgttgggtcctccttcatttagaagtcgagaccacatctggctggactgccagaagtcatactcattctggtacactgcaggcggctgaacgagcgcagcggcgatcgagccgttggcgaaccacggcaatgatccatcaacgacgtagcctacattgattacctcggacgattgctcgtatgggaaaacttgagattgatcgttggacgggtattcagattgttgtcgttgataatgatcattatgtagttgcggttgttgttgttgcattaatggcggcgatattaaggactgcgactgttgctgctggtgacgctgctccggaaactgtgatgactgttgtggcaacgtctgctgctgaatgaaactattctcttccgactggacgaacctattcggtgacgtcttctcactggccaacgatgacgatgacttggttgattgtcgatcacttttcgtgctccccgtactccgactactagaaggcttgagcatggtcaacaaagctccgggtcgttgagcgaccgtatttgtcaacgcgctcgatctgtccagactcggaagaccacacattctgagatgatgggacaagcaggccttgggtgattgacctcttgagaataaaacacatgcgcagattgaggagtatgacataccgtttcgagaagaatgcgacttctggtagagcgtttcgacgatgaaggttgatctctgtactacacaactacaaatatataaaaagaaagaattgttcaaaagggtaacagtgagccactctaccgcctctaagccagatgaagttgtgaaaaaaaagaaaagatggagagaagattgactaacgagcatgaccgagttgatctggaacgttcgtaccatatcggcctccggtccctttcctccttttttgagatctccgacgacttttctctcctgctctcttagaataccgagcaccgtgacatccatctcttgcatctctcgttcaagttcttcccgtttggctggagtcaaagtgttttcttgatcgatcggcttgccagcgcgggtcagggtgatctcataagccctgcaaacccgacgaagcgcgtcaaattggttggcccagatctattgaataacaaagagaagaagagaggatgtcaaatcaatactctacgagagcagtatggataagaaggcagattggtcagaagacgaacgtctttgcccaaaggagaaaccgggtaggccaatttgatccgggggtcgaacggactgatcggaatttgcgtagcggccatgacggaagatgtatacatctgaccgaaacatacccagaatgtttgtcggttcatcgctcgatgccattcttgatctgggggaaactctttgtctttatcagactcgttgaggcctacgagagacaagagggagaaaggaggcgtatatgtcagttcatgctcaatcaaatcgcgccggtctacgcgcactatagaagaagaagaaggaaaaggtgagggaaactgccaacctatatcaagcatcaattgaagagttgtattttgtcttaatctcatcatagtgacgttaccctgtgacataagtggacggttaatacagagaaatagaaatcgcaagaaatcaaccaacagaacgatcacatcggcttttttttcattgagcccatgaaaagacaaagaaaaaggacaaaaacgaataggtctactaaccttgtgagcgaattcatacacggtcaacgcgatcaacgcctggatcacctccaacgggacgtcctcatcggtcctgccggcttgttcgatcgcgcgttcggcattcttcaaacatatttctgcccactgctcacagttaccccttcgcatggccttacttcgcttggagagtggatatggatcggctggatgaggccataatgctaagagacagaggcagccgaacaagaaagagctacccgttcgagaagcgggacttatattggatgagggcgattgtcgaagacctttcggtgtcaagtctatcggtccaaagtgggccgccagggttgagaccgagacggtccccggcgggggcaacacaggaaggaagcagtatatatggtcatagtaggcgttgagtctatgagaatacatgacaggggagcttgagtgtgggaaaactattaaagagatgcgtcgctgggaacatgaacgtacacatcctcggtattgcgatagatgagtacgatgttctcgacgggagtatcaacaccatcatcgtcaccggaatcgtcagaaataggttgggcacttgggagacggaaagactgtgaggggaaaaaaagtaaaaggaaagataaagaaaagaggataaggaaagataagccatcgagagtttcagaaatgtaagacctgtcgcttgtcttgctaaataatataatagcccagacaaaacgcgtttacccactttaacgttctcgagtttttccagaaacaccttgagcgggtctggctcctgatctgatttgcgggaagcgcaagagtagacgagccatacgagaagggtcagaaagtcgggtcatgatgaagatcaggttcatagggatcgtagcttgatccgtcagaattgcttactagatggtcgttttctagatccgccgcgtttagatttaacgtattcgcacaatatgttcctcttaacgcactttcaagagaagacgacaagcacggatcacaagtcagggcaaagtagagtggcctagttgtcatacgagaagtatggcggaggtagaaacagatggacctaccccatcgcaaactggctgtttcccatcgcatttggcttttcttcctctacacgccaggcaagctaatagagtttttgagaaacgaagacgaacgttcagtctgcttagttggtctgaaagaggggtcggagtgaataagacagaatatcatggactcgtacagacctgctttgacgggctgcaccctggatctgatggccgatcgaccgtccacagatgataaatcatgagaggtgaaacttgcggtcgagtacggatgggatctatctagcgggtgtgtcatggttgtgtccacacgaacaaagctgactgaacggaagaatatatgtgtgtgtctgaatgtgagagtgtatgtgtgagtgtgtgtttgtatgtagggaacggagagaagggttggatatgcactcgtgagagatctgttgagaagaattaggatgggatgtcttgagtctcaacctggtcgagtgttcataagaatcgttacgttaccgggatggtgagcgagagattgaggggttttcttgtgagaagaggaacagagagctgggtaaacgagtggagggtagaagagagacagcagagagatgagcgcagcatggcctccgaggcacctgcccgccaggatagaacccgcagcgtgaggtgacacaagctttaggattgtccctggcgtttaatgagccctcgtctgaaattgtgccctgtcgatccttgacgaatctccaccattggctgccgggcaaaagtgacgctcacctcttctcccgccggccagccgcagggcgtgtcgaggttgaccgcatggaccgtgcagttccccgaggctagactcggagttgattaagctatcatggttcctgaaccggccccatcgctcgcctgattctccttcgcgctctcatgcctccagttcaatcaccttttcgacctcgtccgtctaccggacggacgaccgaccgaccggagcagtttcggtccgacaggtctgatccgacaaacaatccggcttggttcgaccaggcttgtccgtcgagtcgaccatggcccatttgtatcagttgtggccatcatatgttcacgaaagaattttgaggtgttgtatacccttgagttgagctgaagaattgttgattcaataaggttttacagtacatgatgggacgtgatataagagcaagagccccagacggtcgagtccaactcatgtagggtgagcagaccctgtgggaaagataaagagatccatgaggagaaggaagagaatagcaagcatcggttaagaatatagggtacaacaaaagtctaatctcgtcggtcaacataacgcccttcatagctcgaccctctgcatcgtcctcatcggacgatgtgtccactcgccattcgaccccgacatggtcccttcgttaccttcgacttctcccgactcgtttagctcatcctctccatcagatgacattgcctctcccgatcgcttacgtggacgtgagtcagtcggagacgatgctgacagtgaatgaacacttgctcggtagattggttcatattcctatcaatcagaggtcaacgatcagaataggttgttgcgtccgtatactcccatacacctttgctctagaacgaccgacctttagttgattcaaaaatccctacacacgacataatttgaaacatgttcaaaaccagaatcagccacactatgtatcgtcgtatgcatatatccacgattggctacaaaaagaagagagaggaaagacacggctagaacttacctggttgagactcatacaatatcgcctactctgcacccacctgacagcatcctcgtaactcaactgcttggctaccatcacataccctaccaccacgctcggcgcgagtgagattcccccgttacaatggacaaataccgtccctccacgagagattgcatcgtcaatgaatcgggtcgtctgagggaatatacgtatcaaattttgatcctatactccagaaagccagatgtagtttatcgtggtttgtcagcacagtgggggtaaaggaacctccaaaagagtatcaaaaggcctaacctcatgatcagagatgtccaacgtcaagtaggtgaacctatctggaaatctcggtttcaccagcagagcctccttcttgtccctgatgcacacactgccaagtttccgttcgttcatttagtcgcagagtcaagccaatgtcaacatcaagccgtgtgtatatctggctcaaattagctctacgcttccggaacttctactcacatgtgagttacaccatatcctaaaagcacatctagctgtttggaagtctggaacggtccgaggtatagctgaggtagaatcagttgggcttctcgtcgcatctcgtacctagaccaattgaattatccaccagaaccattcaaaaggtaaggttcaataagaatcagtgaaccaagtttcaatatgtaggatgaaaaaagtgaacaagcaaggggatcttacttccaggtatctatcggttgtccaacagctacgtccggaagaacaggaaacgaagtgttgtaaagtttgtttgtatcggaagaaaccaccgtctgataagaattagctgtcgaggtgctggcccggccgtcgtccatcaggaaatccatgattctattgaatgcagatctgggttacgaagctgcaatgtcacgatttaaagttgctcagatgacgaaagaaaaagactaatgcacaaacgagagacacggaagcgacggatgggatggatggttgtaagtttggatgatggatgtttcaggttttcttatttcttattttcttaccccgaaggcaaaatccatttatctttcatctcacaaagatcgtccgtcgttctgttcttctatcaggggtctctcgcttcgtctcccatgcaagccgctactcaaagacgacgagctcagaagctagcgtccgcgtccgacagactcctcagaccgacatcgacaaacactcctccaccaccgccctcgtctctccgttccggacctctccgatcggctcggctccggctgatttcatccgctttcgtcatcgttgtcgtcgtccttgcatccagactgaaatcctcaacgagcaagattgagagatatgatctaggaataggtcaaggagaatgggttgtcggtcggttcgacgaatcttacgcgctttgtggaggaaaaggcatttggacaggggtcgaggaggagaatgaggagtgcatggtcgttgataagaagatggttgtggatgtggggacctatggtattcaccttccttcctctcctctcaatgcaccaaacacggttattgttctgatgacaccatctaaaatctcggtttttggataatctcataccgaacagatcacgtacgaaggcactggggagatcaggagtcgttaggtccaccgttgagcccttcaagtcaggctcctctatctgttcgaaagcaagggataaaggtctacaagctacctaagggttcatctataactgtatgtctcgccattttcatctcaactctcgatggagagagaaagctgacggttggttctgttcatctgcggacaatagccgggtgagcttcatcttcacatgagatgatcagtctcatacatcgaagtgtgctgtctcatggtcagattgtgcttaatcaacaataaatttcctctttcaaggtttggttgattctcacggtcatatcacagaatacggtgtacgtgtatccattcttctgctccttcctctggatcatatatatatatacatactgatcgtctcaattcggaaaaacataaagtattggaagagcgcggtcgatcttataggagcaacctcgatccatggtgagccttttttgacgataccctgatgtcattcatcatattgacgcgcgatgtgcttcttctccgtttatttaacagacgttgtacataggttgagagaagcactttcaaaagactctactagtaggtttgttttctatcgctcgatcattcatcttatttcttactgacctcgtttatgttggtgaccttagaatcttccgatgacccaacgcgatggatagaagggatgggatggaatcagaatctgtggaaagaagctacgttccccaacgcttcagatttggacgctgacgacgctcgttcgtgcttgattgctttcaaccccttttgtctctcatccactctttgtcaagttctactataaactaaagcgttcttctcctcttttgatctctctaacgaagtcaaaggccggttcatcgtattgaaacgaattgatgcgcatggtgtctgggtatcaaaaggtttgtactttatcacatcagacctccctgtaatacatgcgcatcttgctcatccgttgcttttctttgtccttctgtctaaatagctgtgcttgatctgatgagccctctccctgacgatgttgaaggaggagaaataattcgtgattcgtttggaaaccccacaggaatttttctggtttgtgtcttttctctttctgttgttcgagagcattggtgctactggtcatctgatcattggtcactatatcgattgatgaatttatggtcatgttcgataggacaatgcgatgaaactcgttggtttgttctttgtaatcaacttgcttctttttgacctcatggtttgtcaatgtttagcattcaggactgattttgaactttcactttaaaagacaatattcggccaccgcgaactgaacatgaaacaatctcttacatccgtagaaccatcctggatggcctgagactcggtttggtaggaatccacgacgctgtccgtatctcgtctttcttctttaatgattcaatctggaggcgcaacatctgctgacgtttatttctcacagggaaccccacttgctgaagtggaaacgtacaagaagtgagtcgacttcctagtttcgagtgacggatacggtctctgatctctcatcaatcatttgccccgaaggctagctgcttccaacaaccttccgctcagggtatactctatgctaacttgtccagatagatcgaaatgtacgttcaatctcaagtcggatttgcgtcctggttgaattctattcacttgacgtattctgcgcatcagactgtggaaaagggcagaagagggttgattggaaggaatatgatggccgtttcgtcttgcgatccgtcaagttggtttcagatggtgctcttggcaggtttgtcttctctctctttcctttcttttcatcttgcgcccggacctgtgcctttcaaaccgatgaccaatggatgtaaacctggaacgaccattatgacaaaccagttggggtgcggctatgcatgagccatactctgaccgaactgacggatggcggggaattatgcttcagcctgaagaaagtttcaaaccacttgtcgctgagtgggttaatgcaggctggcaagtcgttagtctctcttatctttctttatctttttttatatttcttgaacatgtttctcctttctcctctttattcgaagcggagcgaaatagactgactgtttgtgaatcacttagaatatccatgcgatcggagaccgagcgaacacagccgtgatagacgcattcgaaaatgttttagagaatcagaccataagaggagagaacgcattccgcttaaggatagagcattctcaaatcttgacagagagggatgtaaagagagtcgtcgatttaggaggtatgtggttcaaacccccattcaaccggtatcaaacaatacattaactaacaatgcgaactctcgtgggacttgggggaaatgatcttagtgatcgcaagttatcaaacaactcacgccactgtacgttgacgaccctttatgtcttgtcacgtacctacaattcactccatcgccaaattctacctgtgttattgatttttctagtctgatatggcttatgcagaagagaagattggactagaacggatgaagggcgcatatgcctggcaaaccatcctctcttccggcggtcgaattagttggtgctcttcttttcgagcgcccttctccttctatttttgactgacaccttctccccgtttgcgccaattagctctaggttcagattttcctattgagtctctcgacccgttgaaaggattctattctggtgtgactagattaaatgaaacaggggatagtcctcatgggaaggatgggtggttcccgaaggaaaagttgacgagggcgcaagctatgaaagggatgactattgatggttcgttttctttcttctcttcagtttccactgttttgccctttcttcattcctatgttattttgtagatctatggtcgagtcagatcgagcatgtaagctgaccatctcgttaactgacgcatattaattatcagcgaattacgcatccttttccgaaaacatcagtgttcgtctgccaattttcctttgcaatttcacagtcctctcttcccctcttcatctttttttcttggccttcctaaaattttctttgtttttttataataataaaaattaatgtgaactaaccgatacagggaacgctccgccctggcttcagggcagattatgtcatttggtcggacgatctcatgtctgtcgaaccaggattcatcaaaaacctcaaaccacttgttacagttcgtgccttccctttgtttttctcggttttttttgtcctttttgtagcttaccccgtctgggctcgatatggtcttgcgtgctaatgattcgaacttggtctgggcaatgagaaaaggcgatcgatggtcaacccgtttgggggtctctttaagcgctgtctttctctctgtctaaactgatgttgatgtcggcactagattcaaccgtcagtacgtggatataatgaatgaactaaattttgaaattcacttggacgaaagagttaaccctaactgaagtatctaacattcatctggttgacgaaccttgatctctgctatcaatctatcctttgtatctttatatatccagtttttcttttctcttcttacctacgcaaccccactttcagcctcatcttggatgatgcaagaaacagactgaaagagaagaggagatggaaaggttcgagaagggaacggtttgtgatcaccttccatacgggatccaaccaagtagagaatcagaaaatcaatcaaataaggacaagaaagattttcccaaagagaagaaaagggcagagggaggagaaataagaacaggggatagaaggcagaggaaaggtggaaagaaataagtgggaatcaagtggaaggaatttcaaggagaaaggaagagattaagaagttcgtacaacgcttcaacgatcgctaaaagcgtgaaccagaaaaagatgatgatgacttgagagaggaaacatgcaatgctgcccaaaggagttttgatgggcaaatttggttggtgagacagacagatcaaggattgggttcagatctttgagtttttctaaatgaaagaaaaaattgaagaattctgaacggaaatggggatgggatactttatgaagagacgagaaagaggaataaaacacgtcaagagaaagaagagagaaggaaggaaggtaaaaaatgacaaaagaggaagaaaaaaaggtcgggatagaataaaaccaatcgactgaggcaagcggaaagagagattaagcatttgaaagtacttcctttcttcatacagtagcctgcttgatagcctccttggtccatttggcagtgtttcttgtctcgctgctcattcccttccctcgtccggtcttgatggcgacggtgatccattcttggaggagaagatccttgatctgtccattggggaatgtgctggccaaatcaccgatcaagccaagcgcccctctagtgatgggctcacttcggtcgtcgtcctctaacgctcgctgggcgaaagccaagatattctgcacgtgtggcaagagaagacctacggtgtgtagagaaatttcaagttaattcaaatctagtcggttatcacgcctctaaacacaaacaacacacataccttgatcctcggttctcaaggcagaggcaactccaacgtaggcctcaacaataccctccctgagcaaggttacatactcgatcaggtcgaacgagttcggatcgggctgcatctggccggcctgctccaacacggccatagtggtctcgacgtacggcctgaatgccggtccgatagctagagcgatatccccgaagcatgacaaaatcggcggcttgacagatcggtggagagactgggactgcaggtttttcaacaaggccatcatgaactggtcgcagtacggaacggactgagagccgagcgctcggcaaatatcaccgatcagaccaacggcgattgagcaaagctggtactcttcggtagcatcaagcgcggtagcaaggtaggggaggaaggcagtaatgtagggtgcgaagtcctgatccaatgcagaggtcatagctccaatggagagcaaggcgtcctcaaacacggtggcctgctttccggcggtatcacacaaggagagcaacacagtcatgattcgatccgaaagcggtcgaatctctggtccaagctttcggatgattgaggtgatcacactgcacaagtttccctgaagctcgttccagttgttcctgtcgtccgttccgacgagctggttttgcatactaaggagggtctccattcgggacaatacctcgagcgtcacctgggagacaatcgagagggtatcggtggcactttgggtgacaaaggtggagatggcctcgtaggcggacgttcgagcgttggactcatttgccggggcgtacttctgagagacccgcatgagcgcaccgacaacatgctcgtagtaaggtgagaggggggtggtcgacggcaacggatcgtcatccaatccagttccaagctgttcagccaggttcatcagcgaccaacagcagtttccgacaattcgactgctgtcttccaaaccaacaactagcgattggataaggtttgggagatgaacgtcggtctggatgcagtcgatcaagacgtctgagattcgaccgagtgtccaggcggcggtgtccttgacatgcacatttgggtcctgcatcatctcgatcaaagttggcaaagcctgtgcgacaagtccggcgaggaccttggggtccggtccatcgaggatggaaccgaaggccatgacggcggcctctcgctggtgccaaccctcgggggagtgatccttgatgttagcctcaacgaaaggaataacaggggcgacgatgtcgtctccaacggcctgagcaagaagtgagagacaggtcgaagctgccatcgaaacgttccactcgtcgtcatcggcatcttcctcctgctgggtcaacaactggagaaggacaggcagaatttgaggaagagcaatctttgcaaagttcttgctctctcgctcgggagcctcgttgtactcggcggcctgaaggatgaggggtgttgtagaatcatcagtacacaaacttgatactgaaaagaagtgaaaacagatgagtctttacctcagcggcctcaagaccaagctcgacttcctcgtcacacactgtcgaccagaattcaatagcctgcaaagcgaccttctcctccgggttcctcattcctaaaacggtaagctatacatgaagaaaaaagaagaacgataataaaatcagtcactgcctatctgaaagggaaacccgttgacagattgaagacgtacgccaaacaaggcctgctccatgtagaaagccatcttgtcatagtagagttgcataatcttgacaagacactcgaaggctccgactaccaccgggatcgaggcgttctgggtggcctcgcagacgacctgcatgatgtagtttcgctcgccctgattatgaacaaaagaaaagcagagtttagggatttgggttccattctttttgtcatggtatttgcgttcaactcgagagaaagattcgattaactaacgtctcgctcaaagttgcttcggatgaattcgagagagttgaagagggcgttaatggcagcgttctgaacttcggggcttggctcctcttttctagctccctgaacgacggtggtgaggatctcgttagactggctctcaagaatctcgggtttctgattatgtgacccaaagggtgatacgtgaagacatttaagatgagcaagcaggtcgcataggcaattcaagagagaaagagaagcagacggtcacttaccacagcctcgcagatgaaaccgatagtctggagggtagaaattcggagtccggtgtttgcctggtcacccatgaactggaggagaaggccaatcaactcgggccactcgttgtgaggaagctcaaccgctccgatagcagagacaacttgggcggcaaaggaaccagctcggacgatgggagagccaagcgttcgaaggccctgctccttgacctgagctttgacctgaggagagagcgaacgccatcggtaggtgaactgggcttgacgcgagggatcctgtgatgataagagccgagagaacagttcgtgataagagaacgatgagagaagagagttgagttgaagtgtggacgtcgactaagatgtccataagaaaagaatccactcacccttgctgacaaagcgttcttgatggccaaaccggcggcatttctcacgcttagttcggccgactcgcttgagagttgctccgtcaaggtgatcatgtagccatcctgatagagaagaagaggaagtgtagataggaaggaaaaaaaaacggtcgatcggatgacattcagtcaaaatgatcaaattgataaaggagaatcgaggaagaaagagaagacgacagagaacatgccgaagagcagatcaagatgggaaggaagaatattgcaaggagaaaagggttctcacaaagttctcgttagcgaccttttcgagctgctcagttgcctgttgtcgagtgtgggcatctggaaggaaggagagaaatcatacatgaaccatcgtcttgtcagcgttctgctttcttctttgcttgtcagttctttgggttgcagtaagagcgagagagatacaataaagagccgcaaatgagatgacttgcctggtgagagcgagtgagctagtaattgagcggcgtccatgtttttctcagagatcaagaggagagtgtatgtgtttgtgtggatggataaaaacgcaaggactgaaagatctgtttgagcgggtgaaacaatacgggtgttgggagtgagagagagcgaggggagttgtctgactataccagacgatggcagaccacagagagagacagagaaagagagggaaagaaagagaaggagctgagaggatggaagtctgggattggggttgggatcgttgctgatgggcaaaatctaggaacagaaccaggaacaggaacagagggaaaaaaaatcaattcaaaaaaagatttcatctatctagtttgtattttgtttgttcgcgtcgactatatattctctacagtcctctatcaagaagcgcgtagagaccttaatgaccttagacaagactcgtcaggaacgcttccatcgtcaagtcacacaattcaggagatctagtcgtccttggtgatcgtcagtttccgagagtgtgggtgtgtgggtatgtatgttgcagaactagaggaaaggaagaggaaaggagagacgatgatctttagagcgcgcagatttacccatgtacccatgcacacatgccccatcgtacaacaagtcatcaagcttgatagttagcagtcgagacagacagttgaaggtgatcatagtggttagtgtaccttgtgaacgtcatgttttgtaaacgtgaagggatagcaagagagccagatagagtgaaagtgtaagagtttttataaacttatacatgttcaatgctctgattaggcttctcatagatcgttcgaagcgttgcgcttgttgtgtttatcccatgtggccatgcactctttctgaatcacaagagtccgtagatcgaagcagctcataattcaattgactacggtttctgtttcattctctcctcatgtccgttgcagagaactctgtgatggccacacagaggtgaaacacagctgtatctgagcatctacgttcttgaccttgtacattgcttgctcgttcgtaggctttatatctatatactcagccgtatcttctcgttcacctcattcgttgaatcccttactgttcttcccatgcaacagagtgatctctatcatatcttctgcttgatcagttgtgggtaagatgatgtccattgtatacttacgggcgttgtatggccggtggtcacacatctgctgctggttatgcctctcacccgtaaccaatcctcacgttccatcccctctggttctttccatcttgtttcctaaagcctttgaccgtcactacacgcttaagcacatacacacacacacacacacacacacacatacacacacacatatatatatacattatgtctgatagagtaacaccccatccgctttggtttccttgatgacctacgattccgttgtcctaaccgttcatctcgacttgatttcattgtatagggccgtggtgcaccaagaggcagaggaggcccatcatctcgaggaggaagaggagggaaccagaatgcaggaggtggtggaccttcgggagagaaaccaaagagggaggctatccttgacatgggaaagtatgtcgacaagaagattagagtcaagttcaccggtggtcgggaaggtgtgttcttgattctttcgaagaatcaactcttcctcattcctcctcttttggttcttgccctcttgttcttcattggaaaattcattgatcagatttcaaccatcctcattctctctcagttgtcggaaccttgaaaggctatgatcaactactaaaccttgtcttggacgacgtggaagaagaagtccttcgtatgttatccttctctctcatttcgcgtcaatcttgaacctctcaaacctcgtcatcgtactcattcctgataaatggacctgctcatcacataaacggtttctatcccagttcctacgccgcatacgagatctcttggacttgtcgtcctgagaggcccgacgattgtcctcctaagccctatggatgggtcagaaggctcgtccgctttcctctcttgtatctgaatttcagacacatattgactaacttttgagaaggaaaacgattccctcgtatgatcaccctctgcttttttgataaacagaaatcgaaaacccgttcttggcccctgagtcgtaggcgcttcgatccgatgattaggacaaaaaaagagtggtatagacgttagagaaggagagaagaaaggcacggcacatttggtcgcctttctcggtagaggaggaatatgtggtcatcgaacggagagcatagacaaatctggttggacttggtgatgaaaccgaacaagaagaaaaatacaaggtcatctatggaatctggagtatgatcaaaagacaagaagagaaatcctatagcaatcttgcttcttgctcgcgaataagaaaaccggaatgtcaaacgaacagaacaggacgaataatctgaaagactcacacgaggaagcaatgattgaagttagaacttctgttttgggcggtcgtcagtcgatgatcaacgatctatcaacaacggctagactcaaggtctttgaggcaatctgcaaagtctgctgcgtccattgatttcaaagtatctagacgcgatagaaaagatgatagggaaatcgtatagacattcttagttgtggagagcttctcgtgagggacggagaggtacaaggtagtaaattgtgaatcaaactatcatatcatttatgtgatcaggccagaccagacaatttccaggacaaaaaagcaagggccaaacaagcaaaacatgaggtgaattcagatagatgatcgttcgcgtgacatgatttcctcttggatgaaacagaagagaaagaagagaagagatatgcacaagaagcctgaaccatgcgataaaagacggtatgcagatgtaattctttggtaagtgaagtctctcgtgccttttttgaagaaaaaaatacagtacaaagtttctttttgtttctttttattgttctttgtcttcggtggtgtacaaacagacatggaggagatttgaagatgtgaatgatgtaagatgggggctaaaagaaaaggagagaagagcaaaggaaagaatgagaagaacaacaacagggcttcaacggccccctccttttttctcttcacctgaatcgacctttctccgcaccgcttccacccccagccgaactgcctaatgtagtcaagtcggtagcagaagcagaagcatgcaactccaacttgcttagagcggtcgaaatatcgaaatgatgagccagcctactagcagccgtcggcgtatgtgatgtcgtggccaccatccccattcctctatagtcatcacctgctgctattgatcctccacctaaactcgctcctagactggaacgtggtcgggagcttgatcgggagagtgaagacgacctaggaacagcgaatccatgttgaaatcgatgataactggctgtagatccgccagatgaacctataggtggtgtggacgttccgttgacaccacccccaccggaagtaccggagacaccctcaccaatagcaccagcgttgttcaacgccgcgttgatcttttccaacggtaacggttgactgacggattcaggtgagagcaacaacgatggactcagataagccggctcgttcgacgaatcacctcctacaaccggtcggtagtgtaaccgaggggatgtgttggcagaagcggaaaccgatgcggtcgcgctcgaactaaaaggcccaagaggtccagcagatcctcctaccgtagccgccgaaggaaacgtaggtgaagagaacacgctggtactactattgctgtggttatggttgtggccgaggttgttgacatgatgactactactactattgctgctaccacctccatttgctccaccaacaccgaccaaggaaccaggtgccccggctggattgcctaccgagctgtttccaaatccaggtcgggctggtaatccatgagaacttccagggatcgacggcattgttgttgttgacgacgaagatcccgtcgacatcgaggatggggcatctgagggtaaaaatccagccggaccgagtccatcctggtaaaatctatcattacctgacgagctgccagctccgttcagatagattgactccacatttgccgatgacagtccgaatgttgagccaggtggtggagtagagattgctctcctagctgctgaactggctggcgaagttgatcgaataggagagtaagccccggtcaatatctgttgtcctgctccagatccaacggcaggtgaaggagagagaccggatcccagtttgatgttgttgattcgatttccagttcgacctctaacatgagtcgaacctggcacagtaaccgattgtctgtccagactagtaccgccagttcccctgttgaatgcatcggagaaaggaacagacatatccactggtgggattgaattagcatacattccgtactgagacccagtcgatcctgctgatgcagcagcagctacagccgcagccgacatctcgggtcggcctctatcctgaacttggaatgtgggtgacgtcgagagatcttgtttaggcatatgttgagaaccacttcggctactgatagggatcccatttgatgaatatccaccagaaccaccaccggatgtacctctgggtcctaggtccatacctaagccccttccacctgtattactgctgccaggacgagaaacacccatcccactcaattgggcagacctacctctgggcgagccagctggggagtgcacaggggagaacggactggatacgataggcgtatatggttgacgggatgtagcagaggcagagaccgatcgataaaggtttccatttgattgatgatactcggcagctgacaaatgtggagatatcgttgatgatgctgggaacgggaggtactgttttggaggtgatagtctatcaacgtgctttaagacaatggtaacacgatagaataaatttgtgagcatgtcacccaatggagctatcaagagaaggatggaaagaccaactcggtagccgcttccaaatgcatatggactccgactccctcctgcaggtgatctagatctgggtgcgcgcataagctcctcgtctctctctacggtcgttttgtcatcgatgagggtcttgtaagcactctggttggacaagatagaacgaccgaagagaacaaaggcaaaccttcgcataattgagctaaagcggtcaccgctctgcctggtcgagatgtcagaattcttgatgctctcatgaactctcctcgtatcgtatacaaaccatcctttgtcaccgttctggccacattctggttgaatcgaatcagagaacaaacgagattgtcagccaattaaattcctaaccaggaacgcgactttcgatatcgattctttaaaggaagagaggaaaaagatcgtcctcacataggatgtctcgaatggatcttcgatacaaagtctattcctgtctcgactcatctcgttcagactacccacatcgctatctgtggtccacatcttgctctccttcgttaacaagccagctcggatagagaccacgtcggtgttgaaagcaaaattttgacagtaaaatttaaagaagtcgatcaaaagttcaccaacggactggaagtttgcggacgaccattctttacgcaacagctacagggatgaagacatatgttgtattcgcaggttctataagtaaaacgagaataacaaagaagaaggatcgcaggggaatcagatctgcttacctcagtatcatcaaagaaccttagagtatcaacaagaaaggcttgttagactcagattcgagggcatgcatgtgttgattgcaagagacagcagatgaaagatctttcccaccaaatattatgaccatctagctcgagctcttcttttgttttgggtaccagcggtggaatttgctgaagatttggtaacaccggtgggttttgtacgtgaataaggaagaagaggacgagaagggtaaacccgtaggatgagagtgtccctcgatagggtgagttgatccgtcgtcgtttcgaccagactttgatgaaaagcaccattgttcgaactcgagcaggatcaatcgtactgatatcgagagtcaagagggtacgaacaaggaacgatcagactcatgtgtgacaagagtttcacgatctcggatgattggcaatgactcacgcgtatgtcagtaataaccgagtattttcaagagcaagtcggttctcgaagccgatatcgcactatggagaagatgagcagagcgaaggtacaaacatgatgagctatcgacagcatcgaggagcgcgtgaacagataaagtgaaaacaagaaagaaaaaggaggcatgtcgactgacagcaataccgaacggtaggccaggggacggggataatgtgagtttaataatctaaagatgatacaaatagaaacaagcttgtcagcacgtcgtcaacatttcttttctgctcatactcggaagtaggatattgcaataagaagaggacgaaacacgtactggaacataagccttgggcagggccttgacagcaaagtttgtttctatagaagtcgaaagcgtaacaaggcaagagagtagagagaaaggaggggaacacgtgcgattagaatcatcgaatattggcatatcaggactagtagcaagtactcgccttgttctagaaggtggccgatgatgttgacgagatcgcttgccggaggtgctgatttggcttcgtctgaagatctgtctaagagcacgcagaggtccatgtctgtgaggtatgcaggtaagcgagtgtaaggtataagatatcatgaaaagatagacgaagtaaccaaccgctatttcttagagagaacccattagcctgataggatcgcagaaggaagaggaagaaaagtgaggaaagtacgtttagcaggtatattgattggcatacgaaacaagttgtgagaggatgttttaagagagaaaaaaagaaggacaaaaaagagctcacagtgctaccaaaggccagtagcctggctcccggctcgacggtacgtataagcttttcgatgaggacccggacttgctgctttgtgttgagctcttcaggcgtggggaggagtgggagaatgactagagagtgagtaaggtgatcgttcgacggaatggtccagtcattatagaggacagcagaggggacaggagcgaaacgagaaacagaatcgaaacgagatatatgtgagtgatttgagactcgtgataagatactagagaaacaaatagagaagttccaaggcgagagaagacaacggtaacagtggaagcgaacgagagagtccggtcgagaggtatatacccaaagtaatacgcacagtggaagagagaggtcgaaagctcatcgagatagcgctgtttggcttgatggacctgcatatggaaagagcagagcagggaagaagagcctttggtgtggtcttcccaatgaataggagatggtggtagtagagcaggagagaaagaatcaacaaaggtagaatcaacgatgctcgagaggtgtggcaaagaggagaaaggcagtcgagattgaaggtgacgagaaattagagggcgtgttttgttacttggtcgttactactttgggtgagctcctcttgtacagacaataccacagtgtgataccatctttcatctatcaagtctctgccatagtgtcagtcagactcttggagaaacatacctatagacttgtaccaaagtatgagagctatagaacgacgggaaatgcttgatgtataagatttaagtgttccgtcctcaagcgcaagctaacagccacgtacaaagtatcatcctatccaaccttctatcttattgtcccattcggcatggtctctcaacacgaaggccggagagcgaatcgtattcaaggcggacaaattctatatgtcattttgtgactgttatttatatggtttggaacgtgtgcatctatccaactcgaataccttgattctagtgcctcaatggcatgttcgcaagcaacggcgccttctgactgttcaggcactcattcaaaacaagagatcgaagaggtccgttgggtgcagaatacatcagcgcatccatcccgatcaacccttacaacattctcgtcagagaaattagcgatctaattgatggtgagcagaatacaacaccaactgggtttatcttatcccattcgcagcaaacaggatagcttctcgttttaatgactccctactctacactatcttcttatgagctaaaccggtgcttcggtttattgttcttctcaatgggcatctagcttgcgatcttctagttttcagtagctgcttcctctccgttcagctctattcctcttacttctgccatcgcgacagtatttgcttatgagtacgcgcacaattgcattctgttcctcaatatacgtttgatatggacctccacaaactttttgtagcgcttcatagtttccgagctggaatcatgtcgtgtgtgtcatcttttccaaagataattatcatcatctcccaggcgacagatacaggtgttagaacactcgctttgcgcgctcgaacattcaagaaccattgttcgctggtttgaaagctatatgagttcaagatagagaataaggtcgtagacctctatatatctgtggtaaggatgactgacggtctctgaagcatgtgtactataccgttatctccggtgttctctttctttaggagtgtgtctgcaaactacagccctttgtagtttggatcagagatctctggtttgaaagtatctagaagattttcatctgtccgtcgtgtatgccaccctgaagtctaggtctgcgagcgacacccctatatgacatggctcattgactctctatgccatgttaattccggtgggatcaatcatggcatgatgaagtgccccggatctgttccgacggctttcaacgcacttttctcttctctgctgttctcctctctctaccgtactcccctctctcttcctctcaacggcacctggattgctatgagctgttggacatatcacacgagcaggccccaggtgagacacttttacgtaatctgactgtaaacccagttacaaagggttacaaccctctgacagcgccttttcccatcatctttacgttcttcgttttttcctttaactctcatctttctcctccaacatcgtccttcgtcttctttcgtcttgcccacatctagatcatccgaacgcatacatcccagggcatcgtcaaataggtctaactcttctcctatacctgtcgtatccgtctccgtttttcttgtcttttggttttttctccatctccacccatccaagacacaatgccatcccgtcttcagtctgaacatctctcgaccctcaaggccatctttcctgattgggcagacgatgacttgttgctcgtgctcgaagagtccaagggtagcatagagagtgccgtaggaaagatttctgaaggtgcgtactgaccgtgtacttggtgtctcagatctcgttctttttgtctcttgtccttttttttcccttgttccttttctatcaccttcgcttcctttttatctctcgttatcctgttctttattgattcttggcacttctttgatctctaactgacccaactggctgccttttttcaactttcattggctgttacctcgctcgctccttcgttctaatacaggacaagcttctcagtttaccactgccacatctcgaaagactaacaagaaggcaacgcccaccgcttcatctactggttcctcatctaaccccggtcacaagccggatcagtccgcctcctccagccgaggaggcttcgagggtggcttccggggaggtttccgaggcggtcgaggtggagctcgaggtggtggtcagtcttttttagactctttttccatgtctcatcttcaactctcagcctttctccttacttttctcatctctaatcttttgttctccatttatttgatcattcccagccggatttgctcaggctagccgaggtggctttgctggccgaggggccttccgaggtggagctgggcgaggaggatacacaaactcgacccgagcagccccttcgactcctaacggaacgtcaactgctgctcctgtggcccctgtcgaagaaaccccggccgcccctgctgtgatcgctccccaactacaaggtgtatgggctaagccaaagcctgctccggcagctgctcctgctccggcccctgctccggcccctgctccggcccctgctccggccgctcctgccaagaacgaggttccagcgaaagaagatgcaacagcagaggctgatggggccgctctgagcgagaccgtcaaggaagcaacccatgaagagagccccaagtcggaagagagtgagaagaaggatgaagaacctgctggacctacagcggccgccaagggcaaggcagtggttggaaggacaatccctaagggaacaaagatgtcgtgggcccagattgcaaagtgagttctgtttaaacgaaaagtaaccaattcttagttatcggcgctaaacaggagacgcgatcgatctaaaaattaggcctcaggaaaagcccaagccgactcctccccctgctcctactcctgctcctgcgcctgcgcctgctcctgtctccgcccctgcccctgttcaatctacccccgccgttgaagaaactatctccgcgcctgtccaggagtcatcatctgccacgtctcccttggttgaggacgagccggaagagtccgcttcggcggttcctggtgatgacacctggcctgctgccacatctagcgaagagactgccgaggaggcctcacctgaagagatcaaggaagagactgatgtggttgatgctcctctgcctgaggtcgacaacttgagccccccagccgaaaccggtgctgctattgaggacactgagatatctgcccctgccgctgccgagcctgtctctgaggccccccccgcttctgctcagactttcctcaacccccctcctggatttgagcccttgcctacgtcatctgaagtcgccaaggcaagctctcctgccgccgcttctcctgcacctgcttccagagcagtaaaccgaaacaactctaagcttcgacagtttggagacgaagccgttgtcatgcccggtaaggccactggtggtttcggaggaattggcatgcagtttggtagcttgagcctaggtggtgatggtgagctccacagcgaggagtcgtgagtcttgtttcccttctctctctagtcaagctgagctgattttctggtacaatactgatatcgtgttaatttgtccaaatacttggatacagtcgacctgagccggcctttgctgctgagcctacacccgcccctatccctcaacccgagcctattcctgcaccggtcgctgcaccggtcccggaacctgtccagcaacacgctccccaaacgatcgagcctattcaaccccagcagccgatcacgactccccaccagtattcccagacgaactctagcatgaacttcttccaacagcccacacatacgcctatcaccagtgccgctaccgttgcccctgttgctccctcgcctcagcttcaggctcagcagtacggacagcatcagcaacaccaccaacagcagcaccaacagcagggacttgatcagcagtcgacctactcgcacgctcctcctggtggattgacgaaccagaatttctacagacaggatactctgacgccctcgccctactacaacagccagcagcactctcagacgggatcgctttcccaacagcagcagcagttgggtgccccacccgcgttgagccagcagtctcaggatcactcccagcagtacggagccagtccgtttggaatgggcgccggaagtggacttggaggttatcagggttaccctgactcgtacggagcgatggatcgaagtttctacgacccatactctacattcactcctcagcgagtcgaggccgagcctactaaggcggcttccgctcagtcccagagtgctcagatcgcttctcagtcgagccaaccgcctgtgcacagccagcatcaggccgctgcttctgccggtggttactacaacaacatgcctccttacaacccatactgggctaacaacaaccgtgagctcttgggttggactccttctttttttttcctaagtgtcgttcgtggttaattgactattcttccttcatccttctatcaatcagcctatggttactacggtcagacccccgcttgggctcagcagcaacagtgggctcggccataccctcagcagcctcctgcgccggctcctaccgggagcgcatccggtgtaaagcctcctagccaagcgcctagcagtggtccgtacggacacttttcgtcttcgtatgaggatcagcagcagcagccgtcttctctcggcggatactctagctcgaacctcggtcaaggtgggctgtcctcccagtatggaggaatccattccttcctaggcggttcgcccgcccctcaggtggcttctgttcagtctaccggtgtcaacaactctcgacagggtcagtcttctccggagacgacctacaagagctaccagcaggcccaggagaagcaggcttcccagagtgcgagtggtggtgctggacagggacagcagcctggccaagtgcaatcccagggtcaggcgcaagctccccagcaacaggccggacagcaaggtcaacaacagcaggccggacagggtggtcaacagcaacagcagcaaccccagcagggttctgtccagggcggagccatccagggtggtagccgaggtggtggaatccaccagccaaactcttactcttcctacggaggaaatgtttccggttcggccggtgctcggggaggagctggtggtggataccccggacagagcgtcgttagcggagtaggtgctcaggtcggacagggcttgccgcctaacgcctaccaaggtcaacagcagcaggagtacaacggatactattcccagcgacaatactggcagtaaggggtaggaagcgctctggataagatgagagacgaataagaagaacaagaagaaaaaccaatattttttgggaaaaaacaacctctactccactctttgcctttttttctcattttctcattttttgtgttctctgatttttatctttatatctggatttgtccgaaatatcatctgttcttcgtttccatatcaatctctctcttgctccttactccaaccaaatttttctcccttctctcttctttatcccatcatgtgctctcttcttttgttactactttttcttctcgttcggcttttctttcaactttaactcgtctgtaacaaaggtcacggtttcgaacgtctcttttcttctcccctctacaaaaaaaatacatctccgctttcctttccccttatccatccttttgaagaaagaagagaagagaaaagaaacgaaaagaaaataaagagcggaagaagagagagggagaaatgattgtttgaaggaaaaataagcacttcggatcatgtttcctatttagaagagtatgcgccggatgtaggatgtagagtctgagttgacatcggaccgagaaaaggaagacggtggtagacatcgacgttgatttgtatacgaacatcagatctcaaacaaggagttgaaaacacgctaaatgagcataggaaaagatggagagacagacaacagagacgggcaagggagatgaaacttatcaagatgatcatgaggattgatgatttcattgactgaatgactggaaggacagatgaaacaatagaatataacacgaggacgggactaatatctttctatctttccttaccttaaccttctttccttatgtcatcctccgtttatccgtcttgctccgtcttgctccgtcttgctccgtcttgctccgtcttgctgtctctccatgttctggttctgccgacgcaggaagacgaaacgaggagaacggatggggttgacatctgggtatcttcttttacagtatataccttatgaactatcatgcaaacagcggcaaatagaaataataagcacagaaaagaagacaaaagggccaagaggcattgaaagcgattgccgatcattcaggacgcttctcacgtgcaatcgtggcttgccccatgcagtgggtgggcaggacggggcttactttacacaagttaattatatcttattctatcttgttatattacattattgtcaatttgaattttttatctatctatccattcacatatttgcctaataatctgtctgaccatccgtctatctacgtatttatttatttgtttacctaccaacatggtttcttatctgtttgtttatcttttgtccttttaccccgttcgtcatgatcttcccttgcgattcggttcgatcacaaaagaggaagggatagcagcgacagaaagaaggtaattgattgactctgtatgtaatgcaactgaccgttcagatgagagtggcggttggagacgctctaccctttctactcctctctctttctggctaaaggacgctgcttccctcctttttttctccgttttttttttacgagtagctcagtttcctgcggaattctattcgatcagattgctctctctatactcttcatttcatttttcaaatggcctaggtctatccaacttgaattcaatacgttttatctttattccttctccgtctcctgttgatcggatcggctttgagctcttcggtctttttttctcctccgcgtgtctacggaggtgtgcaaggctgggggtgagaggcgtgtgtgtgtttatgttcagaggtggacgtcggtccttacgctctcaggtaccatctctcccccttccctttcgacctcgaacggaccactcgtgcctgaaggcgtgagggaagtgagtgaatatgtgtgtgtgtgtgtgtgtgtgtg

SEQ ID NO: 3035 - DNA, 4214 bp, Xanthophyllomyces dendrorhous
tgtgtgtgtgtgtgtgtgtgtgtgtgtgtgccccttaatgttctcttctctcctctctgccctcgccctcgctctgttccttgttcctatcacaattttacatccccacccccttgcccttgcccctcttcatctctgctcgctacccgccgaaagtgcgtcggtctggtttcctgtcagcattctcttcgcttataaagatgaacccgtccgtctgagattgttttttcttcttcttctccttccttctcttctcatatatccatctcctgtccacaaatatactcacccactcacccagccactcatcatatgctcgcttacccaccgttaactaaccatctcgatcgaaatcaagcgcatacacctacccatactcagccggcagccatccgaggagatattgacagctttctatcatctcgctccagagtcgttcacatctcgggcctgccaccggcttcagtcaccggcacattcgacagctcgggcgaaaaattcatcagcagagaggcactcgtcgactggatctctcagaacaatgctcgtgtcattcaggtctggggggagagacccaagacaggcgatctgttgatgagctggtgggtcgtctttgaaagtcatcaacaggtcagtcgccccagtgatttccgacgttccatcatctcttctgtttttgctcattctctgtcgcatctacctccctttctctccaggcccggaatgtccttcggttcaatcaaaccatcgccttcaactgtcgagtctctgtcctacccgcatcagaatcggatcttcggccgttcgagaagttagtcagaatgcccgcccgaggtgactatcgagatagtgtgagcaactcattcgttcttgatgtcgccatcaccaccaaaaactttaccgctcacacacacacacactctctctcttctcgccctggcagactaatttgacttcgtccggcctgccatgtccactaaaccccacactatcatctccaccaggacctactttgccatctccgccaaagcatattctgccggaccttgctccgtcgagctcattcgaacgaaccccctcgctctcatcttccatctcgtccggctcgtcattgatgaaccactcttttactaatagaggcgcccctccattcactcctcgcccgccttgggaaaccccagaccttgttcggtcgtctccagaacagatagaatcaatctggccagaaactctatcagacgctcttccatcatcgtcgtcctcacctggtgcagtcgtaagtatgaagtcttctctttcttttcttatgtgcgctcacacccgccgttctgataccaacttgtcttgtttaccacctatcagcagtggagatctggagactggatcgtaagctcagtccgtacgtttgtcagcctgttcttggttcgcatactaacgtatacttcaatgtcgatttctagtgcccttccgatacctgctgtacgtacccgtgagaactatgtgcccgatggccagatgcctgaacattcgactgacagaattctgtcctgtgtttaccacttacccaaaaaaaaagccttccacaacttttctagaaacgatcgttgcattgtgtaagtaagcgtttagacgtatcaagacacgaccctcacaccgctcatccttctttgctcctttcactttagctgccactgtgctaaaccgacagctatctccaccagaactcaaagtatcaatcatcccatagcttcctacaaccaagcacaaccggaatcgatctcgccagctcgaccaaacttacagaagacctatccttctacctcagtcccaccatcaccaatgtttcccggaatggaagcctttagtccgctcatgggctcctcattccgtccgcttcacctctcctcatctgcccccgactttgaaacgtgccttcgtgtgaacgccccgacgttcagcccttctctctcctcaaagattcgcccggtctcgactggtggcaacgtgtccggccagtcagtccttggtcagccgtttctcccctacgtcggcggtcttaatcttcaaaacattcaaactattccgacgaatgaatctctctcagacagaagggactttgctctcggctcgaccgaaggaacaaaccctaacattatgaaaagacgcagtctccctcgcggcttggagttgacaggtctaggagagattccagggagtgcttacggacggttcgaccgggcacgcaaatctatacaaaacatggacactggcgagaaactacagccagtgcgttctgagtgttttgttccgctggtgttgtacgacctgcccagctgaagactcgcgttctcgtttctctgtggttgatttagatcctgaatactggaaataccggtccgatggtttttcagccagggtaagtcgtctgagttctgtctgctcgtttcgtttctttcttatcctttttcagtagagacgatcttaatcgctctactttgggttcgtatacttctgttatccagcgactgggcctgtggtgaatgcggtttcgtcaattggcgaaggagagatcactgtcttcggtgtttccctgctgccaaaggcaacgaggtggccgggattgctatcgccacgtgagtactgctgtatcctctcgtatgttgtgctcatcccatctcacaactggtcgatccattttattttactttccctttctttttctctacagatcggtcatgatggccaaccagttggcacaggacactcctcctatccatcgaccgaccccaacgcttggttcgatggtttcatcacccacatcgatcacacctcaacctggactttttacaaatgctaccttttctggaccaaaacacgctcgagaagaaagcttggacatgacccaaaagacagcctcattcgacgctttcggaagaaaggtgtcctcccctcgaccactatcgctcgactcttatagctctgccggtctccagcaggcacaacaccgcaagcatggcttatgcaacagcctctccaacatcttgtcatcggcctctgttgttgatgaactttctaattttggtcagctttctctcggcggattccattgaaaaattttgtacatattttcttcccttcttatcagatcggattacacctacacagatacggtttggaaaatcaaaacctacaaataaactcaactctgggtctcttcatcgcgttctctcctatcccacttacattgataagaaaaaacttattggcacatgtcgcaacattcctctcgtgtattctagatatggtccatcacatcatccacatggttctcctttgactctggtccttgcttatacgcgtctgtaacactgttcactgaagatattttcttttctattctttcttaccctctctgcctcgcacacatacacgcaaacattcctctacaactttagtctctgacgttctccaattttccattgctactttctcacgtcgtccatgtttccccttggttctgggttttttagaataatgtccaaactcaaccagctctcgaattttgtatgctttccctacctttacctctctatctctctctcgccgtacactcgtacctagtaggtgcaaggtaggcccatggtatgatgaatcggatgtccatctcggatgatccgttcggcgaacgatgcaatgtatcatactttctcatcaatttcgagtctattttcctgacccctttcctggtcaattctgtgcgaaccagtctgtgagttctggccccaaaggggcacatccaatacgatactgatatagacaagagaaggaaactctagatagatgaaaagacatgctcctcgacgtaggacgtgggaatcacttgctctgtagacccttcgagtacacatatacttggacttgcgaacgattgaaccaaggcgcttatagtgttgatcaaatgattcatttgggttctcacaacctgataatctcggcattgatgtgatatgatgtgacatgccgatgagatatcaagaaagaatcagaaattctccaaacgtgtagatgtttatggaaatgtttatatatgaagtgtagattgcttgtacttatgtctatgccaatgcgaacaggagtgtaggtataatgtacagagtgaacagtgacgagatggtttgcccctagggtttaagaaaagaaagaaagaaagaaaa

SEQ ID NO: 3036 - DNA, 598 bp, Xanthophyllomyces dendrorhous
aaagaaagaaagaaaatagaaggctgggaaataagaatatactcatccggtgacagccaagatcttctttcaatcctgtttcccctttctctttctctcttccttcaacgagggacaaaatggacatgagtacaagacgggtgagagagtgaataagggattgatatgtttatttctttctatcatcgaaaaagaatcgggataaagagcacagtggtcgaggtggggttgcattatatcaggttcaacaagagagaaagagttctaaatcgaaacccccacccccccgaacaggaaagatgagcatcgaccttgcttccttctcaatgagccgattttttccagaacgataactttcgtcctagattgctaccttccttctcgtgctgtctttgcgagccgttcgaccccaaccctgaacccgaaccggtcgggtgaccaacgccgagtgagcccaattttcgagcgatctctctttcctgagatagaggagtcggtagccttctatgttgtccgaatgcctctctcccatctccctgttcaccatagacaggtccagaggaaggcagcaccggtggcggtggtggcggtggaggag

SEQ ID NO: 3037 - DNA, 21236 bp, Xanthophyllomyces dendrorhous
gcggagaacgcgctggaaccaaacccgttgcgttgtagagccaacatagcgtccttctgacgttgcgcctcgagcatcttctttcgatcttcggcagcatcgtagacgtatctgacaggcttgggaggtgtccagcctggttgaagttcttcatcgtccgaggaggaaagtgaatgattcaccgttaaagccttctgagtcgtcggatcgttgaccttgtagatatcatctgggtcaaaagcgtctacatattcggtaatttttcatagtcaattcaataaacaaacaagaaaaataaaagatgaacactaaattttaggtctactaaagacaacccgtcttgacgataacatagaaaaacacgtaccgtccgcttcgtaagcatcaatgatcctcctcttccctaacgctttcgcgctaggcctcgtgggcggcgctgattcttcgtcatcactatcatccgttctcatttggtagggctggctatcgttcggattttttttgccgtgcccatgtccactagcgtctgaactgatcggggtcggggccaaggccgtgcccggaatcggtaacggcctgtactttggcgagttggagctcacgttagggtcgttcggtcctctaggtgggctcatcggagccttattagacccatcaatcattttcgactgtcgatgcaatggagaactagcccgaggaagtgaggaactcagatggctggttttcgggtaacttgacgataagagagacgtcgctgagggagctttgggaagtttcgattcttctatgaagcccagtcggttgggtgaaggagatcgagagccaccagcttgagggactcctagatgaccatccgattcatagaccggttgctgtcagggcacatgcgtatacgaacgtagatgtttccgtcagtcgtaaattatgttccgtcgaagtgttttgtacgaaatacaataaaatgaggattacttacagatcgatcatgccgggtctctttcctacttcgttcagaaaccatccgaatatcttcttcctcctgcaaatcacgttcgtactctgcaaagtcttccaaagcctgagggtgtgcatagctgactagttagtcagtcgttagactcggataggagaataccaaacatgagcgacgcacctcagaaacctgttctgtgacttcgaccaatgtcctcaaaaccgtctgtgctttggtttccccagtctcgtttccaatgctcaaactgtctgttgcgttcggaccttcggtcgagaccacacgagcagcttcaatagaagatctgcctcgattgagcagggaatccctcgccatagattccgcccagggaagatgattgacgagttcggtttggatatgaaagcatgtttggtagctcgactaagaaagcatcgcaagatttaaaaaaagatcggtcagaccgaatttgctctttgtccaacaagaaaccctgagtagtagaaaaactaactctcaactgttttcccagctcgccttcgaccgcccctggattgcctctggcttccctgagaaaggcgacgagcgtgtcctttgtctttctcgctctttcacattcgtcctccaacctattcaagtcattccccatattaggcagggaagtctgttgctgatgtctgaagacatcatatccaggcgaaagcgggcccgtttgagaggtccattgctggatatgcggataaggggccgtcccgagatcgtctccaagtccgtaggcacgtgcgttagcgaagtgttcttgctgctcatgtgccgccaccgtgggtgcatgtggatgaggttgaaacaagaaaccaggagcaggcgattgagaaagtccttcacttcgaccggtctcgtagactttgccaaagtacttgatcagatcttcagatccttcaatccctctgaatcgttggtaagcatctcctagggcatgatacatatcagatttcggcggacaaaacgggagtttcttcatggctgcttcgatcaaggaaagcgtcttggagtttgtgagagattctggatagagagcgaaggaaaaacaacaggtcagtgatgtcgcttgaacaatctttctcgcgtgaacaacgaccgaagtacaagacggaaaacatactcgtcaatttagcatcattcaaatacatcaacagccaccaccatacctccgggaccgaagtcaaacccgggccgtttccattccgcgctttctcaacctctttcggtagtcccttgatctctgctctgataaccttagcgactcgttcggcgagtgtatagtcgttctgagaagcagcgatcgagagttctctcgacaagtcgtgtgcgtacattcggaaggcttccgtttccgagctcgaacgaatatcatacggaggtagatgagtcagaatcagaacggtttgttcgacccaatcttcctttgttttcgagttcgcatgttgctgttgactggattcgatgtcttctcgccatttacgcaagagtgacttggactcgaatgattctcgcggtggggagacgtttccctctaaggcagtcgaaagtcgctgatgatatgactgagcgtgttctccgtctggtccttcagacatgctttccctgcccttctcacgttctttctctttggagtttgctccgctaaagaacccaaacttcttctttggctctctctccttttccttgtccttctcttttctggagcccgcccctgaagttcccttatgaacgaacggtgaagaggctccacttgaggcagattcttctctagagagcgccacccaactcggtgccggttgaccaggcgatggtgagtaggtttgaaatatattgtgggaatggtcgaccgactgggaatgtcgatccggggcacgacctgaaggaggatgagacgaggttggtggtattggaccggtcggtgcggctagcgttagattggagagcgagtttggcatcatatagggagcttgatccatcggtcggggaaacgtattttccgatatagaagattgatagaacgggttgtttggggacagaggagcaggcgcatggaacggaggttgttgtggaaaaggctgtggctgtgggtgagacggttgtgtcgagaggatcgaagggggatgctggcctatcgaggtccggcgagggtgggagagacgagtgtttgagagatccgcgggggactgtgagactggatggtatacctgttctgtgatagggttgatagtagtagtggtggagggtgaaggtggttgaagcccgattatcggattcaaagattgttgtccggccggttgtcctgatgagacggaagtgtagatttgggtcggcggagacaacggcgcatgttgagctctggacggcctcggggctgccaagggaacggaagccgagtggtgatggtgagtatgatgaccgcctgcgagagagttcgtgtgtgaccgggcagattcttgttcccattcttgctcgcttgctggtcgaaaattgggcgtcccattaggggcgaacggtgcaaaggggatgcttgaatgagacccgccggaggaggatgtgcgaggtcgagggtaggtcggtgcttcgaatgatgcgctgtcccaggcgttcggttgagagggtggtgtggggaaatgcgtgttcggtatgtcgtaccgctgtgaagagggaggaggaaggaaaagtaaaagccgagcataccgagagtttgtacaaccgaacagtaatcaacaatatcagccaaaggtacaagaacatgacctgaagtagaagaggacgaaacgtatgttgcatgcactacgaaaacagaagacgatcttgcttaccggtgacggaacatgatctctacctaacgagatatttatcttttgagcattgtcatcaaaaccggtaggaccggcggattctctaggcgcatagcctagtcctccgggcgccgcagtgtttggcggttgctgccaggtggccggatagggtacaatcccgttctttggaggatttggcggttttgatgaaggtaacctggacgacgactgagagaactgatggcttgcatgctgttgagatacggaaggaagagcttcaatggtcgagtcgcccaacggctggaacagagatggggtaacaggcagaggagccttcttcttagaaaacaggcccatctagagggagatccggctgattgccaagagatattctcgagaaaatttgggaagaaagatcagagaaagacagaaagcagactctttgtgtgtttggcagtagtccagcccaagcagcacacacacaactaaggagacgaccgggtgagtgagggtgagtgagagatggagggagagaaggatgagatgacggcttggacgaggaaaaacagagtgggagggcgagggaaccgaaccagggggcggattgtcacgtaactggtggttacaaactggattaggtaagacagtttataggacctcaaatcacgtgacttgacttggtgtggccataccacccaatagctgtactgcctgctctttctgcttatgcctcttcgtttactctgcatcatcatcttgctcggcactcgtccgtgcttcgcttgctcttctattcttatggccttgagccatattggtttccatgtatttcatctcttctcatgttttatgcgcgggaagtatcgatgcagaacaggccgatctcactctttcttggacaaggattctccgagctggaatctttgtgagaatgcgctatcgaagttccttattcaattcgttgtctgcgcctagcattgtacgctcttgcagaggttctccttttttccggtgaaatgtaagttgagcaacaatgatagaggatcttaagtcttctcccactcccagtcaagcagaggctcaagggctataaccttctacgttacctactagcgcacaacccctagaacggtgttaatcaagggtcaccaaacgacacgtgaccaagtaggttagggttacactccatcccggctccctctttctaccaacacactgagaaacgttcagagctgaggacaagagaacgagatagaacaacagacagagataaagaaggagatatttcgaatcctctgatttgatgtgggtgatcttggtagccctatccatagcatttctgacccagacatctccaaacacatccaacacatcgttgtctaaatcgcattggacttggctggctgtctcttctcctgctctcttttgtcaatcaccagggtcgataatctcgttctgatggcttctctctttgtcgcgaccgttattattgcatgtgtatgtctctccttgtttctcctcctcgctttctctcgcgcatcttgttctcttctctggtcaaagagcggtctgcttctctggttggtaacttagatactcatctagccacgtatatatgaatattatctgaaatcccgacgcgtctcgtccgcctgctgtttttttatcttattttatttctctcgtcattcaacatcgaacttgactctcccctcttcttcctttcataagcaccccccatccagagccatgtccgaagtcatctatactggatctctcaaatctaaacgaaaaaatgagtacgtgttgatgattggttatcttttccttatctcggtggaacgtcgctttagagggaagcagctccatctgccttcaaaatctagtgttaactcctgagctttttttcccttcttctcttctttctatctaatctctcccctttcctatccatccatccattgcaatttctttcgatcacgatgataggctacaagaaatagctcgagccatgggactctccgtggatgtatctgtcaagatctctgagctcgttgcccagatccaacacgagatggagactcgtagagaggtgcgaaccggccttcttccttttcttctccttctctgcgcgtccctcctatcattacttacacccatcccttccctccgtctatcccatcttactcgtgatgcgtgacaattcgcaaaaacctccctctacaggagctcatcttacaccctcagttcaaacgactcttccgaccggcccgcgcttcagcgtctcaaaagaatgacatcaaagtctcctcttccaccctaaactctggctcggacactcactcgcattctgactctgagcctcactcggatgattcaaccgtccagatcgaagcttcgtctggctcacgatccaagactgctaccggagacaaccacctcggcgtgacggaagggaatgatgaagaatcaaacaaatcaaagcttgctaccaaccaggccgacgcgtcttctgatgtcgacgactcttccgattcgggatctgacgacgaatcagaagaaaaccaagagccaaatgctgaatccagaccgtccgtgttgactgaaagtctggcttacgtgcttacgtcgcctttcaagtcacttcccgcatcgtcgcccaaacagaaaaagacgccagccaagacgtcctcctcctcttcccctgttgctggctctcctcgaggtccatcgagcgcgagaaagactccttcttcgaatcaaaagtctcagcagcagccgggcacgcctatgtccacgctcattccctcgccgatcaagtcagccgttcagtcgacgattcagtccttgacacctgctccagattctccactccaaaaagcggtctcgagtgtattcggttctccctcgatttccaagctatcaaacgcgatccctcaagcggcagctcagatcgcttcggtcgcgaccggcacgccttcaaagttgagacaacaaattctaccggtgacagaatccccggcggccactgctgccgcagaggcagcatcggccatcgtcgatgccgctggacagacattcggtcaggtcgaggatgcattgatcgatgcgggcaaggtcgtcgtcgagaaagttagcgaagtcgatggacaggccattgagggtttcttcaacgaggctgctagggagagtgacctggttatgaacaagatgaaccgtgctctcaaagggactcactcggtatgtggtttctttttgtacactcttcttacaaccccaagtgacgctaaattctctcctatgtttcctctctgatcagatcctctctactcccacgtcccagacaatttcactcttgattctcgaagcggcctacctatttagcaatgtcttgaccttcaagaccaccacgttcactctccctccaaagtcattgacttctctgtcaactctcgacccatcaactccttggattagtttggcgctgaaagtagtcgactgggagaccatcaaaggatcaaagattgatgtgtttggtcctttagccgtctggctagttggactcgtcctccttcctttgttcttggccggtttgatggcctcctcttcttcgaccgccgccttgtcctcatcggcttctccgtcagaagaacacgcctcatctgacgtacctgtacatacgtacaatacccgtcaacagaccaagcgtcggtcgatccttcctcatccatcccagacgactgatagctcttcgtcttcggacgtgtcatcgccaagaccgacgtcaaacccgttgatctttacgatcctccggttcggaatcttcttaatcgctcagacccagctggaggagtttgggaaagacggactatttttaggacagttgaaacagaccgggttggtcagtactgagaggattgggttgggcgtcgttttgagtggcgtcgggattttattgggctttgctcagaaaaagatctgaggaccctcgtttggtctttctttcttcttctctttttctcctctctttcgatccttgtcttctcttctttgtttgtctgtttctttttctttctttcatgtctgtttcagtttctcgccttgttcaacaaagagagggatcaatcgtcacctagttgggatcccttccgataccctgtacataaatcttctttcccctttttcctcttcgatttggttctggttcttttcatgtacccttctcttatcgtaaccctctgttcttgcattctctctctctctctctctttcttttcccgttcgcttcgtgtcttgtgtctcatcgtttctgtgccctctctttcttgaactctcttcgctctgcgcttttgcggtcttctttctctttatcagtgatcgaccgattatctcacatcaattggaacgtgtttattttccctcccatgaaagatgaacagaaaaagtagaaaaaaaaaaacaagaaaggagaaggagaacggccgtgtggttttgttggttcgtctttccaagttaaacggacttgaccaactgactttatccgtttgttaatcacgtgaccacactgaacggttagggttacgatctttcaattggagcgtaattaaatggattaccccaaacaaccgacagatgtacagatatacgcacacaccagagacatatcagacagacagacagacagatagatggaaagttgccgaaatctataaaaccttgctcgagatccgagattgatcgattgactcagacacacggacactgaagcagagacagagatcaagagatagaggaagcaaagcagttcacagatgtatacacacgcatctcttgatcttgtccaagagtctccagttagtatgatcccccgctcaaccgccatccatatcctgttctttcccaggatttgaattcccagacgttcaggcagacaggaccaactctcgaaggataaggaccagagtcggaaacgaggacttgcagaaaataacgatacgataaacatgggatcttgaacttcaagatatctgagataccagcccgtccaaacacagggagaagcaatgcaagatcaaaaactcctggaaaaggtcttttcttaatgaggcgatcatcctttctttgtctttgacggaaagagatggccagtgtttcttcttttagcttctttcttcagttctttcggatctgattcggtcagcggcataccgagaaagaaaaagacggaaataaagatcacacaatcttgcccatcgttcgctcgcgatttgtagtttgtaatctgtgaccgagtttacaagaaagaacgtccaacaagccatgtgatataatcggaaagaaacagggaggggacaccaattatcggttggacttggcaactcgctcgagctcgctgttaaaaaggaaaggatgacaaaaatgagacggtcagatgaggacaatttaacacaaacacatctaaggacgaaaaaagaaaaagaaacaagactaactccttcttcttgatggcgaaagagttggaagatcccttagcggcgttgatgagctcatcggcgaggcactcggaaacggacttgacgtttcggaaggcagactctcgggttccgatggtgaggagagagacggcctggttgactcgtcggaggggggacacatcgacggcctgtcgtcggacagttccggcggatccgattcgggtggaatcctctcggggtccggtgttgacgatggcgtcgacgagaacctggatggggttctggtcggtaagaaggtggacgatctcgaacgcgtgggcgacgattcggacggccatgagcttctttccgttgtttcgtcccttcatcatgagggcgttaacgagcctctcgacgatgggcattcgtcccttggcgaactgcttcttggcgtatcgcccagcggtgtggggaacgtagacagcgtgtcggacctggatgtaatcagtcaaggagatatccctgacctcgatgctgtttgaacgaggagaaaaaaaaggaatatcccgtcagtctggctaagttctgagggtgcactagaaaagctcacgatctccttcccctctccctccgctcgctcgaaagtggatatcctctctatccgagtgttgttttatatgtatgttttcttcaaaagaaacaatccaacccggataccagtattctgcccagagtcccttcagaagttatgtccatccctacgccagcctttccaccggctggtttccattctgtgccaaattcttctttcctcttttgacgtggttcttccactgatcgcttggtctttcttttcaccttctccatctcctttcccggactctggcaaacactggttttcggggctgatcgaaaagaggaagaaaaaaaaggacgaagagagggacgacggagcgaacgacggaaggagaaaggacgacggaacgagtgaagcggaaagagggagagtccatggcgaggataggtatactcactcgttggtctcccactttccaaagagcttgacctgaccatcggagttggccttgacgacgtcctgggggagcgcaagaagggtagctgaaggggccatggtggattgtcgaacggggtggaaaggggaaaaaaggggaggcgaagattctttccaaggctactgtcgattttccaaagggcaagccgcgcacaggcctcgtctgggtgagcccaggcacccagcgcccacagggaggggcgaggggcgagcgtgctgcgcgggaatcactcccagcgccacattctccgtttagcacagcattagcacactctcttcacgcggcgtgtttgattttctcttcccacttttgcaaaagtcagatggactggaggtgtcttgatattttgtagttttttctagtctcttgtagtgtcttgtagtctgaattgtagtgtcgcttgactagttcagcctggctcattctgtagtgtttgcgtagtgtagtttatgctggcttctgtagtgttgtgcagtatcgcacctcgctgtatcatgttggattacatcctccaatgtctactgcctaattcatagtccctattccctattccctattccctattccctattccctattccctattccctattccctattccctattccctaatacctaatacctaatacctaatacctaatacctaatacctaatacacatcgtccatacattcattcgtctcactcccttacagctctcgatctatgacgggatcccacagtcatcacatctgtatgtttctatgcagcagctgctggatgctccatctcttgctactgtagtctccgtcacctcgttgttctctctgtcgtcccctctgttatcctcttcatcgttccctatgcctcctctctcacactggcttatctcgtcctgaacattcactcactcacttactcacccccccttcccttctcgcgcagcccggcgtatcttatctattcagaagtaaacgttgatcgaccgatctacttactcatccgccgcggaaaggtgcatcgacccatccttgcatacctcctattccctttgcgtctctcttctgtttccgaagctttctccttcttcgtgcatgccttgttctccccacctgatagacacactcgtacgtacatacaaacactgacccatgctatttcacccgacaaagcacaagagagagaaaacaaacacgattaacaaaaacaaaaacagggtgacatctacatgacacatgcatccattcataattaagcccatcggtcctatatctcttagtctttacacctctcggctcacccgtttccttggcactaacacaaaacagggctgattgcgcactccgctcacgttctccgtactcatcttgtttggttcatgcgcgtttgatagataggattacacaaaagagatcagaccttggtccttctctcttttatttttctcctcatgctcttcaggtctcgtccttctcttgtctttctccctctcttgtcttgccttcgttcaggatgatcttgcctgatcgcataccgttcaatccaccggcgtctctgttcaacatttcttacctctccccaatatccttaccttctttttcaactccgtcttccactgctttttggacgatcaagaaatgcgtcgcctcttcagacttgaatcctatcggaaaaagaaaccaaactccaaagaacaagaccgtccttctgatctctcaaccggcagtagtccaaccacaccgtctacctcccagcagcagcccattcaccaatccttctcggcctccccacctctgcactcaaccttgcctcgcctttctctgtctcagattaaaggcccaaacaaggccaaaaatcagactgaaaaccagcagccaggtttgaacaaactctcaaacttatctttcaaaacagtacttgacttctcaacccctctgtcggtacattctcactcgaggcctttgaccttctcgtttgaaacaggatcacaaattcaatccccagcacagtcagaccccctcagatggacgggcgaagactgggatcccgcgctggatgattattggggcgaaagagggagagaacttggaaggctcgttgtagctatcgatctaggtatgtgtgtttcctgcgtatatgtgcctgtgcctgtgcctgtgcctatgtctgtgtccatatgcgcattcgctatgtgccggaagagagaccttcatggagtaacagactcacagaagaaccgcctttttgttctcctctcttctccttccctcctcttcccttccttaccacgattctctcttgcgctctttgatggacaacacaggaacaacgttcagtggcgtggttagctaaagattttcatcaactcgtgccaagaaagaaagacttaaattagaacaacaacgcctgacaatatctctctgtcttcttaccctcatgcgcatgatccggaactcaggcttacggctcatctcggatccagtccggagaaaacaaacagattgttcattggcgtagatcccttcatcccagcatcctggttttgcctgaagcgcaacgaaatagactaacgatataggcactgatgttttctcttgggttttatctgttcaccttcctatagctggatctcaggggacattcagaaagattccaacttgtttgtccaccttgttttctcatctctgtgtccttcctgtatctctatgttctgctcaccgaatcgtccgattcgatgccattccctcgtttgctctcaatcttcctattttccgttgtctaaaaaggcattgtttactcaccctcaggtcaagtaatcgcctggggcgtcgaagccgaagctctgggggtcttgcctgcaggatacgtcaaatgcgaacgattcatatcatccctacagcctactgctatgaagatcggaccggaagagagggaggtagaaagaatcgacctgaggctacctgatctaccagtgcgctctatcgttttctttcttcagactaccccgtctttccaaaattcatccgtatacgattccaccttttcaaaccgtcgttcattttatcttgacacgacataaaaaagccaaacaagacggtctcccaggtgatgatagactatctgacccatctatggacgtatgctagagaccggatcaccaaagacattggttctcttggcgatcttgacaccgcctggatctttctgagtgtgcctgccgcttggaatgacacagggcatgaagtgatgaagtcggccgcgatagatgccggcctggtcaaggtgtttactctccttagtctcgtgttctgtctctgctaccgttctcgatcttgttttctctctatctttgcttacctattctcaccatttgtagaggtcggatcctagggataccgcttggagagaccggttaaaggtcatcacagagtctgatgcagctgctgtctattgtgcaggttggtacctctatctctgttctttgtcaatcgaaaggttcgtaaagaaggcatatgaatgtcctgtgtggtctttttctttgtatgtcgattacttggcgtgttgatgggaaatcgaccaaacgtagctctgacggaacttcaccggtccaaaatcttacgaaactttatcgtctttgacggaggaggtgtgggctgtgtgagtgctactcactcttctctctagcgtcttgtttaaattcttactgagactcgacagttccggttggactccgttcgataggatttgacgacatacaagctcctaggtaacccatcccgtttggacgtcacgcaagtttgcccaagatcaagcgcgaattgcggtagcctgtttctcgatttcggattcatagacttggtcaagtgtcgattgaaagatcatcctatccatgtacgctttccctcccccttttcttccttttctcctttttgtccatgtcagccgaagccttcgtctacttgactcttgactcaatcttcttgttatactctctccatgaatgatacaaacaagctcaacggcccctcaattgaaaactaccttcatgcgttcaccgaaacggacaaggtcatctatagaggagaacaagacgacgagaccacgttcctgttcacgacattcaacccggaagaaccggatgatccagctatcgggttgatcaacggagaactctccataaaaggcgaagtcttggtgggtcccttttctttgtgttctcatcattgaattagcgcgcctattgacaaacaatcccactctcttcttccttttcaaatacagagaagagaagtgtttgatccaatcatcgaccaggtactagagcttatcgaatctcacctaagtcagaacactatcaggatcgacgctttattcatggtcggtgggttctccgaatcagaatatcgttcgttctctttcattcaaccggttgcgtccgacctggtattcagtctgaacgtacgtttgcttctcattatcttcgttttgttcttcaaagtgttcgccagggtcgaacgtcagtttcaaaaccggattgatttgatcgccagacccggtgattgtgatgtggctaccgtacagggagccgttcggtacggactttcaaaactggcctcgatatcgagtgccagccgtccggaagtttcacatcgtccgtcctattcccttgctttcccagtcacgtgagcccttctcccctacacaagagatgaaaaggttactaggatctatctgcgtgtaacaaatacagctgggtgagagcccgtctgccggctgaagtgtacccaggttgaacaaagggggtgggacctaaaatccttgttctgcgataaccggttgtagtatttttcttatctttgtggtacaggtctttttttagttatgtgcttgatcttatcacgttcaaagcgctgacatctttctctcgtttcggtcgttatcgaatgggacaaagatgaattgaaagagagctatcattcggaggggccgaactgcaaggtttctcttgccttgtcttgcagtctgtgatacctggttatcaaatgcacgaccctttctttatatttttctctgtttaccaacgggctagacaatgtgagttgacctgccttcaattcaacggtttgcgcgcgtttgcaggtaagagagagagagagagagcctggctcaccgactgtactcaatcagtccctctctaaaaattcgacgaagcattgctttgtaccgacgatctatgagtctgatcctaatcgtccgaaaccgcatgacgatgaggatggaccataggaactatatgaactctgtcaatgtgtgtgtctcttgtgttggtagatggttcttccatatgtatagccaagactgtcgattgatggattggaagaagccggctggtcctcttacacatacttggtatcgaccaagaatctggccaatcgactttgttgtgcagtccagatagtggagacgagagatgcaagatacctaaaggtgttgaaagggacttgatctcatgcggacatttttggcttctattgacttggtcgttgagacaagcgatccttttgcgctcgggaaagaaacaggtacaaagatggtttccattcggaatattgtacagcagctcatttcgtttatctaggcatactagatcaccctctccttttttattctccttctactcatccatacgcgtccttcattcagtgtttctctctttcgtgtgagcaaacagttttacatgtgtaacatcgatgatgatcgacagttcaattgatgtttaaccacatattcatcagataaacgcagagatagcaacatgccgaaagaaaaggaggggaaaggaataagaatgtgatgtctctcctaagcataaacaatcgtccagtaagaaagagatttcttggaaaaatcctccgtggggattgcaataaaaggagaggtttgtaggatgttctggccccctcaatgatgatcccaacgaaacccagaccttgtctgtttagagaccctaaaggagggactggacaacgtatttgggaccttcgagagggcgataggaatgggatcgttctgatagatcggatgatgtcaaaagaggaatgaaaggaagggaaaaaacaagataacgaggcagaaataagatcgagaaatacacaaagaggacaacatgctggtgaggcgatgcatatcctgttcaaatgggtggtcagctgcacgtccatctcccgtcatgtcatggcttgagagcctgatggagagaaggtggatggttggttagagagaaggagtaaaggaagatacgataaaataaaatggaataaaaagaactttagagctgtgctgtgccagcagaatcacgtgacttgaacatatcccgcctctgctccccatctctatagtgcgccgctagaagaatcccaacagaacatcagagcacatttcaagacatccaagaaagtcgcgcacaagtatcactcacagagcatcctctaggaagagagaaaactagaaaggatgaaggagaacgagcagatctggccacacacacacaggcaccaccggagggccgaagaaagccgtgcttacctaagccatctaaaggtagggaaatctcccccatcccgtttttacagtctgccttctctcctctctcaacactctccgtccaaccttccctctccgttcgttctctcgctcttgtgattctctttgaaacatgatctctctttgccgtgctcctttcgtaagtcttgctgatggtctacttcgatttgttgtggaagagaaacgatgcttgttgactgagatttttccctttctttcggcacttctcaacgcccattcttttttcttttttctttcttctttctctccccaccatgctatcgtccttcatctacatctgttccttctttgtttccaacttgacgtaacctgattcatacagtccgccaacctcctccgaccgttggcttctcctttggctgcccacaacgtccgagctggatctcttcgaatcgtcgatgtccgacgatcgatggctacccagtccaaggaggagtacgatctcgtcgtcctcggtgccggttcgttttattttcattcttcttctttcttccttctccaaagatagcagacgatggtcatagaaccattttctgcttgaaaggaaacctcaaaccggctggcgcttattgggtatctttacaatatatgcgtttgtgcgtgtgtacgtgtatgcttgatgtgggatggcgatgggaataggacctggaggttacgttgctgccgtcaaggcctcccagttgggcatgaagactctctgcatcgacaagcgaggaccccctggtggaacctgcttgaacgtcggatgcattccctccaaggcgctgtatgtgtcgtccttctctggttttatctgttgtctttgatttgtcgcctaatgacgtcgatctcccctctcttacgttcttctctacttccacctccaccttcctctttccttctctaccacttcttcccttcctcagtttggactcttctcacttgtaccacgtggccaagcacgatttcgccaagaagggaatcgaggctgatgtcaagctcaacctccccaagatgctcgccaacaaggatgctgctgtggccgcattgactggtggagtcgagaagtacttgttcacaaagtaccctgtcacctacctcaagggaactggttccttcatctcgcccactgagctcaaggtggccatgcccgatggatcggagcagaccgtcggtgccaagaacgtgttgatcgcgaccggatccgaggtcactcctttccccggtatggagatcgatgagaagactatcgtcagctcaaccggagctttgaaccttcaggaggttcctaagaaggttcgttaaatttccgtttaagaagagcatgagaggcgagcaggactggagctagacgagtgattgaggaagggggttcaggaaagagccaaacaaagtagtatgctaactcgaagatcctgtgtgatgttgttagatgatcgtcatcggaggaggtgtcattggtttggagttgggatccgtctggtctcgattgggagccgaggtcaccgttgttgagttcatgagcgccatcggagctggtatggacggtgaggttgcgtaagtggtcacttcttttctttcccgtcgcatgttgctttgaaatcacaggcgaggcttatcgtgtaattcaactttcattctgcagcaagaccttccagaagatcttaaccaagcagggtttcaagttcaagcttgatactaaggtcatctctgctcagaaggaggatagcggcaaggtcactctcaacgtcgagggagccaaagacggcaagaaggagtctgtgcgttcgcgttttttttgtcttgttgtttcgtcattactcgtccattttaaaagattggtttcactgacaacatcatcctatgtccggctactagcttgaggctgacgtcgtccttgtcgctatcggtcgacgacctgtcaccgccggcttgaacctcgaggctatcggcgtcgagcttgacaacaagggccgaatcgtcatcgacgaccagtacaacacctctgtcaagggagtcaagtgcatcggagatgtcacctttggccccatgttggctcacaaggccgaggaagagggtatgtctctaatctctcctccttcccccccttttttctgcttcttctttcttagtcttctaacacttcaacctcttatcaaacaggtatcgccgccgtcgagatcatcaagcacggtcacggacacgtcaattacgacaccatcccctccgttgtgtacacccaccctgaggtcgcttgggttggaaagaacgagcaggagcttaaggccgctggtgtcgactacaaggtcggaaagttccccttcgctgccaactctagggcaaagaccgtgaacgataccgagggtttcgtcaagatcatgattgagaaggagaccggtcgaatcttgggatccgccatcatcggccccaacgctggagagatgattgccgaggccaccctcgctatggagtacaaggcttctgccgaggatgtcgcccgaacgtgccatgctcaccccactctttccgaggctttcaaggaggcctgcttggactctttcgacaagtgcgtacccttctttctttttctttccaatctccgtcatgacaccaaacgtccacctttcctaacatgccctttttcgatttgcgcgtggataatcctcttaggcctgtcaacttctaaactcatcccccttttccttcgtcctcttatgatttccttctttacccccggtcatcatcgcatagttccctttctcaaaccctttcaaggttctatataatcccctttctgcttttctacccttgggtgtctttttctttctttctctggtcaatttcttagaagaaagggggggatcctctccagatcatgctatctctccccccctcctcgcctcagtttcttcgttgacgtgtgggtgcgacccaagtgaacattagcgacattatcatatctattgcaaagccaaagagacgaatacaactacaagtgaagatggaagtaagagtggatgacccttggatcttgatcctacccttaccatccatcgttagcccccgacttttcggccttcatcaacctgctcttcccctcgttcctcttctttgtaccctttttatttccgagtttaccaggggcagccttggcgtgatgtttagcttgagcacgagctcggtccctattaagatcagactgaacggtagatcgaacatcgtccaatttaggaggaggagcatgcggatgggttttacgcgtctgagttcgaggctggtctgtttcggacccagattcttcttcagcttcagagccggattcggtttccgggtcgaaggtggctgtggcggcggtggtggtggagagcgttgtggaagaaagcgtgtcggccaggttggaaactaatgcaggagcctgttcggaatcttcttcgtctgcttctctcattaacctctcgatctcttcctctttcgtctcctttccgtcttcttcttcctcctcttcgtcttcatcttcgtcctcctcctcttcctcctcttctgaatctgagtcctcttcttcggacccttcttctccctttagttcagccatataaccatccaacttggcagcctcgttctttccaaagccagaggcagccacctcgacgtctagagtgaacgactcgaccgagtcatccgagagtgctttcctgaaccgggggtagatctttgactcatagttgaaccgtcttcggaagaacgttcggatacaggctacatctcggttgaagtacctttttgtcatttgatggaataaacagatggattttaagtgagtatgaacgtcccggtccccttaagatagcaaatgaagtacaacgtcatagtaaaaggaggaaaaaagaaggaagagaagagaagagaagagaagagaagagaagagaagagaaggacgaaccactcggcatccttgtggttagtggaaaccaattgagggaaatcgatgacgacgggttctccatcttcatccctgatcaagatgttgaactcattgaaatctccatggatcagacccgccctggcaaacctgacgaggagggacataagttgagaatacaaccttccgggattaggatgttcggctacttgtcggagggcgtaaccgtcgacgagagacatgatgatgcagtgtcttgattgatcgatcggcgtgggtacagggaaaccattggcatgcaggacctaggtttggattcgttcagaaggaggaatggagaacaaagggcggagcaggagaagtaagtgaccgcagatgtacagaagcttgctgag

SEQ ID NO: 3038 - DNA, 6433 bp, Xanthophyllomyces dendrorhous
atgtaatcccgcttctctttaatcgcacggaacgaaattcgacccagtctagaatggaaagcagaaagaaagagtgtacgtatgtttgaacggaggttattagtaacttcaagtgctgtcaccgagtctgcggcttcacattcagagagaggaaagtggaaagaacaaaccgatgcatcttcatacaaagcttgttgccctctttatcagcgacaacgtagatgtcagactctttacccactccgatttgagatccaacagaatagagactgtccctctttgccatagctcggatggccaaatagtcgtatcctccgtaagtgagtcgatatccgtcgtctaaagatttcgtcccggcccagaaagaaaagaagcatcctggttagacattattgtcgatcgaagggatgcacgtccgaggataataccggacggaaccatagaactagtcaagattaagaagaattaatacaaacacttgatgttctgaactctagcaatcaagtttcgtttagctagttgacccatcaacttgtttcccgctcctgatcgaacaccagagatctgcgcgatcaacgatgcaggaacaacctcatggttcttactccccatctcggtctgatccgttcgaaatatgcaacattaagagaggaaccgacgacgggtcatcagttggtatgctctgaaacatcactcgacttgaccgatacccggttcggcaagtcaagaaatcatggaagaatcacggttgtacatacagctgtgaggatcctaaactcatctgcggtgagatatctgatatcggtagcgtctagcttcatggcgtaggagtgtaggcgagcgcttgtggaagagtaccagccagggaaagaagaaggtgagaaacccaaagtcaatgaattccaaaaatgcacctgacaaataattgaatagatgaatttcttatcgctacgataagtgctggggtaaatacgtagattacatacctctccgaaagcatcgatgaggagttatctacccgtggaaatgcatacgaccatcatcccctggccatcgtcactagccagagctggaccacacgtcctgattttcttcaccttctagtcccagcagctggatccagggactaacctccgagatagacttattatcaacaccctggaagagcagataacgtcatcgaatcttcgaacagagtcaagggagagtaacaaaaggatacagaacgaggttgccaatccggaggtgaaagcattcaatttcccgggccggatcgaaccgattagaggctggccctggcccgtgctacgaggcgtctttacgacttgatcaactctctatgtatagggctactcacctcctatgtgttctcggtctcaaactaatccttcctagaatctgtggcttgatcgaattagaatgtgtgtgtgcatacgtacggagtctagactaattctgttccggatggcccgatgggacgatgactttattcactatcacaggcaaagctgggcgatcaccacgtttgttgcactcatgactgaagcctatctctcacgctcatccggttcttctaacgcatcgtcgagtcgtttaagattttgaatctgacgggtatacatgatgtttaagctccccgaggtgttcactccgtagctcacagtcactcactctatccttctactactgatcatcgctgggcggtaggactcgttcggtctgaacaggcaactcatccctgcaaatttatatacaccgaatcttactctgtcccgctcgtcggataatcttaatcacatccatccatcagctttccgaatcagccagtatccatatattttcccgattttattcctattggattgtatggatggccaaggaacctcgtctgtatgtatagcgaggtacatgattttagggtcggcgtgtggttaaatcaatgttcacgtactcacacccacactcgcattcaatcaaaccgttccttcctcgctctctcctctctattttgcccgacgggcttgacccgctccgatgagcaggacaaggcgtctttgttcccgttgtggatagtctcttctctatcaccctctaatcgtatccaaccctttttttttcttgacttttctcaaggtttgatataaaaagaacgggtcgatgagaggaaaccggagtcttgctttcttcctttcttcgaccactctactttccatctttccttctgcttgctgctttttcatttgctctagctactcttcgctaattcttcgccgtgatgcttttctcggcatccgctcttctctctaccttactgatcgtcgcctcctcgccgctcaccttggccgtgcccaccaaggttgaggagccacgggatcttcgtgcaagaacctccgcgccagtgtgtaattgtaagttctgtacacatggaatcattcatccacaccctttgccgacgcaccggactgaccgatcttgttattgaacctttcttttgatcgtctcttccaatttgttcatttgagctaatagtcgtttgccagtcagcgagtggttacacggtggtaggctcttcaaccgggaattctggcggttaccaatgtatttatacatcaacatctgtgtttgggtatgtgtcgatctatatttgtttttctggtctccttgatctacccacgcagtcttttgtagttgacttttgatcgatctatcattacgtcttgctctgccggatcatggatgccaggaacaataaagttacatgcacctacaactcaagcggtagtataaacggtttcgcctatccgccttgcaaatcaagcgtgggcacctgctcgtcctcgaagcgctcgttcacagaagcgcagagcgagttggcggacaagatccaaaagagacagtggaagcgtacgaatgcaaaggatggtgtcgctcagaaacggagatgattgcgaatctcttgagtatatatggacccaagaccggggcttgctgccccatggacatttccctcctatatcgctgcttaccttctctatcgctcattcgtttgcttgatctttgttcggtccattatatcttcgctctcgtaactatcttcgctttctatctccgtttctgcttgaggctttctcctcctccccctctatctttctttgttccaagctttagttccggttctcttattccgttctttttcctcttcacctgtaaataaagttcttgttcgcctgtctgcttatctgctttcatcctaggtgcgtatctcatcgcccgcccccatggcagacctacacgtctatagtctatcctatgagcgatcgatacagaacattctgcatctgatcttcctcctctacgagaaccgctacactcggcccgacggatgatgggcatgtttgatgacgctgccgatgacgcgtctgtagccagaaaacgttaccatggttacagacaaacgttagcgggtctccctcctcccggcctttttttttccggtagtcacagacaatcatctttcaacccaaccaacacatcgaaagctttcgttcagtcaccactcgcatccatcatgttcgctgctactgccatccggtccacctctcgagtcgcctccaaggctgtgagtcgttcgttttgatgtgttgttttagggtggatgcagccaagagagtgggagatggatgaggagatctcgtgccggtcttttttttcctctctctctctctctctctcttcaccttccctcggacccatctccatattttctatcgatggttctttccttctgattggtcaggtcgcatgcacagataactcttactgatactgatgcttttgttcttcctcttgtctgctagcccatgtccatccgagcctacgccgacaaggcctctggaagcgttgacaagaccttcaagtacggatttttctctctctgttctctctgaccttgaaactccttcgttcttttctttaactcagaaagatcgaagtgctgattcttctgtctgaaccatcttactcttttccgtgcactgtgaaacagccagcgagagcagacccaggagaacatgtacgttcgacagcaggagctcgagcagctcaaggctctccgaaagaagacccagcaggagctcgaggccaagcagaaggagcttgtacgtttctttcttaacgttctttaactaatcccagacggagagcataatagttctcatgccctccttcgcttttactattcgtcgcctcccgaaacaggccgatattgaggctcgacacgagactgcccagaaggcctctgagcagaagtaaatgtaaccgaccatgctcgtccgacttgtgttcacttccttcctcaattaattcatcaatattgtccattccaaattctcttccccccccccttttgtttctgctagcatgctgcttttgatgatctgaaccttcatgtatacttatgctgttgtgtctgtctatctgtcccatgtttggtttttatctatctcttgtgatggtggccgagagttgagacaactggcctttgttggacaaatctgatgtgtgtctgctaggtctggcagaggcaagcgcgacagagagagagagagagataggcaacatggtgcacccaaagcaaacatggtcgatagattgatacagaaagagtgaaagtgggagcagaatccattcaatcccgatgacgatgagaaagaagagaaaaacctgcaaacgtcgtttttccattcaatccgtttcttccttctcgtccgtcgatctcatccatctccatcatcacttttgcatacacacacacacacacacagaagcacacgccaacacatgtctgctaatccacttgctcatcataggagaacgaggagggctccgaatgacgatcagccttcatccagagatgcaagcgaggaaggtatgtccggcctgttcttcgtacatccttcttgtcgttccgtcttttcctttcctttccttttttttttctttcctttttcttcttttctttcctcttcatctttttgttctcgcatatatgtcctgttctctagctacttcagaccggacaagctcgctggactcgatgttgacgacgagccgatctttttctctccatatgaacgttctcatccacaaacgttcatgctcacttggctgaaaacagacaacgacgagtctccgcacaactcgatttcccaacatcaccctttgaacccctctgggaccaccaataccaacacgggaacaagcatgaacactaacctggccagtcaatcgtccaagccgcatcatccgagtccactccgaacgaagaagacggcagagagtgggttgaaggttgaaaacagggatgtcgaaacaggggccgagagtcagtcaatctatgatggagatgtcggttcgtcccgggtggtttctttcttcgttcttgcctttcttggattttccgtttagctgaatccccttgggtcatcctttgtcacatcacatacacccagagctatcaggtgcctcgactccgaacttgccttcactcactttgccgtctcttggatccctatctcaacaagccccgacgtcgtctccgtcctcaacagacgtcactccgtcctctgcgaccgctccttccgttcttaccggtggggtccaaccatcaatcgtgacgctgtctgaagctgacattcaagaattcgtccggaaggcgattgaaggagagtttgaacctagtgtgggagtgcgaaactacaagatcaacaagccaccgacatcaagaccggtgaggatttatgcggatggtgtatatgacctattccattacgggtacgttcaaagttctgttcttatcggagagtagtcatcgttagttttttgaatccagataccaatcatcctatcgctctcctccacagacacgccctacaaactcgacaggcaaagctctgcttcccgaacgtccatcttcttatcggtgtatgctctgacgaactctgcgccgctcataaatcccttccagcgatgacacacaaagagagatgtgaatccgtcggccattgccggtgggtggatgaagtcgtgccggaagcaccgtgggagatcacccaggagtttttagacaagtacaaaatcgattatgtagctcatgacgaggagccttacaagagcagcgggaaggatgatgtatatgggttcgtcaaagaccaaggtgagttctaggctctctcttcctctttttttttctttttctttttcatttctcagaaagtggggtgggcggatagaaaatcaagttcaatctttacgtcagagtggaggtgtatctcaaaacttagtctgacatattcgcgcgcacatacacacaaacaaatcaggccggttcttaccaaccagaaggacacccggaatttctacttctgatctactc

SEQ ID NO: 3039 - DNA, 8946 bp, Xanthophyllomyces dendrorhous
gacttattctgcctttctgttcgatctttctcctttccggattgtgatgcacccatcaaacagaacggtcacccagagttgaaggcggacagagtcgactggacagtcaaacattctccgtagcctctttttctcttcatcccctgaaaaaaaaaacgatctacttttcgtctagggaaggggcaaacccttgaatttctaatctttatctttcgcattgtttccatcatctaaaaactgatcgaccaaccaacgaaccaaccaatcaatccatgcatgcatggattaaatccttttttttcccttccgaatattaccttccgacatccttgtttcaagccctctcttctctttttctttccaagttttattttcgttctttaattctcatgtatacatcactgctccgttaatctttcacctatctgggtgtcatcgcttgctaactttgtttcttacgacagatgatgtatatagacccaccgacataatcttttgcctctctctctctctctctgaccatgtgcctcgttctttgtatccttctttctctgttttctcgcgccagtctgaattttgattcgagatatttgtagtacaaatgaacgaatgaatgaatgagaaagaagggagggaggctgactcatacacacatccagatttaaaaaaaaaattaaaaaaaaaaaacaagaataataaatgaaagacggaagagattcagggaatcagagggaacacggagaggcgcgcaacgatcgacgatataaacagataacagaagggaacccttttaatccgcatgggtctttttatccgcttcctcgacttcctccggctctggatccgtggtgatctcctcctcggcctcgtccaaactttgtttctcgcccaggtatgggttcctcaccacagacacacagcccaacaaaggcacacagagacagatgccggtgatacagagcaaccgctgggtgtgttggtacgcgagcaccaccgcctgtctttctggggtggacatcgggtaggacaagatgaaggtgaactagacgtccggtccatgcaccggcccaggttcgggatcagagataaagaccgaagatgagtgctcatgttcgtgtttgtgcccctcgagaaagagagcgcaaagacaggtgaacggagagaaaccgagggccgagaacttacgggatctccatagacggaagcgacgagagtggagttcacagggcctagttcttgggccagatatttagggaggacttgtgtccagatcgctccagagatcgtatttcccagtgccgacccaatggagtactaaagagagaaatatcctcgacgtcccgtatgtcagcgttggcgtattcttttgtttctcttttcgaaaaagggaacgagtgaattgggtgaaactcacggcagagagatacagtgcggtgatgatagctagatgggatcgtttcgtcgcagaccgaatgagcgcctgagcgggataggggaacaaaccgcctaccgagcgttgcagcagcgaaattgagatagaaaggcgcgtcaagtccttctcttaggtatgtgggttttgtttatttatttagatcttttacttcacagcactcaccagcaataccaagaacgatctgaccgccgatcaaacctgaatggtccgaaacagtccttcctctgaatctgatcagtagaccaaacccaatcatgtagatacatacgccggcaaccatgaacgctgcttgtcagtcaagcgagggagaagagacaagaggaaagtaccagcaccaacatccatatgtgagtaaaattagagttgaagaggaataaaaagaaagaaacaaaaaaaaaacacacactactgacgtttcaatcgacgaacgcgacgaacgacaataccagcgatgacaccggtgatgaccgaagtgaacgaataaagcgagacgattctcgttgccgagagcgtggattcatcgaacgccaccacaagcacggtgtctgagaggcgttcgttggtttgtgtaatgatgtgtgagcttccgggtctctactgggaacctcctatgatagacaaaacaaggaacaaagacatacagagataatctccctgacagtaccaagtcatgttgagcaggacagcaattcccagactgctctcagcgtcacccaatgaaccctccatcagcgttcgcatcttttgcacaagagaggaaaggagacagctctgatttagattcgtaccagcctatgaccgttctatctttgagtaactatacaagccgacgaaggagatgatatttagcatttgaggaagttattcaagaggcaggaagagtagaacagattaacatgtagaggaacacagggatgaggcgcaaacctggtctcccataccacgaacgcgggcacacaaaggatgccgatgacgagcatcacactgcggtcaagtgtttgtccaccaagacacgatgagctcgagtcgtgttacaggcggaagaaaggaaataattaaagaaagggtagtcagagaggccccggacgcacatgatgtgagctttcttccaagatgtagagactccaccggctagagtgaacggaaggagaatgagcgtgaggagcgccacgagctggatggattacaagacatggtggactttatcaattttctctataaaggaagcgcaaacaggagtaaaaaaagaaatatgagagaaacaaggtcgaaccaagacaagtccgatgacgtccaactcccagaagagcttggttgcaaggtttcttcctccatatttctggaaaggagtgggtacgtcagccaacttgccgcccctctttgccttccgaagggcccacaagagggcgcccagaagaggaatacagcatgccgggaatattatacctttttgtaacaacaagaagagttaggacgagaaagtcgcgagaaaggatgatgagaccaaggaaagagatgtggagagacggataaaattatatagggtgtaccaaacatcccgataccccagttccaactagcgttcgcctcaatggcagcggtgatatttccactaacccacgcgtttatcaagaacgggagggctatttttgtgcgtacaccaacaagccggtcgtcaggggcagaagaagggagaaaggagaaaaaaagaaaggccaaccaggaatgtaggagaagaaaagacgagatctcaaactggtggtatcaccgatagtgacctcgatcaagaggatgatcgtggtgtaacccaactggtacaaaaccgctgaagaggccggacacaagatgaatcaagactaagcatgtcagatggagaagaaagaaaaagatcaagtgatgagggaacaggagaactaaccaccagcgcagaaagctttaatgttggtagcagtagcttcgacgatcgttcccacacagtactgttatcctcgtcattaaaataaaatagaaagatcaaagaggcaatcttaatgttaagatgttatccaagcgagaacaagaaagaatgacgcacaaagatgatggagaggatgattaattcgacccgaccaaatacgtctgcaatctgataaagaggaaaagggaggaaactgataagtggagtttaccgagagggggagagataagaacgggcagatgagtttaccttggcaagaggaggctactcaaagagatcagagtaacaacgaatatgcaatggtttcaaacctcagcatcagaatttgcttaatgggagtaggctttcaagagaaaagattgagcggaaagggggaaaaaggccaacctgagcggcagcagcgataatagatctgaggacgttgacggtggccaaaagactgagatttgagtaagaagctgtcgcaaacgcttggaacgtcgctctggtggttccgtcgattccataggcgtaggcgacaagaaagattcctttttttacggttcccattgtaagcccgtgacatatgatagaggatcgatatgggaaggatgtcagctgcactggagtattctcccagattcaaggagcgacagagataaacgaacggacaaacataattgttcgaagcttggtgtcgatttcttcagagatcgcagcgattcttcgaactccctttatttgataattcggcagagagggaggaaaaagatggttcagtcaggttgcatattggcttttctgtacagacaagagagatcagaggacgaggcctaccggactagcgtctccatagaggtccaactgatattcttctggtctttctttagagttctttcggtcgtttgagattgaagacctataggctggagggctacgaacggaggcggccatggcgtgtgtgagaattctcaagagtacttactctgaagaggatgaaggagcaacaaggtcgactccctaaaactttggtttctgagaaaagtgagaaaagggaaagatatgcacgttctgctttttctaaaaagattctcttgtatgactattcccgagatcctgttcctagatgcacactgtaggagaaaggacagataaaattaatggtgtcttctccatcttcatgtcttatgaagctttcggctcagggaagagagtgaccaatgagaagaatctatctgataactcagaattcataaaaatggaagaaaaaaaaaacaaggtaaagagatctttgtggagaaccagaactctgcaaaaagtaggaggagatccttttaatccgagcgtcagcgaagagcatgtgcatttttcgtcagcgaaggagaatgctcggtcagataaaacccggtcgatcggtcggtgagttagatagttagttggtgaaccagtcagtcagtcagtcagtcagtcagtcgatcaatcggccagcaccaatccttattcggcccaggtatccactctccgagttcatagaggaaaggaaacagagaaatgttctcttgctcgttcagaacatccactgagagctcaaggttgagacatatccaatggcgttcgaaatggaatgaacttgaagcatactcggttacgcctgactcggaaggaatcggaagggaaccgcgctggaccctcacggaccggcctcgacctgagcgaaccgtgggagaactaggtccagccttcgagtagccaatttgtaaccgtcaggaccgggctcgagaccgggttcggctatctcggaaccaaaaataccgagccgaaagatggcgcagcgatcagttcataacgtacagcctgcgccgcggtcgagtgaccgccatttcacgccatcgaccgcgttttggatgaatctgattgcttttcacatgaacatcaaaggcttatgtaagagtcatcacgtggcaatcatcttatgtaagccattcgtcctttccctcgttgtgttcagccttcattcgtttgttccttccctgcgtcttccgcttatcagaacgaaacatcgattctctcaaccctcgtcctatcccatccttcttccatctctggctacatcaagtggatcggatcccagatagcgtctctatataagatctatcgctctgctacgtttcagccattccgtttcttctggtttcctgcccgttggatctggaattaaacgttatctctcgcgttggctataagaggaaaacccctcaactcctgatctctttcagcacatttttccacgtccacataaacattctcatccctattctcatccaatatggcggctatcgactttgacgatctggttgctacgatgaacacatcgtgtatcggtcaagaagcgatggacctccgagcacttcatgtaagtcgatcgattcctaatcaggagttgtgttcctccactttccccttttacttttctatgtctgtgagcatctgggcgaatctgttgtccagagggaaggagccaatatctgttggctttttcacatttccttctacctgtttctatcgtcttcatgtccaactctatttccacgaacccatacctccgtttcctgaattgaagacgtgctaaacccacggaccggctcgtccggcccgtcgggtttaagatgtagacgagcgtgtaatcttgtgtactctcttctatctcttccttctcgttatcttctcttgtttcggcaaccagaagtgccgcctgatccatttgggataactcatgactgattccctgggtttcttcttctcgctcctacttctcttcggccccttttcatgttcaaattttgccccctcacacaccgtccgtcctcctcccaatctgttctttctaggcccatctgtcacaaacattatttatgccaccggcgcaggctcatcctggtcagcctacaccgatctcctcataccatcagtatccgtatgggcatctgccgggcccgccgccatcgtcgttgacgtcgaacgcgtcattcgcaagcaacagccatcaccctcacaattctttttcgtcccgcccgccaaacatcctgcatcataactcgtactccaaaggtttcgaacagggtacaggctacggcagcccgatcggagtgccggtctcgagaaactcaggattggctgatttggacgaatcactcgctgccgcttccgctgctgcttcatcctctgtcggggggaccccgaattcaatcacaccgagtaacagaccgtactacccgtcgcctacctcaccaacttcaccgctgacagaaggcatggatacgtattcatcgttccaatcaccaccacctgctcagaggcagttctaccagccaaacgactcttcaccttttgctaccagacaaaccaggagccagaccagacgaacagtcgaagccgaggccgctgccgctgctgctgctgctatgaccagatcatccggccagaacgagctagatatcgacatggccgattgagacagttccttggtaacgaaaagagtgtaacgattcagttcttggcatcacgaaacgtccttcttccttctttctttctctcccgggtttttgtgaattttcttcccttctcttttgtttccatatatacttgaacggaaccttctactcaccctctagcatccttttcgattgataggtttttttttcctcacgcttcctccatcttacctatatctccgccgtcgtctttcaatcttcctcttcttctttcttcattccttcatataaaaacgacattctcatcttgatgcatatagatttcgctcccaaggtaaacttcccttcccttcccatctccatacctgctctttctgtcctgctttgcgttgcatttcgccgaatgaccgtgttcgtttgcttcgtttctccttatctttctctgctctttttatttacgcctctttcgatctttcgatctctcccctcgtcttcaagtgattggttccatttacgctttctacgaggacagatgaaactagtcatggctgacgacgggagattgtcgatcggtctgtaccgggattgcttctctttcctctttgcctcttattcttcatatcctcgtcgactgtgaaaacgttgtattcttcttttcttgttccttctgtcttcttctccctctctcactctcactctccctttctcactctctctcgtcaaaaaccccatctctactctttattatctgtttctcaaattacatctccttacacttgacgatacaaaagccctattgctctgtcatcctcccgcaagagtcccaaacagaagtggaaccgatcgagagaaaccaggacttgtccccaggcgggcgcgcgcagtctcgatgacgcgcctgttgcttatttcctcgttgacgtcattcatccctcagtttccagcctttctttggagaacatcaaaaaggccttcgttggtctggtcaaattgatttctcttttcttcttctcctctatctacatctacatcaatatccacatctcttggtcgttcttctttgcttccatccatccatccatccacccgtttttcgtcagcccaaagtcataactactacgataatgtcctacgctactaccaaccctccttctggaacccaggatctccgacacggtgattctgctcctcactctcattctacctcccactcccacgagcacacgcacgggaacgtcggcagtgtgcccatcagcgggttcgctttgggagctcctattggagagtattcgtcctctggcgtcggttccggtgtcggaatcggatctgctgccggtgttggagccggagctggtgtcatcggtggaactagcagctctacctacacccacactcacgatcactcccacgccgacggacactctcatgaccattcccatggccactcccactctcacggaacggagggtgtcacttacggaaacacgggtggaaatcgacaggacactgaccctgccaggaaggaaaacgtcggacgggaggctgagaagatcaagaacaacatcacgcctactgatgctaccaggcagaacgataagacctacgctggattcgatcccaaagtaaacactcacaatgacagttcgtcctcttttcttcttttttttttcttttcttctctttttaaattattcctcgggctttcttcctcctctcgtttgtgaactttgactgatagtgacgcgttttgtaacccttccgtatcactctttctcttcccccccaaaaaacagacctcgaacctgcagtcgctaagcccaagcaggtagagcatatctcgaccgatggtcctcatggtttggtctggcaggagtccaccgggaagtacgttcaccgaagggagctcgagggaaagaactctatctagatctggtgtcctatcaacctctcccatgattcttccttccgtattaatcctatctatatctggtataatgcccgctgtggcgtccatccttgattcttgataaccctctatgttgtctgggggggtgtgtgtgtgtgtg

SEQ ID NO: 3040 - DNA, 17488 bp, Xanthophyllomyces dendrorhous
  misc_feature (15428)..(15437): n is a, c, g, or t
gtgtgtgtgtgtgtgtgttgattatatagctttgtagtgtaaaacgtctgtttcgtttttcgatcttgtgttttatcttaatgtatctatccatccgtccatccattcatcgcggctctgtctgatgtgtgccgttaagattccgaaaggtttgcagaaggaacaggacatcattggaggagagaagaaaaaaaccttgacatttccaggtgtaccggagagaaaggaaggaagtaaggacaacaccagatataaaactgaaacaacacatctaagaagaaaggaaagacgagcagacaagcagacggatatataggtaacagtgctcgagaaagagaataaaaaaatttaaaaagaaaaagacttgttaaccaagacggggacactcaaacaaggaggcttcgttgcaaacagagtaaagaggccggagagtcaacaaacgggaagagacggaaagatgaggatgaattcaagaggagaggcccctccctctgggatgaatgattatcaagacgaagcggattagaattgggtttattcaaagaacacggatgggtatgatataattactagaactcaaacaagacaaagcaagaagggggagaagaagaaggaaaaaaagaaaaaagagtatggacgggaactcaaaccggatcacaacgcccctccggctaggaaatctctcttcttatccccatccacccctgttgtcggtatcgacggagcatccagagggactcctgatcgagcgtgttcggctgatcctaaaaccggggtcgatcctttcccatttccgtccgaccttgatcccggtccttcgtgcccatacccatactcggcaccatacccatgttcataatcgtattcgtcctcgctgtcaaccggatagttaattcccatccctagacctgcctttcctttcccgacgacgccagagccgggtagagggatagtaggagatgtaggactggttgaggttgtgaatgtaggagtggaaggaacggtcgagaatgctccaaacctggacggatgtccgtttccattgccaactaaagaattgttgttgctgttgttgttggtggtggtggtggaagcattggtggaagaggaagaggggtcgggagagttaacggaagagttggtcttggaaggaatcgctaattgaccaaggttcgttccggctcgacgttgtagcctcgctctagttcgcttgatatcttccctgttgtccccccgacataagcaggcgatcagtcccgagtcgatgattaaaagatgatgagaagaaacatcaaaggagagacagtcgaacaaaaaaaagaggaggcaaacgaaccattcgattcgtaaaaacacccacatccacctcctggccaactccaaagcttccatcaaaaagaccccgctctcgatctcggatatcgaatgtagatgactgctcagttttaaactccatgtgaacctcagaacgagatcgacgatgattgcgaggtaataaatcgttggatctgcaaaatgcatttcctttcgaagtccgaaagggtggtcgtccgagtccactccaaagttgtttgcgccgttgttgttacccccgctgccacccccggagaagggcgaatagttgacggaccgagaaggatgtccgggatggtaagggtacgtagatgaatggtgtcggtgatggtgagagacagaggtcgtccgcttgtggatatctgatcgagcggcatacccggtagggttgtttcctggatacccggtggttgaagacatggttgatgggaatggaataatcgagggtgaagtcaagggtttactcaacgaaggccgtctagtgttcacagaccattcggacggagaaagaatagtgagtccccaatcgttcgtgacatcccaccaaaaggaatagagtgagttgacaaagaccgagagaagcctgagaggcgattgagcaaggggcaagacgttagagcacagacatgtgagaaggaaaagagggtgaggaaacacgaaccacagtcggaagagagggtgttcaccgaaccacctgttttctccgagttcgttcatatcagtcacacctctctcggctgcgatatcttccatgacggtcttctggacggccgagaagaggatgacggggaaggcggtggaatatttgagcgcgttcgctaacggtcgggtttgtttgtaatccgagctgatatactcgaccatacattgtctgaaccggatcatgtatggtattctttttattcatttattttcaagatcatatgatggagagtaagccagcaagatcgaaagaaagcagcctgtacgttcccagagttggatagaactgtacgtacgaagtgatgaaaggaatcaagtatggaccgagtgctccgccggcaccttccagttgagaggccgacaagttacccgcaaagatcaaacacatcgagacccaaaggtcaccaaagacctttgcgaacgacgtcaggatatccgcgcagattacatcgacaaagtgaaccggttcactgagtggtgagaagatcgttcgtttgatcgtctgcacaaacgccatgcgttctcttctccatatccgtccgtagggcgtgatggtttcggcgaggacacccagcccggtcaacaaaggaagtattctgtacgagttcatcttgtcctgatccgttccaccggaaagccagatgaacagtatccacccaccgagggaccatccaacgagcacggccaagagaccccaaagcggtcgaataatctctcccgcgcgggcataaccagctgctcctctctccctactagaatacccgccgccgacgttggattcgaaaaagtctccggggttcccaccgagaatggtcatctcctcgtcatcgtcgtcgtcgtcgacctcgggtaagacaggtctaccggtggtgagtgcctcgctggaggaggatgagggagagttgatggcgagtatatagccaacgtcgattccaagatgatggagcaagtgcaagttggtcgtccagagaaagagcccgagcccgatgaggaagagcaccctataagggaggcagaatgatgaatgaaacgatggaacggccaggtgggtatgcgggttgggtgtcagcaccggtggagtgtctatatccatcttgagaggaaagaaagattgcccaagaagaagagatagagggcgggaagagaggatgtgtatacaacgtaagagggcactgagggcccggaaagggagtggtctagcctagatgtaggcctgcgcgacgacctttttcacggtagagtgtgctggaacgagagaagacacgcattcagaccgcatgcaaacgatgagcatggacagacgatgcaagagaatgaaaacaggctaagggaagctgatgggacgaatgtattcttacctatcttggcccggtcggcctgccttttaagaagagaaagaaggatggatggatggatggatggatggaagacgaggccagggatcaggctgagagttcaggagagccgagacgctggttggatgtgtatgctacttcggtcacagacagagtcgagcgagtcagcaacaggatcgggcagccaacagaacgaaggaatcgacagaaactgcacgctcaccacttgtgatggtgaggaaggactatatgcactctctgctcgggcacccgctaaacacggttaagtcccctgatgcctgaccctgaacgaaaggattagaaaattttgtagtctgttttaggaaaagactacgaaactttgtattcacttccggccgctaagattgcccagcagaaaacatcaggcaggcagagcatacaccgacatacaccatctctcctcgccgtgctctttctcgatcgtggacaggatagaactcatcaagcaatcatcaagggaatgggcaagacccatagagcttcaccgtcttataacggcaagaagcagaagagaggcatgccgagtagtacgtccgatcggtcgtcttgacattgactcgtcttgcctcacctccgacttggagttcaagttcttggctgaattcttttttatttttttatttttcatggaacttttctcttttctctttctttccttgggactcttcggtcgacatctgtctgtgtttgtctgttgtctgtctaggtcgggttaagacaagatcacatggttcaacctcagacttttccatggacgtggcgacgtacgaacgggaacttaaagctcaggttggttcgatcagctctttcggctttcggcccaaaggtctcagaggtcgatgacgtgggtgatgagagtgggatctattcgttcacatcagatgaaccatctgggactctattcttgatgagacgatgagacgaaagaacgaggcaaacattctgggcgttgctcatcatcgttcgttggttgactgaccgtcaatctttatatcctcgttctatttggctcgctcggtttccgtttgttcttccctctcttgccatttccctctctccctctctttctctctcacgcacacacacacacacacacacacacacacacacacacagctggccagcatgggactctatgcaagcaacaccgtcggagatgggaattgcatgttcaggtaaacactatcctttctctcatgcgaccatctttcgtactatcgtacctagctctttatctaaccgccggatcgctcaatgtctttcttcctctcttcatcggctattgatccgtaacgcagagcgctctcggaccagctgtacggtacacccaaggagcacatgagtcttcgtcgagaagtacgccagtgttctacccttttctctcgtcagcactcctggagctgcactctgatctctgtctgtctgttcactttctagatctgcgactatctcgatgccaacatagatatctttgagttctttgtggacgatgggcgaccgtttgcagagcacatgcgcgccatgcgagagaacggtgagcaaatctaggcttatatacggttatatcatattcgcaagtgcttgcctgacacatacacactcttgatacaggaacatggggaggacatctggagctcacggcgttcgctcgactaaaacaaaagtggatcaaagtcgtccaaccgaacgtacgtacgagtggcctgatatgtgcgatggtgtatatgctgacctgaccacaacacccgttccgttcctcgtccacacagctcgtctatgttgtttcgtgcaaggacgaatccccagggggtacccctcgacgggcggctggaccaatgtttaaggactcggacgtcatctatctcgcttttcacaactatgagcactggagtagcgtccgcaatctagccggcccccacgccggtcctccgttgactaaggaagtgccgagaccatcaacctcgttctctcctacgagatcatcaacatcgacactctcctcaccacccagccggtcactgtcgcccacatcgttctcagacaaaccgtcggaagtcgaatcattgattcttagctcaatcccttccggatcggcgtcgttgatcaagattcgggagatcactcgacaagtcgccagaaaggagactgacggacagatggacgatgttccgtgggagcaggtcgtcgaggttatcatcgaccaactagataagaatggcgatggcgacaaggaaatgatggatctcgatcgtggccatgacccttcccctatttcagcccccgcttcgaaaacaccgccgcctttagaacagattttgtcccaagaaaccatcaatcaggatcgagaagaccgaggtcgaagtgtactacctactctcgctcaaagagaaggacacccgtacccatggagagaatcaagcccggttccttcgacggacggaagttcgtttggcgagaaggacgatcgatcaccgtccgttgcttcaccaagagttgcttcacctctcgtggccgatgctgctgccggacctggtggcctggctaagccgaaacgaggccggaagagacgatcgccctcggcttctgtctctgcctcggcggtcgcctccgggagagtagcaagtaagaaagcactgttgccgagaaaacagccaacgaggacgtccgctcggatccgaagctcactcgtcccggttggacaaggcagatccgaagtcgagggctcgtcgccggctccttccttggctggaacagacgtctctgtttcctccaccggttcatcttttgtctctggctctggttcgtcggtttcgtcagcaaacccttctcaagggggggagacagagggaacgactgttgtgtctaactcggcgcccagcgtaaagacggtcatcgccccagctctagataactcacagcctgtagacacaacactctctgccgacgatccgactttgatttctgctcgttcgatcccggtcatcgacaacagctcgaacccgtcttcttcagacactcgacccgctcgacctagacaaaaacgttcgcttccgagctctcttcctggctcgtctgctctctccaatggggctgagttgtctgattcgacgtcggctagttctcatccgactgaggatgaggacgaggaggacggcaacgactcgaccacgtcgtcctttgttccttccggtccaaaatccagatcgaaaacaaagccttcggggccgtccggcacgacgaaagcgaagaaaggaccgacaggaaagggaaaacggacggagaggaggacaaaggtggcggaagctagagctgccaggaggttggccgttgcaggtgagagtgttgggggcgaaggcgggcagcagggtgaaaagacactaaagaaacgcagggaaggaaaagaaggtgagaggatgatgacgagaagccgaaaatcattgggaaccgagcctggaggaggagcggcgtcgaaggaggttgggaagactgtcgtcggtgggttcaaagagttgttcatctgagggacattgaacgttatctgcctcccctctcttttctctcctttttatcgtgctgggatttctttctgtcacctctttcttccttctttctcttaataccatcatccacaggacagaacgttgtgtttttcttgtcgattttttaaatcacattcttgctctcctcctgctcatccgttcaattatctttttgtcatctttcaatctgtggttctcgtttcatcttactctactttgcttcattcttcaattctcttcgtctatttcatctctttgctccctttcactctctctctctctctctctgtatcacaccccctttccaatttttcaacattcttcattgcatttgcatgacagcctcgtcccccctttcctttcctcccttctctctttgcacgctcacgcacatagtcatatctcatacttcataagcattctatattcattccatttgccgatgtacatctgttatatatcacatcacccgttctctctctctgtctctggatcacgggctcttcacgctcgaacacccgcaagattcaaggaataccgcgatcttgagctaacgcttggtttttatcttgatccttgcgtctttcaccttcactcatgtttcgccgtttacctctcttttgaaggaaatagaacacaatcactgagacatgtcaagacgcacgagaaagagaacgcgaaagagatgaccaagacgtcttgtgagaaccaaatcgacggctcgtgactcgcgggatgagatgagatgagatgagatgagatatgagttcgttcattttatataaggtgataaaaggaggatatatatgtatatgtgcgcgggtgcgtagatgcaagtcgggtcgagtggactaggaggagattgtatcgcgttggtgttggtgttggtgttggtgttgtttttctctttttcaaaggaaaaagttgtaaaaagagagaaagagaaagagaacgaaagatgtagaaaacaaaaataaaattgaaatccaaggaatcgatggaacaaacaaaagaaaaagaaaaagagacgtgcgaagacagcgctcagatctccttcagagcagctccctcgaacccagcgagcccctcgcctgcctcctcgcccctgcctacatcacccgcggtctccatgcccatcctgtcggcctcttccagaccggccgctatcggcctttctgtctctgcctccttgagggattcttctatatcttcagcctcggtctcggtggacgtcggttgcggggccgaggcatcggcagtagtagtggcggtggtggtggtggttgatgtcgaaggaggaggggcaggcgcaggttgggaaacagcggtgataggcgctgggaggacggaatcggtgagtgaatgaggtcgggtaggtgaatctggaccggccgtcggctcgagcgcgctgggagtggaagttggggtttgttcgggttcgtctgcctcgtcccttgattaatcgtgagtaaaaacaagacgtttttttgttgttgttgttttttgttttttttttaaaataatttcgaagatgagctttgatgttgactctgaatgatctcaaggaaggagaaaaaggagacaagaacgagacacgaaaaggcaaagctcttaccatttgttactgaacctggtgactcgaggggtatccgccgtcacgctccgcaccagccggtccatctccccgtcacccactttgccctcctcgaccgaggtcgcgtactcctcgctatcccaattggtagccacatagtaacccactctgacaaactcggtgtcgttatagagcgcggagaggatgatgactgtgacgcctacgagttcggccggggtcgggatgcctgagggtgagtctgttggaagggaggataaggccggtgcggcggccgagaactcgaaagagttcagaccgaccggaataggtccgacctggtttttgcaagggaagaaggaacaacaccaagatgagcaagacagctgcagaagtgaagaggcggaaggagagggaggggggggaaggaagaagaagaagaagacagagccagacggaccatacaagagtccaactcttgatcatcactctccgccgatccgacatagacaagtttccactcgagatctttggaaccagaaagagtttgtgcggttgcctctgatcagaaaatcccgttggacgcgaaggtctcgccagacggaggacgaagaggaaagggaaagaatgatgagagcaggtataggacagaccttctttcagaggagcgatacattcaaattggattctgaaaacatatggatctgtaaactttgccggattgttgacgactggcaaagcgtttaatcgagggcgacgaagaaacatcagcttgtgcctgtttgcatccggactgagtttattcgggctaccaccaagggttacagatccgatagagaaacttactctcgacgttttggatgttgacgatcttttaggttgatggaagggaggcagattcaatcgtcaaaccgaccgatgaatggatagaaattcgaacaagacttcagcgaccggttcttctggcatgtgttgctcaaaacgatccttaactgtccacgactcacagacatgaccgctttgtttattactttgatgcgagggagaacgaagagcgagaaggcggatcaacagaggttttcgatggaggtgaaggagatcaagagaactcggtcgggacgcgtacacagagaagtaagtgagagaaagtgagggaatgttggacgaagggaagagaattgttgagtgatcatctatcttgtcgcgtcgcgtcgagtcgcgttgtgtcgcgtgccatattagatcagtcgtatacgaggcctgaacggtctctcgactgcaacgtctcaactttctggttgacttttctttcatccgttctttctttttttcggtgaaaggcatctcgagagacagaacggtttgccatctgagagcatctcggcggtagaaagttccaggaggcaagttaagccagaagggaatgaagacacggccggtccacatcatcatatacaccacgtgaacgaggctcatagagaacgaaacacacacacacacatacatgtatttgaatgagtagatcagatgagagaggaacaatgatcgtgaagcacgcaatacggagctaagcgataacgggaagctagcacgagacccaacgtgacggttgatgagctagaaggagaagaagatagggagtactgtcgagagctgaagattgagcgctgtgtgaagtccatgagagaacctcgaagagagagggcgctattgaggttataaaaagagaagaagaagtagggaggaaagaagtcgtttttgagtcatgtgcaagtatgtgtgagcatgtgtgcgcacgtctgtgtatagagattgaatatcagtcgctgcattatattcggcatgacaattcctctcaacggttcaaaaacttgaacgaaggttttggtcaccgaataatcagtagagtagggaaagaggaagatcacgagcatcgcacagattgtgacaaccctaacactggttatctgtcggctaattcatcgctgatcgttagaaacaccgagagaaccatgtgggctaacgaagaaaattttaatatgccgtaacgaggcgcagagtgaggagagaggagaagaaggaaggaaggaaggaaggagggaagaaagaaagaatagatgaacgaatagatgcattaggctgtcttggcttaggtggatgcatgagaagatacgtgatcgtccaggtaaggaagaagaagaagaacgaggaggaagtattttcggctaaaagagaacatgagctgaaataatcaatctgtccgggcataaacggggaggaaaaagagcgagagtagaattgagcctagcttcagttctcgtccgtgtcaataacgataaccggcctatgacggctagacctgagttccgggtacttgtcgttgaaacgacgatcgagattgaaggaatttcgaatagagatcgtataatatgatatagactgtcagagtgatcggataggtcgaccgaagagaaaagatggatgagggatttatgaagatgaaaggaggcaaaacgaaaagttgaaaattgaaagaaagggatgatgatgtatccgagatggcttttttcacgtgcgtttgttgactttattcgagtcgatcgtacgatatatgtggggcgagatgaaaagcaaaagacaaacaagtagatagatagtgaggccatgacatgtatgtttggaaaagagaatatttggatatgggagttttagcaattggttttaattcttgtagttttttcttctttttctttcttctttgaataatatgaaactcttcaaagaccgtccgagtaaactctagaaacaagtgatgaaaaacgaaaaaaaagtgaatgatctctaggcttccgtgattccttccttcctcaagaaaacaaagaaagacaaaataaagaaaaatatgtaaaacaaagtgagagaccggaatgagcgaatttgtacaagaatcaactggaagattagaatacaaagagagaaatcaaggtttgcctgatggatagagaggacataagcgagataggccaacgattgataaattaagcgaggataagagatacacctaggataaccctatattgtctatacgctccaaataggactggtaaaacagaacgcagtacagagacaaccaagtcaatctacaagatagaaggccacaaacagattgtaaggacacaaacagagggcacgaacatcgatcactgggatatgccaaatctgtcatcgagccggtaaatagacaatcggctctgtccagaccctctcgttcggagtcttatcagaaacaatttgtatttgcgccccgcctgcgaattgaactttcttttgttcttctccatggctaacctcgctatcgagaaaaatcttgtacgctccatatctacctataacattgttggcgatagtaacagtgccaggtgcgcggcgtcaaagccagtgaagctgctggtgacgacgtaataaacgctgctaccgtcgcttaatacagcaataggccaccttcccctgaaggatcaactaagcggagagagcgacagagagatatgccgactgcgcacgtgatgattaccgtctatccagcggctattcaaatctggatataaattgaacggtatataaccgccgggcgggtataaaaatagatcgatacgaactttgccctgaacaccccactggcaacacgccatctgacgcctagacctcggaaggatccgtttgaaatcgattctcgctcaccttgaccgggcgggaaatcaatcgaacggggtccgagcgtagaacatcctctctgcgtccgtagacttctgtttcgccgccttcccgatagaaccgattgatcgtgcaggatgtctttctgtgggagatagattcctcagccgtataaaggtctgccataagatcgtccaccctgtctgggtttctcttttccttactctttcttcatcagtatcgtcagaggccacactccacacttcctcgtcctctcatcaagttcccgcacctccgacctcttcccttcttcgctccctttctactccgtctccttccgccatcatgtcgaacattgaggattacgagacaaaaagctacgagaaagatacgggtgccacccacaccatctttcccgctggggaggagtccaggccggaagcccagcaccttcaccgagggctcaaatccagacacatggccatgatcagtatcggaggaggttagtctagaaccttttcttgcgttctcttctttgcgctctagaaagcttatctctccttaattatacagttatcggaaccggtcttttcttaggtactggtagagctcttgcccacggaggcccgcttggtctcttcctcggttacaccatcatggcctccgtctgtcttgccaccatgttggccctcggagagatgatctctttccttcctattgaaggtggtcatcttacgttggcccaccgattcgtcgatcctgcctggtcgttcgccctctcttacaactacgcctacagctggcttatcattcttcccgctgagatttctggtaagcgtctttccctcatctcttgattagtttccgcttctctttccgttgtattgatctcctattctcttgcttatctctaactttccccgtctcagctgtcgctatattggttcaatactggaccactgcctactcgaacgctatttggatctcgattgctctcgctatcgttattgtgatcaacttgtttggtgcccgaggatatggtgaagccgagttcttcttcgcctccatcaaggtgatcactatcatcggtctcattatcgttggtatcgcaatcaactgtggtgccggaccggccgaccagggttacatcggtttccgatactggaagaaccctggacccttcgtccaatacgaacgcattcccggatccctcggaaagttccttggcttctgggctgtccttacccaggctgccttctcattcattggaaccgagatcgtcgccatcgctgccggagaagccgagaacccccgacgaaacttgccaaaggccatccgaacggtctacatccgaattgttgtcttctacatcctcggcacgttcatcatcggtcttaacatccctagcaacaacgcagaactcggtcaatacagcgatgcccgagcttcccccttcgttctcgccatcaaggccgccggtattaagactctgccctccatcatcaacgcttgtttgatcacctctgcctggtcggctgcgtcttccgatatgtacacctcgtctcgagccatctactccatggctcttaatggattgcttcccaaggttttcactcgaaccaccaaaaacggtcttccttgggctgggcttatcgtctccagtctctttggtctcctcgcctacatgtcgctcggtacttcggcctcgaatacctttgattatttcgtaaacatgaccgctatcgctggtctcatgagttggcttgcgatctgtgtgacctaccttcgattccgggccggtatggatgcccagggactcgaccgagctatacttcctttcaagtcccgatttaccaaagtcggagtttactacgccatcgtcttgatcatgatcgtccaattattctccggatggaccgttttcctcaaggacagctgggacacagctacctttgtcaccaactacctgcccttggcgttgttcccggtcctcttcgttttcaagaagttctactctaagaccgtctggcgaagggctgaggacatggacttcgtcaccaacattgccgagatcgaggccgactcttacgttgttcctcctcaccccaagtggtggggtcgattgggcaatgccatcttctaaacaaagacaagaatgctcagttttgttctcctttttctgtccctcttttctccacattctctatcaaaaatcacatagtttgtcactccgttgtatttgagcccaatcgggtttcgcctcttctctggcctttcttgtttgctgcatagtttgctgctgccttcgtcttcttaaatactattatctcttatctctcacgatatccccttgtacgcttggtcgccccggttgtaatagaatgggctttttatttctccctcaacgtcctcatcttatcataccagctacgtcattgaaacggctctgacgcgtgacgcaattaaatttcagacgcgtccaacgacgcgctcagcccgatcgatcatcatcttgagagtcttcttctcatccttctctcaacctcaacatagaagaatccaagttggatgcgctcgttcgtcgtcttgcttaacatcaacatcagagctcgactagtcaaccctgtctttcacccagcagtgagcaccttccagacccaatccacacgcagatcgtttagttaccacgttagcaagttgaatatgccagagaagagaaagaagccgttgccagacgaggtggacgaggacgtgaagagacacaagccagagcaggctgagaaggagaacgagaaggaggattggttcaaaggttccgtttgtgagttccttcaatccaatctctttcttccgaatggaatcccgctccaagaatcctgatcgccttacccaacattctttcatacacacgaacagacccaagagtgtcgatggttgaagcggccgatcggatggatgccaacaatcctcttgagctactggagagtgcgttgaagaaacaaggcggaccggaggccgtgagtgatgccggagagtcggtcgtttattggatgaatatggaggatatgagacgttcgtctcccgttttctttgattcactcattgcctacatatgtgtgtgtgtgtgtgtgtccnnnnnnnnnnctaggaagtcttccattgctgacggtttcgtccattctgtgtttgatgaccgactccagtcaaagacaacaaagcgctatccaaagcatcagcgtacgcgaataagaacaaactcccgttggtcgttctcttcccgatctcaccgggagactacaagtctcacgacagatcggccagacggatcgatttcatgttgagaaacttgcgttctctcaaggtgtgtctccttctttcacttgtctctctagatttcaccatttttctcgaacgcatagtcatttactcttggtttggtccatacgcaatagacttcgttgcacgagctagagatcccactccttcagttcattcatccgactagaaagacacttcccaaccggatcatccagatcgtcggctcaccaggtatcaaagcgagacacgtgtttgccaacctgtcgtacgaggtcgacgagttgaacagaaatagagcggttcttgaacagggcgcagacaaaagaatctgggtagggttcgaacatgatcgttgtgtcgtcccgcccgggggtgtgaaaaagaagggaaccggtaccggagcttacaccgttcgtccttgtaactttcttacttctaaagagaactcaccccgctcgagtctgatgtctattcccttcatacgtttcaacgggctttgaacaatcaaggtttattcaccctggttcagacaatggggctcgatgatccatgaggatccctcattgtttgacgaataccctaatcctcagccgaaccccaaagggacactcgaatccttctctgccaatgcgtccggcgacaacaaggatctcttaaaagacattccggattatattgaaggcttccagcttgacaagaccgacgcggaacagatgagagccgtccatccggggggcgaacatgcggctgaaagagtgctcgaagcgttttttcacacaaagtcgtcttcgaaaaagttggggccagtcagacctttcgaggatgacgatgaggtcgtcaagaaggggaactcgagagtggaagtttattcggatgaaagagatcgagcagatcgaaactctacctctaggctttcgttagtgtcccctttgggctactatcctgtcctttgctttcctattctcaattacacggcttcggactgaaggtttctttcttggcgattgtagaccatacctcacgtcaggcgtgttgtctcctcgacagatcctcactcatgtcctcaagttttccggaaagaaaaccgtcccggtcgataagaaggacggtgttggaaactgggtaggcgaggtcgcctggagagacttctacaaccatgttcgtccatgactcgctttcttatcccttgcccttcctgagaatgatatctgtcgtgcttacttcggttgtcgaactgaccatgggcgttcacttcaccggatacactcagatcctggcggcattcccgagggtctcaatgggtcaaccatacaatgtgaaatatcgaggtgtccaggttcgagctcttactcttgttgcatcgctatgcctcatgtcggcttcttaacttatcattatctcatgcttcctagtgggagacggatccggagttgctagaggcttggaagacgggcaagactgtaggtttacactattttctccttcaggtacacttgatacgaagatgctgatggatttgtttcctcttcttcaaattctctcttcgcagggctgtgcgtttgtttactccatctttctactctgagttctcacacagatatctgaactctttcttcatgtgataaaccgaaaattatactaaacagatcccgtcgtggacgcggcgatgcgtcagatgaacgcccagggatggatgcacaacagggccagaatgatcagcagttcgttcttgaccaaacatctcttggtcgattggaggctgggcgagaggtacttcatgaaccagtttatcgatggtgatctcgccagtaacaacggtggttggcgtaagtcgatgtcttcatcttgtctcgtccagaaggtttgttactcaaaac

SEQ ID NO: 3041 - DNA, 3104 bp, Xanthophyllomyces dendrorhous
ttctctatttcggtgtaggctgtagattagtttgactgagactttgttctatgctcttcgttttcattcctatccgtttatcagaccgggtcggatccccagccatatttccgaattttcaatccgaccactcaggtcagtttttcagcctgccgctcctcttgtaacatgctcggaggcatgtcaacttatctgattcaatcctatgggatgtcctgtaaataggctgagaaagctgatcctacgggcgagtacatcaagcatttcgtcccagagctcagaaacctcaaaggcaaaggtttgtttcctctcttctttgctttcctggaacgaaagggggttctttcttattcaacgttgcatgtgctttgtattgccccaaccacacagcactgtatgacccgtacgggcatttatcgcctgcagagtttaaaaagctaggttatcctatgccgattgttgaccacaagaaggcgagggagcgcgctatcgagcggtacaaaaacccaggggtcaagcctgatgaatctgctgacgggtatgtagtaatttcttttacaaaaacagggtttgttatctgggttatgtttcaagaaacaacgttgttaacatgttctgggatggtgtggctttgtatgtttgttgatagacctacacaggatgatatcaaggtgtcgaacaacgtgaaaccgaaagtcaagaaaagccctgcagggctcgagtcgttcgggtttatatcaaaggcttaaactgatttaactattatcgtttgttcttggtcttcctctctcctcatacaatgtatgcttctctctatcctcgatttaatggctttgttagatattccgtcaaaacaaggaaaatgagcgaaaaaggtcgtctcatgggtggatccgattagagaaaatttgtagtctgttgtaataaaggactacaaatgctttctattgatttctctatatatgataatttctttcttttacctattttctggccaacaccatcttccaatccgtccatcaatcaaccgagcttcatgtttggtcagcctgttcgtatctactcgtcccctatgctcactgatttcttactacatgacctctggctcctgattccaagcccaactcacgcttactacaaaatctttgacgaatatgaaagcagcaacaacaacaggcggcatcgtccccgttctcatttggagcaccagccggaggatcagctcctaaaccttcactctttggagctccttccaccggtcaacagagcgccccttcgttgtttggatctcagcctgctcagcctcaacaacaacaacagcaacaacaacagccgggaagctctctcttcggtcagcctgctgggcagcaacagcagcaacaaccttcgacaagcctgttcggtcaaccggctggtggtcagcaaaccaactcgacaacatcaactgggctctttggtggtggaaacacaggacaggcagcaggatctagtgcgataggtggatcgtcactcttcggagccaaaccggcaggatcgacttttggtggtgggttgttcggccaacctgctcagacggggtcatccggtggactgtttggccagcctcaacagcagcagcaacagcaacagcctcagcagcagcagcctcagcaacagaacatgtttggaggtggtggtggtttgttcggttcaacagctcaacaacctcaacagcagcaacagcagcagcagcagcagccccaacagcaacaaccgcctcaacagcagcaaccatcagggatgtcgaaaacgacaaagttcacagagctaccagagtctgctcaaaaaattatcgaggggatcgagtcagttacctctctttcaagctctttcgggctcatccccaaagatgtaatcatctgattttctctcttctgactcttgatctcgctttggtttcctccgaacacgactcggtcacagttcgttcatcatccaacaaatcaacctgtcacattcgctcgctcaacatccactctccgaagcttcaaacgcatccgcctcatcttctcttgctctactatctagtactacctcggttgctcctacgatccctcagacggctggtcttttaaaacaattgacgaccgttcgttcctcttctttttcgtccattgtctttctatttgttgacgagttagccgatagggcggttttgctcgatccattttggggaggagaatgaagaaaggctgggctgactatttcaactctgttttgtctccttgtgatcctttactctggcatactatgtcgtcgtcttttgttggcggcataaacaggaaaccacagcgttgaccgctcacctccagagctgcgctcgaaatgttaacgatcttcataaacgagtttctgcagatggagaagatgccgttcgaggtgctcggattatggatgcttccaaggtgacctttttttctttagatgttttttcaactagttttgttcctccatatctttggaaaaacacacgttcatccgaactgactgtctcccgattttctctcgttgaacacgacgacaacgacagaccgcacaaggaagacaagctttgaagggtcaagcaaaattccccaacgaatactttacaaagctcaccgacgagatgaccagtcgagtcagagtctaccagaccgctatggatgtttgtcccctctgttctcttgcgttttctttgcctttgccttgattccttgtacacatatatgtcattcgatggatcggtactgatgaacgttctgtctttttccaaacaccagcaactcactcaaactctccactcccttcttccaccatccagcttgtcgagctccagtctgtcgaacccgcttccactccctccacttcctacgccccaaacgatatcccacacgctgcaatcgcaccaagtcctccttcaccgacttgccgctcaggtaggattcctcgacgaagagctgggcgcgttgaaagcagagtacagggtcctgtggagagaacgtggcggacagggcgggagtgtgagggatgtgttcgagatcgaccagccgggttcatctgggtccgggccgacaggagcagggggc

SEQ ID NO: 3042 - DNA, 3003 bp, Xanthophyllomyces dendrorhous
ttattattcttgttcaccgatcatatgtaatcgcttccttctcttttggtcgttcattcagagatggttcggatctagactggagagtggaaaggagaatagggacctgaacgcagcgctcttcgaggtatccagagaaagacgatcacatagacgaagagtagatgaaacatgcgtcgggaaagaaaagagtgcataaaaaaggatgcgggtggtggtggtggtggtgatggcagcggtgaagaggcaagttaagtaaagggttgcagagattcgggaaagaaagaggacaacaacagattaggaaaaagaaaagagaaacgagacatgatatgaagcatacacgtggtttggaaaggaaaaaaaggggaggggggatgaccagggaagaaaaaatagaataaaaaaggatgatgggtgttcggaatcaagagaatgaacgacagggggatcactgtaaaggttctttactctcgcctagtctgttcaaatgaatgtacacctatttgaatccgattaccaaacatgatcatacaaaagcagcgatggtcagatagagtgtttcataaggaaacgaaatgtagaaaatcaaaatgaaatggaacatacgtcggtaccgctaaaggaaaagaacaaggttgtgagagaaagcatgaaacgggtcagaaactttattgatcttgatggatttcaccttcaaacacctccatgtatatatctcaagctgcaagagagagaaagagaactcgacctggacttactagccttccatctgaaagcccgaaaggcagaccaaacaaaagacacgaacggttcagtctctgccggttgatgcgactgcgatcaaggaaataggtcgactgaagaaacacatacactgatcaacctaaggtcacctccaaagaacctcgcgtactattcgacctcaaatgaatgcatctgttagcaagcgcccaaagaaatgttttttttttctaaataaaaaaaaagaaaaaaagaaagggaaccaaccagtcttgataacgggagaccataaccgaacccagccatgggcgcgttaaagtccgaagtgacatcgtccaacgtggcggcctccatggtggtatacatgtatgtccagatcaatgggatagcacttcttgggattcctccaccttcatcagagatcttgatggtgatgtcttcctttccttcgacgacgacgactttgatcggtgggtattctcctgggtggtccgctccgaatcgctcgatcgtcgctcgtagagaatttttgagaagctcgaaaatgatgtgcgctctgtgtttgtgcaaagagagtaccaagtcaggggtcgtcgctttggccttttatttattctattctcgatagttggagttatgaaagattggaagaacatacaaatgtccaggcacataagggaacgccaggtcttccggacaaaccagctggacttcgggcgctttgaaaaggcagtagtgatcagacgcgacaaactttgcgttctctatcgactctgtgcacatgtcaaagatgttctgtggatggcggtgaccggcgacgtcaagatgatcaggccgggatacgaacgatcatggtgtcaagtagatggatggcttacggcttgtttgcagatgattccgacatattcaggatgaggaggcaacgtgttgagagcgatatctaaggaagagccaaatcaacagagataagaatgagagacgatcggatgaacaaccttgggacgcgtccgacaagagagactaacgttgaccgatcaggaaacgaatcccaattcgactcatatggaaccgatcgaggaactgttggatgctcaatcctatcctgtccgactttttgctatgcttccactccaagatacctcgtctgagatttttttttcccgttcgtgcgcgcaagcaggaaatcgacacagacgtcagtcaacggctgccctgagttggacgacacacacaaaaaaaaaagaaaaaaaaaagaggatggattcgaagatgacgagctactcacgctacagtcatcaccgtcgggtcgtgtctggctttgatcttttggagacactttgtgaaccggtcgttgtagtcgtggacctcgggtggccagatgatgtcctttgtggagccataatatctgatcggaagagattgggttggagaaggcttagcgtgagtggtgtggaagatctgaaggtttgaacacaccttttgtcaagagggattcgcatcttgcccttgtctggctgtgaggatcgatagtagtgcgactccagagaagggttgtccgttgcttccggtaagggtctaaggaaggaaaacaacgccagtcaggacaaaggggatgagagaagcaggaccgggatgagatgtctttaaaagaaaagagggaggagaaggacatacgtaggtgctttgactcgaagagcatcctggatatcttccggtagttgcggaggcgggaacgagacgagctcctggatgaatgaataggtaaacaaaagaccaggtatccgtagagagtactcggtcgatgagcatctgagatctcttcaggcagagccgaggaagctgtctggcttggtcctcaaccgagaccactcctggaactgagcatgggataagaaacagagaacgaagactcacctcgaaactctgagcataccactctttgacccggttaatgctcggcatcttgttcaagttttccggtagctcatccaactctttgactctgtgggacagtctgatgggtagctcttcggcaagaaactgagatgctttgagaagtgttccttgggatggattctgaccgaaacctgtgagaaggaggaggaagacgaaggagaacctgcacggtcagagagatggaagatccgtggtgaggaaaaccaagagggaaggaaggaagaacgaacgaatcatctgttgcagggacactacatgacccaggagcacccacatcccgaccgaatgcgacgcaacccaacc

SEQ ID NO: 3043 - DNA, 5851 bp, Xanthophyllomyces dendrorhous
ccaggagtaacatgaacggaaaagaccacaaagaaagcaaagagaccaaagagacaagcacagattcagaacgaagcagacgcgagcacaaacaaagcagatcagccagacggccgagccgaccaagaagactgaccggcagtgggcgcgaaacctgcgaaatgattgatcttgtcgtacgtgctaggagggatcttccaagccatgatgaacgagtgattgtgtatctgacagaacgagaacgggagtagctgcaagaccagatgaggctaaacacacgacggctggacgttgttgatggtgagcaagacgagcgtgaggaaaaataagaaggtgactcgagaaaactctgaaaacgtcacatgcccaaaaagtgtaaactctgaaagccggatgtccgagttcagccggtgcttcgttggcttgtccgttgggtagcggggaccccatcgtattatttaatagacacacacacacacacacacatgccaggatggcgacagaaaataaagagagagagagagaaagaaaaaaaaaggaagggagaaaaaaaagaagaagatattaatggcaatggctagatggtcgatggtaatacataagaaagaagagaacaaaagacacatccccttcggcccagatctcactgccagatagctgcagaggtaacatggaacaaagagggcatcggggcgtcgacagaaacgatggtacatacgaacagacacaagggagaagagaaatcagacaaggcggagaagaagaagaaggaagggagagggaaggacaagtccaagaacgtcctctttgcgccatctcacggatccactcgctgccgcttcaaccctctgtccgacagatcctccccttcgacctctccggcaccggctgaatccccaacggtgccaccgacaccggcatcggccgccccaatggatgccgccaccttgtccttctctgtggcaagctcgtgctccaacaaccggactcgctcctctagatccaccctccggtgtcgttcggcctggacgagcgctttgagatcggatatcgcttggtccatcatcatcttttccatcgcccacttctcacagttcgtcgtctcggacgcctttaggtgagagatatagtccgccgccttctgcaagatcgtctgtggagcggcaggcaagggtcgagacagaatccgggtcagccagcaaaggacaggaatgtcaccgaggtcaaaacgaaagacgagagactgaccgatttgttcttctcgacctggggcagataattggctagtgcctcgattcctgcgttgatcttttctcttcgcttcttttccacgtttttctacacgaataggagagttgagatgatgtacaaaagcacacacgtcaaaaaggagacaacaacagaacaccttgtcagccaaatgagttctatcggccaggcaagtcaaaagaagactcaaaagaagaagaagaagaagaagaagaaaagaaaaacacccacatggttgtccttcttgttctgcacgttggccaccccgttactcgtccgtcttctgactccaccgacacctcctgaattctcgccttccgttgagccgataggttcagattcggacagctttctgatctgtcctcccagtccaccgagagattctgacgacccaccgtctggcccggtcccagttccggcgcctcctcctcctcctcctgccaccccagggggtaacgtctgtcggagtccagtcgatctcgagacctgacgcatttggttagctgacattccaccctgtctgatctgtcctccggactgtcctcctgaagaagaagacccggcagcagaattcgagccttgctgttggagaagagaactctccggtgcggaaggcgcgtccggggcaggactgtacgggccatatggatcatgctcgttgtgttcgtggtggtgatgaacgtcgtggtgatgaccgtgatggtggtgatgatgatcggattcttccggatgggaatggatcggatggacgtggacgtggacttgggcgttctcagacacgagtcgttcgagttcatcgatcgtcgtggtcggatgcggtcggtgctcgtcctatcgagtcgagtcgagtcaagtcaagtcgcgtcgaaaatgaagggggagaggaaaaaagaaaaagaaaaggagaggaaaatcgtcagcctgttctcgagatcaaacgaacccatccgcaaagagaagaacgtgatgaacataagaacatgtcaaagaaagatatacacttacaccgatgggcagagctgcccaaaacgccttcgcgtccatctcgtcgaacggctcatgatccccaacgccaacgccctcgccgtcggccccgtcgtggtgaacgtgatcgtccggctggacttgaacctggccttggacgtgatcggatagttctacttgtgaatgagggtgtggatgagagtgtgaacgatctgtcccctcggcttccaccccatcgacgtcgacgtcaacgtcgacctggattcctgagggatgcacgtgtccgggcacgtgtcctgttccgccgccggtggtggtcgaaccgttgtgatgttgatgaagatgaagatgagaaggatgatcctccgactggtcgtctccctgaactggggcgtgtggatcggaccggacagatgctccagctccggcagagccagctctgagcccaccggtctggctgctgtttgtctgtccgacggccgaggcgttggggacagccggcaacgaggatttcgagtctgtggtgatgtctggatgatcgatcactccatccacctcggaatccacttgcccggatggatgagcggatggatgtgtctgtttggaaggtactccgattgttgacattgctaagaaaggtcgtaataggtctcacccgaacagtggcaatggttgggagatggtgagaggaaggtgggagcggaggaaagaatcttctctgggtgaaactttggacgcgtctgttcattcttttttcttctttttttttgggtcgcttgctttcgttcccgtccgggaagtttccctcttcgtctcttccttgcttctctcgttctcgttgtcttgtctatctggacctggttcttgtcctttggcttggcttgtctcgtcggtgatggttctttttttttctctctttggctgagagtatccacgaaaaacagcgtgttgagacactgcatatggggtgtctctcggagaacgcacaccatgatacccgacaactcagtctcacacagaccgtcctgttctctctgattttcttgtcagttccgttttggttcgttttgctttgattcgtctcgtttgctcgtctgccgtagaaatacatgaaaacagaaaggatagatagttctttggtgtattgccacgggatgcggcaaagaaaggcgaatggagggtaggcgaggtcggcgagagggagagaggagggtaaatgaaagcgagcaagattgaagcggacccaagaaaagatggaaaccgagaacccaagcaagtataaagagagagacagaaagagagagaagatcaagatgagaaaggccaaatccaactccaaacgctagctctaggcagactcggtgtaaggcgggccgagcatggtcctgaacatagagagtactccctccacgacgatcaacagcactcctcctccaggagccaaccgaagcaccttgggggtctgtaggaaggaacaaagaacgtgtccaagcaaaacagttgttagatcagtctcgacgtgttctcatacatgtgtatacacacgctcttcacttctctcaggaggaggaaaaaaaaacagaatggaaaaggtagactgacgaatcctcggtagagcgcaccaacaccctcgttcttggcgatccggccgatctcgataaacgtccagccgatcttttgaccagcaggcatcgactgcgctctcgacttccacacatcagccggcgtgttcaatgtggtaccaatgaatcctccgatcgctccggccacaaagttgttgaacagctgctcggatttcgactggatgacagtcgagaaaagatcgaatcggtcagtcggattgactatcaccaggatcaaaacagaacaaactcacatcagccttgggaagcatacctcgaacggaaaagatgcatccgaagtatcctcctacagaaagagaaaaacagagcgatcatttagttcagcttgacctcgggagagacgtcccagaaggggaagaaaagaaaaacggagaaagcaggacaaaccgttccacaacacgtgcctccagaaggtagcctccatacccttgtagagacctgcgggtagggaagagggagaaggacgttgtgttcagatggatatcgatgggaatagacgaggatgtgtgaaaaagaaaaagaaaaaaagaaaagaaaaaaaaacatggtcagtcttctcgttacagccagtccgacagataatgaaaagaaaagagaaacgacgaaccaagaggtcccgaggcggcagtgacctttcggataacatccatactgcccgtgtactttgagttcttgtcttgcaactggagggccggaatgaaagcaaagatgcaatcaatacaacgtcacatacgagagagtcaacaaggaagcaagaggaaagaaaggactgacgttgatcttgacaccttcaaacggagtgacgattctgtaggacggatcaacgatcagtccgaacgaacagagacagcagacggacaagagcaggtgtgaaagaaaggacgtacaaagattcggtagcacctgcagacatacccgtcaggatggacaaactctgagtcataggagtcttgccgtcattggtgtagacctttccccacgcgtcgttggcggcgactttggggataaagaaagatcgaggagaaacgtagttagtatcctgcgcgggccgttggaaagacatcgaaagaatgatctaacgtacacttgagagctcgcttgggagcctcgagcatgagaggagggaccaatcctcggtacaatcgtccaaagctatgaagaacattgtgagagatatgtgatctcggtcagcgcacaagtagttgacacatgatgagggagaagacaacgaaagatggccgaaggtcaagagtcgaaacgtcggaaggaccggagtaaaacgggggaggtcttaacttccggccttatctcttggaattctctgcccgaaccaacaaagagttgtggtctgatggattggtttcttctcttctcttggttctatgggaaacgccgcagagggcatcctgagcagaacgcttgctatgtagtagaccatggcgatggtacatgtcgaataggacgggaaacaagagaaagacaggatgatcagacgcacccttcggttccgacgatatccttgaacgtggccatcatgccgacctgcttgccggtcgcgagctgctgcctggtcttgacgacatcgagcgggtagagggtcaggatctctgtgattccggcgatggcacctgcagcgaactggtactgaaacgggagagcaagagctgacgaaagagaaagaagaaagaatacgcagaagaaaaaacgaaagagccatcagttcggacgtccggaccgaaggacaaaccaacggatggacggatggatggacagaactcctcagaggattcgaccccaggcgaggccaaacgaatccacagcacactcacgctgcttcttgggtgttgtacttgaaggggcggacatgaggatgagaaggaagagaccaggacaagagacgaggagtgttcaagacggagagaagagctttcttcgttggtgatggtcgtcgatgg

SEQ ID NO: 3044 - DNA, 18328 bp, Xanthophyllomyces dendrorhous
aaaaaagaaaaaaaaaaagaaagaaaaaaaaaataatccgaaaaattcgccaatgaaattccaaacgattcaagtgaagaaggtccaagacgctttctttctggtggtggtgttgctgttgctgctgctgttgctgctgttgctgctgctgctgctgctgctgttgctgctgttgctgctgctgctgctccttcgcatgttaacgtccgagtgtgcatgctgccatcgtatacatccagtccgtaggaaagacacacagaaagcaagagaggccaaatgttccatcttcatctccatcctgctcctcccactgcctgctcctcctcctagacatgtctgtggtcatacttccgatgcttgtcctgctcctgctcctcccgcgttggcacacaaccgtatctgagccgttggacgacatcctggtctcgtccacgcatctcccacccatctgatgagctacccgatagatgagatctaccctactgccttggccggctgactaagcagcgaacgaaacagtcaatcagcatcaccttctcctcatcatcatcatcatcaccttcatcaccttcatctcccttggtctctactagtaacggtcatcgtcaagcaaacgttcagtccacgataccatcgatggcctcttcagcttcatcttcccctcacgcaaccgccgcatccttcaggagactcgtctggcaaggttccgtaccggtgagcatcaggctggctcaagacacacctcccgttcagtctggtggtgtggacgcgtactttgtgagttcctatgtttctcatccgtccgtccgtccgtcctgttcaacagaagctgatagagtcgctttgaccaaccgttgggacgatccttcagattcaggctcccagacagagctatctgcctctgttgcttcaagacatcagggaaaacttggtcgaacttgcactggacgaccaagcactcgctgctaccaggcaacaggattggtggttcgaagatgaagccggtagtggcatcacgagatggtgtgtgtgtccttctcaatgtgttctctctttgttatctcatttgtcttgctcacctctctacctctctacctccccttcacttttcccccaggcactggccgataggccttctctacgatcactcgatcatcaatgatccatcaagatcgccaacgattggcaccaccccatcttcgccaaccgctccgctaagactgatccttcatctatccaatccaccagcagaaaagctgttgctctcaaactctatagacgcttgtagattggcatttatgagcgcgatcaaagaggctgactttgttagatggggaaacgtcaaacgagttaccggacttcgcaagctcgaccaggatagtctctgggatggtctccgagcgagtgggtaattcatctttgttgttcactacttccttttcatcatgagctgacgcttcgctctttcctttattttttcttcatctctttctgttccgctttcgctcgctcatgttcactgccctccctcttctagatgactttgacctgcatgcgaaagtggcgtcccgaatcctccctctgcccaatttctctcctaactcatccgatcatgggtcttcacagccaccgtccacccacctgctcgctcctacctctcgacaacatctatcccgaccgccttcgactgaaccagactcgacctcatccggtggtaactcgagtctggccagtccgaacggaaaaccggatagcgcaaacgcggtcagaagcgtccctataaagattcacctcccagaagcggcaggcgtcttgcagggcgtcgttcctccttccgagcccaatggtgaactcccttctctcttttttcttcctctttgtcttacggacatctgaccgaacgttctgtcttttcccactaaaaggcaccccaacgacgattcattcatacctgcattcatccatcccgctcctctttccgaacccaccctcgagcctgaccccgtcgactctatcgactccatccccctcgctcgatccctcttcttccctgtttgttcctccgtatacacatccgggttcacacacacagccctcgacgtcaacatcaacatcggcttacacattggcgtacccaatcatacaaggcatcgtaccaccgccagagacagagatcgcttggctaggcgcttgtctagtaggcgcagatggttggctcgccatctgtatcgggatgaacgcctagccgatcggattccttacgtatctcgattcttttgttttcctctgtcattcgttgacacctttttcttgttttttcttttcttttctcttcttctttggtgagcgggggtgagaatatatgtgatgtgtttgaacaaacccagatccgaaattcatacgagtcaggacttttctcagtccttttcatgttacctctttccttctttcctctccaaaatatccatagataaactaaaacgaatgcgataagaaagagaaacagtcgcttgtaacctatcaaccatagattaggacatccctgtcctactcatctttttttttcttttctttttcctttgggaccctctcttctctttcaaactcttcctcctcaatctcacagctcgcccgaggatgaagatgacagaattgagctttcagtcaacagtgagctcctggtcgaccttgccgaactgttcgaagaacgtccgcatgaacgcgatactatgaatccccagttttccacacacgcacagatcaatattacatcagtttcatcgtcgatcaaacgagagagaacgagagggcatctccttccttctcctccctccgagaagagggacgaaaggaaagaagtaaaaggatcggacgcactagtaggcaacgtcttttgaaccagcggtctccctgatggagtgcatggccaactgagcgagtcctatatcgaccgttcgaacgttggtcgacagatgaggtccgactgtcgatccgcatgtactcttcaagtccacgcgttttatcagacccatcggatgagggagtcaacaaagagacgggttccaaggtgagcgcattaatcaattaaatttagatttaaaaaaaaaaaaaacaatgacctacgtcgtttcgaacttcaaactcttgaagtggtacgcccgcactaaagccgattttaattccaaaaagaagattagttcagtcgatgtctcttccaaggacctggccactctgatgtacaaagagaaagcaagacaacaaaagagaagaaagaaaggcaagggaacatacattttggcaattcgccgaaggacgaacgtcgtttgagcgtttgaggtgtaccgctgattggcgttcgtcttgataaccacaccacctcccatcgacggttgactgctccatccggcaaagcacatgatgtatcagaacagctccttcgactcacaggtctcgattggtagcccaggaaaacaagatcaaacaagaaatgacccactgcaactcctggtgtttctctgcaaagttggggtgcatcgcgtgtcccatatcagccgaaacgaggaaactctttgcgagcgcttcatcagtcctgcctacgatcgtagagctgtccgcctctgagacgttcagccctgcagctgttaaccgagtgacgagcgatggctatttatttttgtgatcgtccgagagaggtgtcaaattctggtgaacgtgatgacatgtacgtgacgagaaggagatactgacaagcatattggactctgctccgtggtgactgacagaaccaacttcctgatcgacccccaaataaatacactctatttgagatcctttttgtccagattagaatttcaaaggacgtaatagatagggaacgaacctcgtgatcaaatagtagaatggcagaagcgggtgcagggctagagctcaaagccgatccagcatttgtaaacgagtcagtcagggcctcgacagcggcaaaactggacatcaggttgtcgatccgaggactaaagataaactcgttagaaagaccgcccagacaggcaggctgggtgtcgtacaagcataactcgaaatcctggatctcatctgccttgcagcccaactcctcagccaagagccctaggagcgcaggatgatgtttctccttcatctcgggcgatccaacgggcgtagcaaatgtcgaggcagcggaggcacttggcgaattcagaatcgacgaaacgagacctaggattggagtgaattgggtctccttgttgaaggtgaaggagtcattggagcctctatcaagatggatagccaaggaaggaatccgtaacaaaggcctatcgatcttgatcagcttggagacaaacttctcatcctcggtctgaacaataaccctaccggccagactgagatctcgatcaaaccacgaccgccagatccctccgccatagagttcacacgcgacctgaagccagtctcctttgaccttgttgctgacaggtcgaatcttgagacagcatgagtccacatgagttgcctttgtatgaaataatgacacaagttgaagccttttcagagtctgcacgaaaagaaaagaaaagaaagatgaaaaagggagagagctcagaacgaacgataaggccaacaccggattgaccagagatgaaggaggagggtacggcaaaggcagccagagctgactgattcctagtaaaatagtagccctttccaggcttaatgatcttggaccagtccgaagactcggaaatcttcgtctgtgtaattgatcagggcaaggggatgaagagaagtacggaagatcgtcagctctatatgatgaccagttggccaaaatgggaagcgggaaagactgacaaagccggctttatcgagtcttgcaacggccttagccacagcatggtaaggcgttggagaagcgttcacgaaatcgacaaacttaagggcagctgcatcgttggaactcgtgggagatgtgccagctgtggaatgttcaggagagaaccgggtggaaagagagaatagcggagttagccgaaccccgtatcttggtcaattctcatgctatagagaggaaaacaagacggaaataagaacagtgaagcgaacagatagacattttgacttgcatctgaattgagatagagaaggacgaagagagaaggaagaagacgattgggagttatgagtgtgtggtagtaggatatctcgaacatgtacactgcatggctccatccgtccgacaacaaccctaacccgatgatggtcaacacatggtccttctagacacagctttcgggtctatcgtgaagcccgacgtcgctttggccgagtaagaaaggtgaacatagtttgagtgcgctgagtagaaggaaatataaaacggatgattggctttttataggaaaaaaaaagaaagaaagatggctcaactgtcggcactgaagattgggatcaagaagagaagaaacccgcaagttttgttactgaaagtcgtttgcagagccttcactggctgctcatcatacagaggatagcatgagccaaccgatttcaacaaagaccgtattcaacttaccttcgtctccaagctgagaccattgtttgatacaactacgtgtgttggcgtcaagtgagcgcggacgaacacaaccgagtggcaggttgaccaactaaatcaacctcgtccgttctcactcgttctgatcgggtcaatgtacgcgacaggctgcgacgggtttgaaggagacggtgggataacataaaagaggctgaacgggtctaccatcagctggaagcgaactctttccatacacctgggatctaattgtcgcatggagccttcattgctctcctcaacgctacctgtaccgtatctatcctagaggtactcctgttcatctgcctgtctgcctctcttttcacttctatcttgttcaaaccctcatctgtaccgctcttctgcacaccttctcatctgtagagtcgtctcaccattcattcatccatccatccatcctccctctcgaccacttatgcacaaagatccggcttgatatcaacgcggtcaggatgtttctgccgggtgtggccacatgtcacgtgacgtcacataatcacgactggaactttctagtcggttctttttgcccgttcttttttggatcatcccaaaatccgatcgagagcaaaagtgagacttagcggccgacgaccaacaccaaaagctttcgtatcacacatacccactcatatacacacagcacaagatggagtctcttcttagatggtgtgtataaggatctttattgacccttctcctcagtatgttttgtggatcgattttggcgcttcactgatcacacatacacatacctcacaccacacgattactttcgttttcgtttcttaggggaatcgaaaactctgttcctgcctccggggacgcctccgagcttcaccaggtcgcagccgaagtcgcagccggaaaaagaaaggatctcctcgatccggcactatacgaagccatcatgggtaagagtgacgccgtactcatgaaggaggctatggcggccgccacggacaagggaaatgatgtcgaacagagaattgtggctttggagaactttgaaatgctcgtcgagcagatcgacaacgccaacaacctcgagttcttgaacttctgggcacccctcatcgagcttttgatcgacccagaggacgaaattcgacaacatgcttgttgggtttgtggaacagccgtgcagaacaacgctcaggctcagaatgctgtatgtgtctagactacgcccacgtttgtgtccaccttctgccctctatctctttcctcactgaccttgttcacatctctgccgatgtctttcttcagtttatgaaactcaaccctctcccaacgttactcgccctgatctccactgttcctgctccatccgacctacacctccctgcacacgtctcaaagagctcacaggctacccgatcaagagccatgtacgctctcagcgggacgctcaagcataatgcctatgccatcggcaggatggacgatcacgaaggttggggttggcaagtcctcaagggaggattaagtggtgcgtttcatttatctgttgatttcttatcgtgctgcagaaactgtgtcgcatttagaaaactgagcgctcccttcttgactcggacaatgctcttcagatccatcaatgacgattcgacgaaagaccgctttcctcctctctactcttctccttctcgtcgctgctcccacatctgaattcaccttaacattccgacctgctcctacgacttccaaccctacgccccgatcaagctcaacagcagtgacgctcgctccaacccaagcgaatgaattccctaccgattcttccaaagccactccttcggttccctcgccatcctacacttctatcctcaaatcattcgaagcacatgggatcccatcagttgttctagattctctccgacaggccgatttcccaagagctggagcagacggggatgaacctcctgcgaacgaagatccggactacaaagaaaaggctggaagggtgttaatatcgctcttggagaagaacggattgaccgaggagctcaaagcagagtttggaacgtattggcttgacgtcaagaaagaacaggggggtgtggagaaggcattcgaggtcggcaaggaagaggctgtagagattgagaagttgttgagtttacaaagatcatagagttgtatctcttgttcttagacaatatcatatagaatgcgccaagcgacgactggctctcttcatagatttggcgagcgccgtgtttcgtcaacgattcgatcacacgcaacagtcaaagaactaaacaggaagagcccattatatcagacaattcattcccccttgcgtcccttcgattttatattttctatcaggaacagttcaagccgacggaaccttgtcttcctctccggccacaggttccggaacagaatcagaagtcggtcccgaagcagaagtagcggcagcggagtctgagaacaccttccactcttctgggaaatctctgatagacactttgcttccgtccggtcgtcgtttctcaagcataaactgtcttgtgaaatgcgtgacgtcgagcggtacatccgcgaacatgtcagattcatcctgatttttaacattcgcgtttggtggaagagaaaggaaaagttggtattgtatgaggttagttcaagaaaagaaccagagaaagaacaaaagagcggaacgtacattggcctccttgaccaatcttcttagcgtatcctcgcaccactttttgttctgcagctgatacctaaacaaatccgacctgatgacaacccaaccgtccacgtcttcgcctttcctatccttcaagccgtgcttgtaagctctgtcgacctccatctctcggacttcatccggggtccaacctcctaccctaggtgcttgttcttcgccaagaacagccggccgtccggttcggctgagatgagaggcttgctcaacatgccggggaacagcaggtagagaatgtcgtcggtttttgagggctggagcactcgtgtttcctagtttaaaatgtcggtttcgatcaaacgcggccggtcgaaatggatgatagaattctggagtagcgaggaggaggaacttgtgtttggcggcaggagatttgaagggaagtttgcaaacaggagccgaaagtgtcacgaccgagctttgaagatgttgatggatgttgagattaattggcgatgttcgtaggtgtgtaagaaagaaacagaggaagaggaagtaaagaaaacaaaagacctacgtctctttgctctcctcctcaaggggccatgtcttttgagtgtggaatcgaacatattcttcctcgacattaggaggctcgaaaggaagcgctaaagaatccaaaagttgagcaaatggccgatcgatcagttcgtcttatcccaaagttgaacagcgtcggcttcaagtttttccataagagctcatcttcaagccgagttgtggcaatcgcacgatgtgttatccaaaagaggactatgtccctcctacggagaagccatctttcgtgacgggagcacgagagaacgagctacgttggaatctcaagatagaaaagaaaagagaaaaaagaacgattctgaacttacgttgaagctttggtaactccaactctactgttctcatgaacgccaacgcgtctctctccttctgaatcatctcgtgacctatcgaagttgtctcgtcatactggaaatcatcaaacaactttgtccttcctttgaagttagatacctcagcagaggcagaagcagcagttgccgccggggaaggactcgtaggaggagcttcggcgtatgatcgggtagctgtgaaagtagatcggaggagagcagaacgagcaagcacaggaatccgtctgacaagcatggttcttgatgtatacgtttgagtagagagacgaaggttggtcagggataatgatttgtcgcaacgtacaacattcggacggggatgggaataaagtgttgatcgtggagtctgtccgactgagtcgattcgaccgaccctatataagcaaccctaacatatgctagttccgtcgcgccttacagcttcgtcttgttcgtctactctccgaatatatttggaatcgtcgatggagaatctttcgtagagcgcacacgtatgacacacagaagagaaaatgaaaagacatatgataagaagagacgaactaggattagagaagataaatgatctaatagattgtttacaaaggtgttctgtccatccgttctaccccgcccctctttcgagcccatggtatctacatgccatcttagtgatttgagagggaagagataaagaagagaaacataggacgattttcttagagacctccgaaaccggacatcgagttcctagactttgttggcccggtttccacactcgtcccacctgatgccgatgttgacgccagagcgttcggtgtcgatgggttaggagacgaaggatatccattgaaaaagtccgtcatggatgctctacaatatcaacaacaagagacatattgtagtaaggtcagaaataacattgatcagcaaacttatcgaaaagccaacagaagaaggaatagagaacaaacttacccgaaagtagctctggaatccccagtcttacacttcccgttttgactatcgacctctgctctgtcctcaccctcctcagtcaggtcctcctcgttgttccctgctactcctcctacccctccgctgaacaatccaagtccggttccatgcgaacttccgtctggagagccagtgtacccatcgtccggccccctatttgactcgagccctccgcctaatggggtactgcctccactcccaggcgtactcaacgagggactcgatggccgagtgttcgaccgtcgggatgccttcctcgcgtgatgtcgccttgaggcaaccgagttcgtgaacaacggaagcaagtatcgctcatccaatgaagtgaaccactcgccatctcggaaaaccatgccttcccggctaccctcttccagaagtgtggtcgactctgcttctccctcacccggcaggggttgaggttgagatccttggttatcaaaatagtcgtatcggttgtcggcctcgtgggggaacatctctccctcctcttcctcatcttcctcctcatcgtctatcaaatcaccatcagatgagtctaaactagtctcgcctcggaagctaggactggctaacaacgcattcgccgtccggggcggagcaccatacagcccagagcttgtccggaacccgttcggcctgattgagctttggccaggaccggtcagaggagagttatagccgctaccattcccaagtccgccaatctcaagatcgttatccgaatcctcatacccgcctgagacgccccgtcgaagacttctgccattggatccggcgaaccgtctggagctagggaaagaagacgaattccgggagcgatcattccacgcgtttcggtttctgctaggaccatagggtgccggaagggccggaccttcttcatccgacgaaccatcggcctcttcaacacctacacggatccccaagacctcaagcatacgagcggtagttcctccaaagataatgaccgtgagtacaacaacgacaaggacggtcgtccgcaatgcattcgcgttctctcctgtgagtcctacagcgagcgccacaccgacggctcctcgaaggccagcccagaacatcatctgtagaacgcgaaggtcaagtctgggtatgagtataacgctttagtagggcccaacacagatcgagtagactgaccatctgataagaatgagggagttcgtcatatcgttgacctctggcatggtaaacccaattgataatctctgatagaggaaaaacagcagcataccttgcggccataactgagatctatatttgaaaacacgagaaaacatggtcggtgaccgttgttcaaataccaatcaagagtatcttacacttacagcagttaccaagatgaatagcggcttaaagacctggacttcttgcgcaaagagtgcgagtcctaagtagataaatataaagttctccgatagttgggctaggacggcgaacatgtacttcgtcgttctttgtgttcgacgggacattgaatgataggcgtaatgcttgagcgtgattccgcagaaaagcaacgataccacccctatgtagtaagaggatacgtctcacgagtcaatattgtcaagaaccagatgagggcgcaggacagtagttgaaaatggacacgtaccagacatgtgcagaccggtgctcatgaaataactcgtgaacgcaactaaagtgactaggcaactctcgatgcccggatagaaccgtagttgagagtgttttagaacaagcgatgtcaagagcccagatgcgactccaagcgccatcgagatgctaaactgaagcaagaagatggccactccgtggaagaacgagctgaagtgaagggtgtctgagtcgctgaattgagagagtgttctatcaagatttacatgagacggatcaatttgtatggtcagtaaagacgccatgacgtaaagaacatggaaatgagagagcctcactcgtaaagtacgatagagaccgcatcattgattaaactctctccgaagatgatcgagtatagcttgggatcgactttgtacgagttgaagatcgataagatagtgacggggtccgttgccgagagcgttgatccgaaaatcagacactcgagcaatgtgagcttcacgttttctagaccggtgaaggaccataggtaaacaagaacactggaaaggagagtatgtagaaaataagttcgagttgatgcgagagtcgcgaagacgaggggatataattaccctaagccgacctggggagatatacggcatggagagttcagcaacagtcatgatagcgcttcccttggtgtattagcaaaatggacgaacagcacttatgaatgttccggcaaacgcgaaagttaggataaccccaaagtttcgaaagaagttgtcctgatcacgtccgacagaacgaaaatgtgatgagttgaggaaatccagacggcatcacatataacgaaacgcgtatacctgcttgagttcataacccgagttcagaataatggggggaaggagcacattgaagaacagggtatgcttgaaagcctgtttgttgtattcaaacaagagggagcagttagccctccatatcgatgctatcccgtcccgtcccgtcaacgtctcaaagccggccgactcaccagcatctcacggatcatgtgtcctggtgatagcttgaggactaagcctacaaccatacctacgtatcagaaggatttgatatcatggtcagctctctgaccatcagccgtctacaactgtgagacgaagaacgcccgaagtgtagcgttgtgccatgtcacctatagacacagtgtgttcaagtttgaacgctatgcggtatctttcgagaagaaaacatacctgcgaagatagagatcacagtctcatgaatggctctgatcttgcgaacttgaaggtagtatgaagtccagagtgctccgataagaagaaagcagaggatggtgagcgcccaggtggaatatgtctcttcctcctcaggcgtcgggtttgctatgacactggacgacattcgggacagctagagataacgagcgatgatcggagaaagctgaagacttcctcaggaggtgaaaaccaacagtggatatgctctccttgtctgtctataggcgtgtgtttgtatcctgagagacccaagatggggagatctactacggagaggagaccgaaagggagatggatggtctgattgggatggtgaacgaatcgaacgggcgaatttcgtcaaacgtgtccctgcctcactttcagcgcatacacaccaacaccttattcgatttgcggtccctacatcatcagttttgatctcaaaggcctttctatagattcagatggatgaggacgagcagctggcacagtaagtgctcgtagatgtgtgtttcgaggataccagcatgttgagctgaccgtcgtctggtatttcctgttgtctagtgcgatcaacatgtctttgaccggaacccagcccggtcgtacggatgacaacgaagaagacgactcggtgatttatctttcagatacggatcttccagcccaagtacgacactctagaactgtgcaaactactgccagagagaccgacgatgtcattgatctaacttcagatttgtcagacgatataagtcctgaaggttgatgtgacttcttataaagagtatacagacatctcaatactcgtcctgaccgtcgatttctttcccaatctcttgaatctgattacacagtagataccacatatacatcgaacagcgatgcattttttgaacctgagatggatgccgaactcaatttgtcagtcgactccttatcatccgggaacaatctatccgggattgctcactgctcactccttctttcactctccaaagcgcaatgaagttgtcgaaggaggccgaggaactcgaacaaagagttagaaaatccagacctcagacagaggaagaggaagcacaggctcttcggatgtacgtgtcaaactattattttcgcttcaaccgctttctgacttatccttctcaccactctccattcattgctcatcagagccatacaagcgtctctgattgaaaatcgtacgcgctcagagaaaccagagtcttccaacttgaaacgcccgcgccgatcaagttcagtcttcgaaacgtcttccagtccctcccgtgcagattgttctgcctcggatgttgacgactcgcgcctgctgtctcagcgcaagagggaggaacaagaagagagaagacgtgccgttttaatcgcacgaagtaagaaaagaggcagctttggagagttaacccctgcttctgtgacaacaccccacgcagccagtacttcgatggccaaagattctctcttttatagcgatcctgatgatgaacaagaggaggctggcaggagagaagatgccattagtcttgtttcaaatccccaattaacggtcagggcaataccactggttggagcgcagaaggcgctcgagaggacatccagcactagtttcgaaggaaggaataaagacgaggcgagctctaaaccgcgaaccaatccccagagcttgtctataccatctcgggctcagatggaagccgagcggctggccagggctcaggctaggcaatcctcttcttctggttttaattcttcaccaaaacctgttccctatgaagttcatccacctacacccgctcctaaatcaacgagcaactatatcattagcgcaacagccacctcgttcgaagcaccccggaagaaacccagagtagatccagccctgcaagcaactattcaacagcgctcgggtgaattgtattggcagggtgttttaggggtgactccaaatgtatatgctaaagaagcaaaaggcaaaagcaaggtctttagcccgaatgatgtaattggggatgtaagtaccttttctagggtcgaatagtaccttcagagccctcaggtttcgttctgactatggatggaaaaatctgtttttgatctagaaaaaccaaatcgcgttctcgttagtcagactgacacctccttcaatcatgtctcttcagacatatcgctaatcatctcgatctgaatctatagtatattgtctacgtactgctttgacccaaattttttacctgatcactttcctcacccaagtgaagctcccatcatcttggtctctccaccaccagcggttgagttagcagggaagagtagttatgatcagctgattgagggagtctggagttgttttccttatctgccaaaatcattctcgtacgttggtcctcatgtcctcttctgatgtcaagaagcggtcgtaagctggcagaacgacatcagctgactttctctcttgtttctttcttcggtacctcttcgattatcaagacccaactttggattgtttatgggggcctgtcatatgaaggtgcgtacattctaccataacgcttgatggttatgacattcgcaggctctaatgacccagctctcattctatctcatcccttctggtctgcttggacagttcatgctggtcagcgtttgcattcccctcaacaccctttcttctacacttgagtgctaactatcatctatcaattttcgatactcttagctgttctacaaggatggacggatgagaacagtcatcactagcgcgaattttatgggattcgattgggagagtattgagaacgtgagccctcatgtagttcctatgctctctcctgtcaatcaacttagatcagacttttgcaatcatagggcgtttggatgcaagatttcatgcctcttccggatggaccgccccaggatacagaccgatccgatttcggccagcaatgggagtttgttctacaagtatgtccccgacaatttatcttgtgacccgttcatatacatcgaggtatatttaatctttttctagtccctgggagttgataaaacgttagatatgatgtctaagatgcatcttaaaatccccataacccaactgtcgcacatacatcggtataacttcgggaaagtgactattcgattggtagcctccgttcgaggaactcgtaccggcaagtatctcatatcacatcttatgattgttctgtgctcgtagactcaataccacctcaatcttacacctaggctggaacgaggtcgaaaaggcaggagtggctcgactgggaaaaatcatccgtgaggaacgctggattgcaagagatgaatacaaattaccgtgtttggaagcacaggtaagtgtctataatagctaaaaaatgttgtggttgccaagatggactggctaacaagttatacttcgtgaaccatgattcgcactgtaggggtcttcagtagcggctgctactcctcgtgagaaccctttgttgatcttactttccggtagaaacgagccctggtctcatgaagtcatatgttttatcacctttgacgatattcaggttggctgaccgacttttggagactctcggacgggttggatccaagagattggttagttgctagatcgacaatcaagacatacccacctatcaagataagtgagtatataaccagagaattgactaaatggaagacctgtcctcaatttgcgctcactctctatatcaatactcggttcgacgtgatcaatcatcgggcgtgctccgaagtatatcgtaagtggaattcaatttcatcatcagtcagtcgcctgatcaagatactcacttgtgaatcggcggatctcgtcttttctggatacagcatctctggctacggtaaaagcttccgagatgagcacgcaaggagggtaggctctcacagtttatatatatataggaccgaacctgacatgggagcctcacttactttcccaaatgtgattgaactggaactttgaagagggaccatgtttttcaccaggaaaaactgggtacctggcatccagccgctgtttcatgacgccaattcgaagagagcaagagtcatgatgcacatcaaagttcgaccgtctctccatacccacgaccctgtacatcgtctagtaatgtatcgctgacatggaccaaacttctctgtttccttgatatcggcatcttatcatgattcagatgttgctagcagtttttgaaaaagttccccaaaggctgagctcttctgtctcgacgaacaggccatcttcaatgaatgataagcgatccgtagcggcttcagcagctctatctcggcatgtgaagcagaagatagacgtgattgaagagtcagagacggaggacgaggatgagggcgaggatgtgggctccatcaaacagaccggaaagactttgcggcaggtaggcggttggatgtatatgggtttgttcatctctcttcattccgaagcacaagtactcttgacgtgggacactaaattttgttcatcctctggcgcacgaattgcgctttatagggagtcataactttactcagtcagcttggggaaatctgagtatgaaaaaggacgtcggtccgtcgatgtctgtgagtcatctctcttgaagagaactctccatgcttttccatcgaatagcattctgttggcgcgttgaacgtggatttgacttcaatacatcttcatcacagcttatgaattatgaactaggcatagtatttgtgcgttatcattcttttcctgattttgtatcccttcatgtccttgagactaaacaatttttgtgaattcatgctgtgatactctgaacatcggatagcctctgccacttgagaaagctgaggagaccgcttcggcgcttgctacctggaagagacctccgagaaaatacttgccatctgacattccctgggtgggttcttgtggtcaacatcaagtgcattcgctctgtcatatctcatcctgatcatctgttcttgtcgtttctgtttcaacactagatccaaagcgaggccgatatgtgatagtttatacactgtatctagaatctaatgtactatgaaacatccttaatcaaatatacgattttaaaatctatgtattcaaatattaagtctccaatga

SEQ ID NO: 3045 - DNA, 19968 bp, Xanthophyllomyces dendrorhous
ggcttcagagcctgctccccttcagccatgcaatctgctctctttaacaaggttagctcaaagggctaatccagcctcagtgcagctcatggttcctgctgacaaggttttcggtgctttgaacttttttctctgacttttctatctgtcttctggctcgactttttctataataggctggcccgttagccgtcggctcgactcttgctctcaccggaggtttcgtctacaatcagcagcggaagccacttctcatggacgagtatcgtaggcgagaaaaggtacgtctaggctttcacagtcaggttctcattgggggcgtggatgagacaagaagagagaaaggctgcatggcagaaagatcactgacgtgactgattcaactacttctatgataaaaaaccatgcagcttccgatatatcctcagcctcagccagagatcatccttgtcgacaccttttctcctcttcaggctcatattgcggttggtagagaagctacgacatcagtcattcaaaacatccgggatgaatcccaaaaggttgtcgctaaatgggtggccattgagcgaagggttgctagttagtctgatctttgcatctctacatccttgcagtcgaatacatggttgaccactcttcctgcccttctcttctgtctctttctcagacaaagtaaaggcgacgatcccagaggacgagcctttgactcctgggattgcctgggtgggtgtgtctaccctcgctggttccatcattgctcgaaacagtcagtttttttccaacctcctgatcacgcatatctcatctatacactcgaaataacaggaagaaaacgcgtctctcttctctgttcgtaggaaacatccttgtccgagctcttctccctccaactctccttgttgcctctctgcccgtcttccttcccaagctttcagaaaacttatcgtccgaaatttctcgatacaccctcaagacttctcctgaacttcatcgtgaggtttctcaggctcgagccaagctattcggtctgactgagcaaagccgagaggcctggatatctggcaagcagaagctgactgacagtgtcacccaaggtgttgactttgttgatagcaaaactggacttcagttctctcagactcttcgaaacaattcatcagcttcttcatcccctatcggtgaagagagatctcagatctaccagcccccggtgtacactgtttccaagacacccgttcgagatgctgtggtggccattccgtcaaactctgcgccgttgacccaggtgtctgacgtattggatgtgcctgtttaccaagttgttaccacgaccactcctaactctatcactactaccagctccaactttgcctccactcctgtggcccctgctcatttgtcgactcaggagcaggttgactcggccgccgcgtccactttggcttacctcgaggagaaggccaaggagggtcttgcttcccttcaaaagcaagaggccaaagcggagaccgctgctcgacagaccgcacatgagggtcacgttcaggcgaacgcccttcgggctaaagcacaggaaatcgttcgtgatgctcgatccaacgccgaggagggtgttcagaccgctcaagcaaaggttggagaaggtatcgaggtcgcccgagcaaaggctgaagagggcaaggcttctctcgaacagctcaaaaaggaggccgtcgaggctctggctgacgtgagcgagaagacgaaggagcaggttcaggccgccaagggcaagttcgaggaggtccaggcagaaagagcggcggagcaggagaagcaggtcattctcgaaccgttacgtgcgcacggagtggagcaccccaagttgcccagtggtttcaagaagctcatctagaggaacccctttcttgggttggacgaagacgatatttgtattgagaatggatgatgctatgattttctttattccaatctggtcccacatcaacttagcttgctcgcatatcgatagttatggcagttccttctttcggcgttgtatcaaatcaagagagcagacatttgtacagacgaaagacagatgaggtgtttagacgacaatcaaggagaaaaaagaagacaaagatgtttcgccatcaaacgtcatatctacgtctcgacaagggaacacccgccttacatcctatccatatccatccatccgtcgcgaaattgtccaacttacgagttctcaactttctgtctcgatggcttctcttcttcaccgaatgcgaccagatgactctggtgtcatctatcgaggtcaccgaagagagtccttcatgccgttagatcaagcggaacaggtcgagctacgagctcgtcaaagaacgtttgaaggagcttggacaaggtctatcccctgcatatctcaacctggcttgcttagtctctgattttctttaaccgatgtcagagtgatagttctagtcgtatatgaacttacatgattctcaattcctttggcggccttgcagaaccgcgttggtcaacctgggctatggagcggtcgtattaaaagtattcgaccggcgatttctatccagtctgtcctctttacctcgtctcgttctattagattgcactttctaaatgaatctcgctcatcggatgatgtgatgcgcttctgcccagttggcttgctgtatacaacactttcgatcgtcttgattatcgtagcagtccatcgaggaaggcagagtaacaagtcgttttctgataagtttccccacaggtacggggctcttttattgggaaaagagagacgagatctctcttgaaaatcttgcctgactaagggaactgacgaagaaggactgtgtctgatgaccaggtatgatggagagacactagacgcatcgcaagtcttggtaccaaccgaggagccatctcctataacccatcaaataccaagcgttatcaccgatgccatccctgttctttctcctgaaccattttccgacccagatacatcccggacaccgacaccggtgggtactccaccagggatgtcatctcagacgctcactcgtcctctgttatccggaagacagtccagaggaggattcttcaaggatgcagacagcagtgatgctgcgcaaaacgctcaacagacacgacagaagctagatcagcagaaacgagtatttggagcaccgttcgtcactgcagggggagcggtcttgctattcgtgagtaaaggtttttctcagtatcttgttcgctttgagagatttctttcaactgccaaggtgtactcgaccgtgaagtcattctttctcatctctgtaaaattatcgcgttcatccgcctgatcccgttttctgttactatcgggttgccgtgttaaatctcacagagctctctagtctgtggcatggagatcgcattgtttgtgcttatcatgaagttttaggcgttgacgacagtcctctaaaacaaaaccttaagaaacatatttgtaccaactgctcttcgtgttcgagaataacatatctgataatatcgtcaaatgttcataaatcaatcatctctggcacagtcgggcgttgttggagtatcatcacatcgcaagggagtatctacctccacaaaacacacagcacactgcagccttgagcaactcctccaacagccaggcttcatcagtctccgatattggcctcgacctgtttgcatttccagtcaaatcatctggaggcttatcacagtcctctctatcttggcattcatttgtatgctccatctcggtttcttgatctgtcagagtcggctcgttgtcggcctcatcattctcgtcttcctccttgacctcctttccgttctcctcttcgctgtcttcgtcaatcctttttttcattctttgaccgccagtctcgctgttgtgagaaacaccattggcggatatttcctgcacaacagagccttcaacgttgaattctgggagaactgcaaggggtagggatgaaggaatctgcgtgtccatttcggactcaggcgtgggagtcaactctgaagacaactgccttgaccggtcttgatatgtaacacgtggcgggggtgatgaggcaggtggcggtgtcagttcagatgtcggtgggatcgacgaaggggacttctgcagatgtggtagatgtgcaggaccaatcgagggccggagggcttgtctagatgtcgaactaagaccaggaatcgatatagggatgtcaagagaggttgaaatggcaggagttgcttcatctactgaagcggaattgaaaattggggctgcgtctggattcggagttgaaggagaaagggtagcagcgcgggtgggagaggaaatcgatgagtagatgttaggaggcgaatgttgatgaacactgttgacagtgatatcgttgccatcttcttcctgacgagatagcgatccatcagtgattatcaactccgtccgcccttgctcctctcggggcttatttttgagcggtgatcttggccttgtaggtacgcgtaatttctttcgacgagatggtaatctggaaggtggcagaagtgttgggcgggtacagttgatacatctccggactcgagggtcgacgagcagtctcaaagtgactgaacagcgacctgaatgtactcggacatatgtcacggcacagctatcagcatatggcgtaggaaatgaaactgaagacaggtataggttgctcaccccaaacatgcccctgctcacaaatagcctcttcggtatcgttgaataatatcttcgctccacaggccggacaaacttctttctcgtctgcacaatcgctgagtcgagtactgttcctagtagcctgtcgaatctgttggtcttcttccgactcttcgggtccttcttgttctacattctgccttctgtctatagctccatcggtcatagctgactcgagcctttccagatcgacctgaatatcagtttcgaaaaaaacggccagatcgaaggctaagccagtgatatgcatgagttcggcagacgaagggcctatagacaaattgagagcagtcgaagatgttggcacatgtatgcacaacgataagaatgcgtggatcaatcggttgatgagagctttgtcctcggctaatggaattaccacgtttcgcgtttcagatcagcaatagttttcttgccagacaagagaacgctgtgaagcgcgaggacaaacctgaatcaacaaactcctttactctgtcgacccactcaaggatcacacgtagagattctcgaagaatcaaccgagccagtttctgtcggtgaaagacagatgatggatcttttgatcgggcttgcgactgtacctttcgagtcaaaattcaatatgagattcatcatgacgcaatcttgtcgaactaggagtgaaaactcaaacatagcgaacgtaacacataatgaggcgaggaatacaaacttaccgacaggaatgtagcaagcgctacttttgaccgtaatcttcctatgttctcatctgcccaaaggtcatctttcaaaccctccctgaaccaatgcctgatatagtctccgtcttgaggatacttctcagaagatgatggtcgcatgaatgttgaaggaagttttatcaagtgatgtatcaatcgagagtaatacgtttgtgctgaggcggaaggagacatgagttgaaggataaacggcaagagttcagacgagggagaagtgatagccgctgcaaaggatgaaacaagaagtgactagacatcagcacacgaagtggagcatgcttgaagaacgaagaaagtacggaccgttatcatgtttattgttgaggagcaactccaactcgctgaagaacatttgttccggtaattgattggtgatgggtaatcgatatatcgagaacgtattatagactcgataagacatagtatatgtcatatcataagggtagaaagggctagaagaggtaacataatcaacgaattagtactcaagagcttgcaatgaaagtttttctgagaaagactgacgaatagatcgaagcccaaaacccatttcccagatatgaaacacccgatgtcctcataactacatctcttagctcctcgactgtctcagacccgaacgcttcggatttttcaaacatcgtgcggacagatcgagagagctcggctgacaagctataatcatatataggctcagcagtatcgagttgactgatgagttggtgtgatccatccgtgagcgaaaacacaatggacgttggagtcggtcgactgactcctgtgcaaatccatgagcaggaaaattcaaacgggcgttgattttagtgatggacaaccaagtgcaaagaacgaattccaaaaagcaggcatcgaagtacgaaccacagcagttgcccagttttgtgcttccagcccatctacctgctctacacgttttccagcgtttcgttccttcccagcctatccacccatctctgacactttcgctccagacgtagagccatccaaccttagcccaagccagtaaggaactatttgaatcaccatttgatcgattcgtccagactaaagctgaggctggtctctggtcaggcgggaaaagttgtttgggctcgcttattgataaggagagtgatgttgtgcttgatatattttgagtgacaagcaaataatgaatcgagcccgatgggtcggtataggcaagttttgcatgagctaggatgaagcacacaagaagaaatgagtccaccgatcaggtagttaggctgttgaggaaaaagcgaacatactggcataaggcgactctgaggaccattcactccacgtcagggatgaaatccactgcttagatacacgaatcttgcggacaagggagagtgttccatcaaatgcatgtctaaatccatggtcaatgtgataaaacaaagtgctttagtgaaaagaagatagatggaaaacgaccgattacgcacaaccaaaaagtgatacatcctcctttatggcccagagccagcaaactgccatcggaaaagaaagatcttttgccctctgcattcaagggaaaaacgacctgtttagaccattccaagcctgatccgataataatctatatcaacatgattgcgcaaaagactcatggaagaaggtgtttgagagccgtacaggtcgtctgggcgtctagtactcgttgaacttccatatcgagcttttcgatgtttgtttctaattgcataattgcctctcgtggatagtcggacgcgtccagtagcttaggtacaagcgtatcaatctgaaaaaggacgcgacgtaagtaaatgcaaaaggacaagctatggccctaaaacgacgcgacttacaggttgccacaagcctaaaacaggatccttgggaggtgagaatacaaacacatcaagattcgtggtcaggccgacaagaacacagctgagcatgcaaggattaagatgagacgtttgtcagaatgtaagagcagataggtatagacagtaatgggaaaacgaaccctcctaacgagctaagtccagagggagaccaacaagccattctccaggaaatctcatttgatctggtttgtgtaccgaagttgagaactctgtaatctacagcaacgacataagaacaccgaagacgattgaacctcgacgacgggtgcgactgcaatattcaaatgacttacctgcactttcgtcctcttcccaacgtgacagaaagtctccagggactgaaatattgttgatcaagcattttaccacactgggaggttcaggaatcctaggcagggtagattcgcctccctcttccgctttgtttgcagcagaatctaaggtacggtctacagaccaggcgaagttgtgcttcgtatctagcaccctctgatcaactagagataaaccagtcgaaaacgtaggatccggagtctatgaagccggtttcaagtcaggcgaagcatccaattcaaaagagctgatgaaaagacgcgtacgactatgataagatctctagatcctattacaagaaattgcccgtcttgagatctttgcaaagatcgaggggtatccgaaggacacgcagcttgtagtcgatacgtgaccgaaggttgagcagaggccatcacaccgtttgcttgatgaattgtttttgaacggagaacagaaaaacgcgttatcaaggatacatgagtctacctgagaaagctatcccagaacgatggtgatgatgctgatgaagactattgttgaagttttgaaacgcagcggtaagctttaatagagagtttagaatttcggtttccgctcttatccatccatccacccatcccaccacctattcgtccaacaactcatttctttcttttgtaaatacagccaacaatatagaggtcgttcaatccagattcttggatacagattgtattgtctatattctatcaagatcgaataggctttgcctcagaggttgaagtgtcgtcggccttctccttacctcaaaattcaccatgcttgcggatttgattgattttctaatccaagaaatagggatgagtggccctcttggtacgtgcttattcaattgaatctctcttagcaggagatggctgtgcattgccttctcatcaggcctatgtaagactgttggagacgcaaatgatctggggttctactttaaagaagtagcagacttaaatgccggtgttgtttatatggctgcttcagttcagcttcattctcttgctttcctacaataaccaaggttgatgtcatccagtgatttcgggatagatgattgactgccttgtgatcaacctgaaacaaattttgttacaaaaccgatgtttttaggtattcatccggattccatcatagacttggctaaactgcactatactcagcaggccaaatccacctctcacgatccctcgttgtcatccgggaaatcccctcagaaactcgatgcagcctttctatcgtatctgtgggatgttttgattgaacaggacgatgttcgcgttggacgggaagagtcattttcgccggatggagttgaaattcaaaggacatccgaagatctgcccagcagaggaaagaagcgagcagtaggattgaggcgaagagcgcttgaggatgagagagaagagggtcaagaagaggatcaagaatatgagaatgaggaaaaggttctcagaaatcgacggacgagagcggataagtctgatactcccgtagccgtgcgcgccgctctggttgatttggacgaggaagagcttttttccagtgacctatgggatctgaagaaggaccatggggcgaagctcagaatagcactgtctgaggacaaggcatacttcatcatgacaggcacccatcgaggggtatgtaatcttcaaaagcttattttcggtgcgttcatctaatgcattgctaacggtcctatcctcaattgttttcttcgtctcgattgtttttagaaacttgcgcttggagatcaaatgtatcaggctcttactttaatctcgcagtcgaaaactcagggaattactactatatctcttacggatgtgatgggtcttgacccaaaaaccattcactatttcactaagagtttgcttagctggaatctaatgtaagcttgcttaacttctcccaatttatctgctaccccgaagacaccaattttagagtgacttcttcctcttacaacaatttattcttttgttctttgattgaaagatcaaaatttcaagcctacgctcatggaactcataccgccatccactttcattcgcgctacaccacccagagtgccgaatatctaactcttcgagggactgcctccgctgcagccgctgccacctctttgatttctgcaacagatgtcgtttcagatccaaaaaatgctgacaccgatagcgcgcagcaacctctcgccgacgaactaggggaacttccacaaactatgttcagctatttggatgtcgttcagcatcgaatccttcacgtactagcgagaaattcacaaggaatagcaagaagagaaacgctacttagggatatcgtaagcttctcatacttattcgatccgcatttctatatgtattcaagtcattgcaatctactccctacagggatataaaggagtggttggccgacaacagcagcgtatgcttgctcgctgtatacgtcatattgtcactcggggcgaaatccgacgtgtttaccttcgaaactcgaacccagaaggtaaatttgcgtccctagagcgaggatttcaacttatcaaaaaagctgagaagaatggggagggttccgaagatgtgatgagtgatcatgaggaagaagaagaagacgaagagatgggtgacaccatatcagaagaggacgagaacgcgctggtagctgccattgtcgatggatcggaaccaaatttgatcgttcaggacagtgccgttacagatagtgagttcttgatataagcccgtccaaaacatattttcaagatgaagttgtggcgcatgttcaggctattctcacctccaataccaatgccggcatttttcacgcgtcatcgcttctctacaggaccagcagtcgaggacatacgtaaatttgcttctcccaaacgcttcgaacctatgaacaagatggagccgtccaccagtatcgagtatcagatcatgcgaatgcttcaagtcgctggtgctacaggggttacgtgccaggtatgctctttatgtccctgtatttgacttgttgttcacttcgatatggttttgctgaccttcatctcgagtccctctttctccacattgaatcatgatattagtccatcactcatgaactcaaggttgatcgtaaatttgttgatcatttcctcgaacgattcgccaagcagcctgttcctcccaatctctcccatcgcggtcttgtttcccttgcagatgttttgggaaaagaaaagttaatttacgcattcgacacggaaggctatcttttgcaatgtaaggagcacggatttaccccagacgcgcatgcgtttcctgcacctgatcccgtgcgtgctcgcgggttcttggatcttactccgtacgaattttatgtgtcaaagagtcagcatatcgcgtggaatagttctttcactcaagggcactttggtccgatgatcctccgaatgcctgttcttgcattcttcaacccttgcatcccacctgaagtaatctatatcgaggacgaccaggacgaacggaaaccagtgacgcgtgctaggcaaaagtcttcaggtagaacttccatagtcgctaacagtcctcccaacatctttgtccgtccgaaaaccaaaggatctgggcagcagtacaagcgtgggatcgggaaaagcacttatgcgcagttgcagagaatagctatgggagtagagccattacccatgtcaggctcggaacggagaaggatcattggacgcgctgagtctgaaggagtagacatctcaaaggctgtagctaactggcatcaagcacgtagaggagcaatagcggcacctgatagtgaataccaatcgagctcaagaccgcgtcaatcaaccattcatcgtactactgaggccactcctactgcttcccctgcggtcaggcgaggacgtcctccaaaagccaaatcagaagcctttcaagacctgtctgatatctgtgttacaatgacacctagttcaacaccaactgcacccaggaagcggggccgtaagaagtctttcttggctgctgacgacaatgccgccttgtcagctatgacttccacgccgacactgccaaaacgccggggcagaccaccactgaaagcaaaatcgcataccaccccctctgaaagtccttccgttgaaactccgcaaggctctgtagatgatctcctgattgtcaaccatccctcgccgagtacagtttcgacgagtgtattggtagacgaggggtgtactcctgcttatcgacctcgaaagcgggcacgcttttcagggacggccaatctcaaagttaatcttgagggtactcctaagtcagctcagaaaccatcatccgtcctcatcaacgatctcgaatctcccctttcttccatcgatagtttcacatccacacctcagtcatcacgtcctcttcgaaaatccagtcgcttgtcggctttaccggctgcttctgaagctctcaatcattcttcagtggcgcatccaactgcgtcacctctaccgaccaaggaagtgctagaatctaccccatcggcgactgcattgaatggtgtcgtttcgtcgcattgctccaacaaagccggaatttacgacccagataccaatttgaaatccggttctatcaatacctcaatatcagttggcccactcaagaggagatcgagtgctcctagaacgagcttgcatggccctagccatgctcagaccaaacgtgacaagttttttgtggactggattgagagtctgggaggagtgcacgacataagctctaattctcctctacaccttcagcgatacctggaaaccgctatcgctaatgcttctgcaaagggagtccatctacgactcaacgctactactatgattgacaagaagacttggtctgcttccctagaacgtctcgtcaacaaaaatgttctcaagacacgtactgtagcggtagaggtcaatggctcaatgttgaccatcaagtttgtcttcttgactgatacgccagaaaccaaaatccaagaagaaattcgacgacttgcatctttagcagaggcccgtggtaaaaaggttcttgcttccaaggtcgctgatcagaggaccgctgctcaaagatctcgcccgaaaggtgtcgttgaggctgatatgggcccacagcctctaacagaacgggaacgattgtaccgggctacaatggtgacgatggaaaaagaagctgaagagaaacgagcattctttgccggcaaagcagcccagaagcgcatccagcttggcgatgattggctagcattagctaaaaaacatctcacgagaatgtcggtcacattaactcctactctcgagctcaacatccgggccgtccagcagctggagttagcccaacggtctggagggcgattggatgaaactcatatagcatctttggtacaagagctcttggatcttcctgagggtgatagacctttgccccaggaaacaccgatggggcgacaaaagaaagggactcgtgtcagacgacccaaaatctccgatgtgtatgacagggtgaacgagcttcaacacgataatctctccgagattatggacattcctttctttttacccgtaactgaggaagacgatgatctgattcctgctagtcttagaggacctccagaggagtcaggtaagatattttgacgctgttcgtatcttctacatgtctagtttattgatatccaaattatatcgtccgatcaaattgccagatcctttaggtcctcgtcgtcgaactcgatttacagatgaattagacgatatgattatggatcttggggcaatccttgagactcgaggtcgtgaacacggcttcatgttcacctggaaaccagctaccaaggtcattaccagccttaaccataatattctgcgacaccgttactcggtactccgtgagcgcctagggaagaagacctatatcaatgggttatctgaggcctactcaaggctctggaaggctcatcgaggaactatcaatctaccagaacccgcaggggcaaggtcaaccgagtttgatattgttcatcatgtgaagttcttccgaaaaaacacccaaaaaaaccatctgtatgttttctatcccgtcctggcgtttgactggtttgtttcttatcatcatttgactgttccacaggctcaactcaattgtagaaggccaacttgccgtaactcctactaccgtctccattgttccacctcttccgagcaaagtatctggtttaaaagattggaaatttacctcacctgagcctgagagcaaccattggaattggcttctcgaactcagtgctgcagtcacagctgagtttgcagaaaagaagacgttggaggcgccgttcgccatagagcctctcatatcttcgaaaaaagatttgccggttatatcacggttctcgcgcgagcagggtgtgatcgggtctactatcaaagtacgtcttttgtcactcccgtacactgtgcggcgtttttgaaacgctgtttatgaatgtatttttttaaatttttttttgcttacccttctcaaccatattctctatctaccagatgatcgtgaaccccactactcgaacttcagatcctgatattgctgaaaaaatacttcctcaaacccctcttgtcgacactgtacatgcctcattaatgagaagtggagtgatatccaagattgggaagagcaaagctcctcctactcgatttttcgagataagcgaagggtgcgtttttatatatatatatacacgatttgtctcatgagtgtactccttatgaatcattcatctgataatcgttgttatcgatccttcaaactctagattcatgaagcagagcgagggtccctatgagccaacattcttcgatgaagccggaggcgttcacaatccaaaaaaagatgacaccttgcttttagaagaagaacactcaatttggcctctggttgcatctgaaggagcaactgcaaaactaatcaacatggtttctgacaatagggtttgtcctgattttcatcgattgatagctaacctgatatgtggcttatcaatattgaaataatttcttgatatggactgggtgtgtgtcgctaatttgacttcttcactacattggtcatcaggtggaatttattgtggaccgcgaagagatggaaaatcttgcgggccgaggaatgatagacactaaaaaacttggtgggagcatttcattctcggacttcacacccaaatctgttgacttacatcataattttgggcaacgtagatgacgaggaccttgaatttcatacttatgtccgcatcacccagccagcacaaccggtcaatcttcacacagacatctaccttgctaatccttcgtcagacctcaggcctgcgcacatcgatcctgagaggagaaagcaggccttgataacgcttcaacattctggagcaggggaatgggtggagcccttcgaggaggggttgatgcgggctgggaaggatggactgacatgggaagaattaattgtttgtgctctgccactttctctttgcacttttttacacttaagaactgataacgcatccattgttttttccaggacttgacaagctcttctccagtctccaatattctccattttgcgcattgcttctgcgagacgacaccttcgctatccttctgggctggctatgatgaagcccgtctcgtttcctcggcgttcttctctgattggtcagtcgaaataccgaaggacaatgaacttgtgtacccacggaagtgggtggactttcagggcaagattcttcagaaagaatgggaaaagaacgtgagatgtgtagttgggacgttgatgcatcggccatatgtcaacgaggtaagtcaacggattctttacttgtgttcgtcatcacttgtgatgcagtacatcttgactagtgccacacctttgttgaacgcgacctactacctcccaatctgaactcgcagtggctccttcggaaagtgctcgaccctatccttgatcgaccagaactcaatgatatcctcaggcatcttttcaagagaggatgggctcgacgagtcacgttccatgaggcaacccagctggcacatatctgttcagtcaagcctattggatggctgagtcgggaagaggagaagtgggtagggtggtgtctgatcggggaggattggttggaaaacgccggcactgggataggacaggttcgtcgtataaatgaggttgtgtaggttgtcctatgcgagatgaagcgcatagcacaattttttatccagatctttccgttgtctgctctgtattttcgaacatctttctaccacacattgtaccaacatcatcattctttattcttcgatcaattttcttgtcttaagttattcacctatcattttcttacatctgcgaaatagtcaactttgtgattcaatatttcgacatgcattcgataagctgcctatagactatcgccatgatcaaacaccccaaatgtaccattcagaaaagtttgtttcaaccaaagacgtacagacatccactccttcatcttgcaaacatcgtaccaaaaaaaagacatgagataacccgacgcgggactcgaacccgcagccttcagattagaagtctgacgccctaccattgagctagccaggctgttgatggcagtctgcgactagtgtaacctagtatgttcttgtggttgagcatcttggctgaagaatattactgaaataaaagggtgaaaatggacttttcgttctggcacttgttcccaatcaagtcctcactggtttcccaaaccatatacacaccacccaggtgtttcagtaaaatggattgagaaaccaggaaaacagaagggaaacccgctagaaaatttatagctcttcggaaagagagccttgggactccgcgcaaatagaggcaggcagatgatgtctcaagaagagattacaaataacagatgaaattatgtcaagactgctgaaactccaacattagctttgaatgtgggtttcaagcagtctttgttgtgtttcaagccgttcatgtcgagggtttgtagtatatgttgaggttttgcggcctgcgttgaatgtgatgttgaacgtgacgatctgtatatacactgtagctttcgtcgtctaggtaaccagtggaggacatgacgttattcttttgcctcttccatccgttctacctctcctatcttcctgagcctcttattctttctcgttctcatgatctcgtgtgcacagtagcagatcgtttctgactctggttctgggtctgatacagggaatcagttggtcaaggagggtcagacattgagaggattggagctgcgtccaagtggccacttccgaatgaactagcacaaaaagctctcaatttttccaattggtgctcgttcgttttgaaagattgtttataatgaatcataggcgttcttacgcgccgatgtatttggcagtggccatttggacgcgattctaatagactccatctgccgacgcgtctgaaaatccacaatctttagtccgtaaagttagacccgctcaacgaccctgccacctctttccttgtctctcctcaatccaaccttagacgcctacatgtcttcaagtttggccaaccaattgtagtcggctctcaacctgtccatcgtctcctgatcagatcaacccaacttgcctctcttggtaaagtctcatctatggctgacaagccaatccgaatgcacttcctaaacagaactcatattacgtccgaatcggagacgacaacaaagaggacgaattgcaaaggactcacaattcgaacttcgatacctgtatctacggccttgaaaactaaacattcgataacagctcagagcaacacagatccattaccttcacccttcctttcccataccctttccactgaaggcagctccttactcgtgtctggtcctcgtctatcgtcgacatctccaagctcaccatcgcctgaatcatattcacaatcctcggatgaaactgcttttacagcatttgttgtttcgaccatcatctcctcgttcctatatcttggcccggaaccatcatcggttcaggatgtggaggagctgaagaagataggggtccgtcgtgtattaaatatggctgtggaatgcgaagatgggtttggaatgaaagacaagtttgaggtttaccgtaaacttggaataagagatactgtggaggaacaggtagttgcacaagatctgaacgatgcgtgcgcttacataggttcggattcaccagactgtcaatcgtatgtctctggtcatgaatcattgaccacttctttctgcttacttgtctttcaattcagacgatgccctcctacacggatgtccaatttacattcactgccgtgccggaagatctcgctcggttatggttgtactcgcatatcttatccgacattatcgctggccgctcaagacggcgtacgcgtatgttctcgaacgaagaagaggaatatcacccaatatcggattcatggctgagctcatggcatttgaggagaacgaacttgttaactcagcaccgaccatgaacaaatcagtgaacaaggtataggaaccgggactggatggataaatacatcacaccaccgagcggtcagacaaagagtccatcaacgggattagaggtcaatcccatagacctattgtcccataggccgggtagtatgccctgactacgtactcagaatgaagggtagcaaacctagattcaagtttgaaaggtacacggtcattttggcaggttttttcttgtgaaaaatgccgtgattttattctgaatttacgcaggatcattcctcccgttcgtcgcttgcatttgttctggctcttactacccacaggtggatttgtgagagaacgatatgtatttgataaaatttcaacatctctatcttctttggtcaagaagacgctcgtcttcatctcttgaacttcgtccgtatgattctttagttgaatactactagcttgacttgattctatctcttcttgctgttcagctctgttacattgatccatcaccacatgtattctcgcctgtactctttcgttctctttacgattttcattgtttgatttctccaatctattttcatcgtccgtctgtgtaaaaccttgggtttttatttacaagcatcgaatgaatctactacctgatcggacggctgagaggacccggcgtctcatatccataatcccgtgtcaacgtggaatgactgttgactttagctatcttgaccgagatcattagcaacttagctattttgaattgacaatcgtcccctactattgaggaatgacagcaacggctgtaacactcgcactctttttcctctacacaaagtttagataatcactgtttgatgctttgtgtcagtttcttatttcatttgtggaccgccaattacagcttttattcggttcaggatccaaacatgtctgctgggagagcgcctgtgtcggtgtatctgtcagcgaatcagaaagcgctacgtgatagggcgttcaaattgtttccgaaaccaagatttcaagcctaaattccctgatgtcagtcagaaacgatctgctactgtgcacacgagatcatgagaacgagaaagaataagaggctcaggaagataggagaggtagaacggatggaagaggcaaaagaataacgtcatgtcctccactggttacctagacgacgaaagctacagtgtatatacagatcgtcacgttcaacatcatactcaacaccaatagctccctgactttatgcctgtttcttgacgaccagtactgcagggaaaataagatgagactgagaatttcaagggaaaagatattggaaaaaaaaaacgaccgctgtagggtttgaacctacgccttcagagaagagtagctgatttgatttgaattcaaggctaccgcgttagaccactccgccaaacggcctcattgaagactcagggttcacaaagctctactagttgaaactcagtatcatcagtcgttgggatttcagcagtcttgacattgttacagctattgtttgtttttctattggatatagcagtctataatacaatagggagctcttaataaaattagtgagcactttgggatattctaatggtggagt

SEQ ID NO: 3046 - DNA, 766 bp, Xanthophyllomyces dendrorhous
taaagaaatccagaaggtaattcgaacagatagttcgagaaaaggattcgaacagataattccaacaatgattccaacatatctccccttttctctcccaagcttggaacctcgttaactcctcatagttccgtacagtcatcctcacccttgaacatcctgccatatctcacgacccttccgagagctcaagcgtactgagtaccgtccctgctcagcccccttgccagcgcccctaacattcaacttggtttcagacgcgtctcctctcaccttgtactctcctcgctgtcgtcctctttgttttgtcttcttcctcttcctcttcctcttcctcctcctcctgctcctccttcacaaggcttatcctctatgtatcactctttccacctgcctttctcgaccttcattccaccctttttgtaacgagccatcctttcttctactctcaccgtatgaagcccctcttatttttcaatcttacgtccacagtcctttctcgctgcccttacgctacatccaatgatttgctccctcctgggagtttgagtgtaataaagacgtctgcgccttgatcttacctgctccgcttggtagaaaagcgtccagctcccagcaaccaacggaccatgatatatgctagagagtagaagcaaagaggaaagaaaagaacaagcagaaaggaaagcagagtcgtcaaccgacaccggaactgatgcttggttgcctgcgtgtgaggcagaagaaagcggtgataaacaaccat

SEQ ID NO: 3047 - DNA, 62603 bp, Xanthophyllomyces dendrorhous
ctcgtcacacaatgtccttctccgtgttttcttatctcactcggtcatccagaaaagtaagaaacagctcatcaaagccgcggcttgtcatacagcacgttggctccagagcttcaaccgtcaagccaaaccgccattcagaacactatcatcacgttccttctcccacttgatcgcgcaacgcgcgctgagaccatgctcctctgttctgccgctctttctcggccacccacctgagctgaggggattcgttcaggtcgacggcgctccacttgtcgggccgtctggctctcgccatgatcgcagtggttgcttcttgttcacatcatcgccgccatcgggcagtggtcctgacgattgacccgctttgtggttgactgtgtggctagccggctgtgctgagagactcagctttgttcctcttactacctctgttcttcagcgagcttttgctgatcgacaacgaatgatcttcactcttgatctgtatcgtatactctcagccggacacgatctggcctgttgatcagagtcaggacggcgctgtattttatctgtggttgtcgccttcttctactgcttttaacgatggagtgctcgactctgcctggcaagcacttgaatgctggatgcgctggcgtaaagaagggtgctaaatcacacttccgatgatgacttgcatcaaaatacatccataagattgtatgtcacgccccgcagacgaaggctaacgaagatcatgctaacctcagactgagctggcgaaatgaggaaaaaaaagtcacagatatctttctacgacaaccccaatagtggtcgatgtctaatcattaaccttgattccgttgagagccgttcaattggtcaacagatggctctctagaagattttcttgaactttggaaacgtatatggttttcaaatctgattagaatcgggtttctgtagaagagaacgatgatggcggtgagcttgactgcattcttctccgaaaggttcatgacgggcgaactacaatgaagaaacaggcataggaagagtatgtgaaaacattagaatgcatgtccaggcaaacctttagatttggtattccttgatggtcaggtaataaacctcattgtgtcgtagccactgagagcagagattttgaacttaatttgcatcatatcatgctgcttcttgtttacttgaaaccgtactcgcagaatctccccttccggctcgttctaaactttcatcctccaacatccatgcagggctatacatcgccccgcgacgaactgacgactgcttttcacgctccgttgttgggttatttggtttacgcgagggagagtgttgtcgagaggtagtcggaattaagagagaaggattgggatgagtattgacaagagatccaagggaggtatagctagaagagaggggtgagtgagtgagtggaaaacacaagtaagcgtaataaatccgaagaggcgtttgatgtagatattgacactcaagacagacatgtagtgaatcgaagccaaacatttatatcgagagggaggagcgaaagacgtacccttcatcatatagaacacaccatggaacatgatattctcgcaagtagtcccacacatccctatacgaccagttcaatattggatgtatgcgaagaaatgatggccaggtcggatcggtcggctgggtcaaagatagtgatgctggtagagcaaaaagaacatcttgaggtaagggttcaaagcttattgagcgtaaaaactgatgagaactgacaaccatgcggatcccctcgtctggttccaactagaactccttttacgcctttgcctcttccccaatcaggctcgccatttcgattgtctccctcacccagatagacaccaagagcagccttcattcctccacttatcctaactaaatccagaccgtatgctttcacggagtaatcgacaaatttctctacttcgggaaacggcgctggcaatgtgatatatacggacttgatgcgtggaagggctgagggagaggaagacgtcggggctcgaacgggaggatgagagggtggactcgagagtggacttgataacacgttataaagtagatgaagaagaagtgtacctattaatgaggcaaacaggacttagtatgttgatgaccaggacggctcgtgaagataaacgcaactcacaatcttttccgccgttgaagctcaaggcgagagcatccagactaactcccaataaagacgatcgagcgatggttgaggtcaacgcaggggtggatcagccgcctcttctcataactaagagatggaaaaaaatcacgggcttacccaaatgtgtctagtgcatctctgatgaccgagtgcgcttcgttcactttgttgatcagttcggttcttctctgagatgagatcggaggggtcgaggtacgagtgataaagctgagatcgtccgacaaatgcacttttataggcgaaggagacatcattggaaaatgataatttagacgggtctatgagcttctagagctagaaagctgaggggaggctgagcgggaagcgataatccgtgagccgcaacgctgaagaatgtaagatggatgagtgggagtgaaagaagagaaaggaggaagatgttgttttggtatgctgtcgtctctcattacgatcaaggctgtgcaacactacaatgtttaaggagtctttcctaatcgaatggaaagctgtgacgaggcgagcacgacctttaaccattcattagtcgttgataaccctccaccatcactcatctgacgtcgagctcattcttgttctctgcggatttacttcttgtttatctgtgttgtgagctcttgtcctgcccactagacgatttactcaaggaacttactcgagcttgaactttgcagattagggatgccccgcctaaatagcaaccctgatcccagaatacctcttcggcaacttccgctacgagccactcgtccgtcatccatgcgaccatcaccagcatcagccccttcttcgagctctaaatcactcggcgggaacctcaagtcaacttatggatggaatcgatcgaatcgagataacgacggaggagatgaggaggaacaggccttgcttgatggagtagctagggatcatggtgagggggacttggagatgggtagaacgtcggaagaaagaatgccaggtgatgagatcgatatgaaggtaagcacgatccatctataatcgaacgccttataataatatttattctcttatgtttcttatgtttcagaccatccggtcaaaaatgaagaaagtatctcgagacgcatcgcgaacaatctcgtttcatgcatcgagtacgttgataacgttttcgcctctcctgtttggaattttggctgatacaacttcaatcttcgtgacttcatccaatcgacataggcaagttcaagagcagctttccggcaaacctcatccgcaaccagaaatataacattgcatctttcctccctcttgtcttttacgagcaattcaagttcttcttcaatttatacttccttttggtcgcgctcagccaatttattcctgcattgaagattggttggttgaacgtttttagtctacatcttatatgggttcaatcttaacgctgatctctggtttatactcgcgaattatgcaggcttcatcgtgacatacgttgctccgttggcgttcgtattagcagtcacgatgggaaaggaggccttcgacgactaccttcgacacttgcgagacacagaggccaattcggcccgatatcttattctagatcggaacacaggtccatcaaccatccctccgacaagagcagttccatcatcgaggcttcaggtcggtgatctcgtcgtcttggagaaaaatcagagagttccggcagatatggttctgctaagaacaagcgacaagagtggtactgcattcgtcagaacagaccaattagacggggagactgactggaagctcagagttgcggtcgcaagcttccagtccatgacggataaagagcttctagcggtccaaggagacgtttatggtgagtgtttcgcttcgacaacaccactcttcatatttcaaaagttgatacctaattatgttaacttttcaacctcagccgatccacctatcaaagatatccacaccttcgttggaacggtgtcgcactctccgtttgatgaaacgtcagacagagcagtcccaacttcgtcctctcctcaagcatccctcctaaccacgtctcagcctccaaaggttgacccgttgacggccgagaatattctgtgggctaatacagtgcttgctgcaggatctgcagtaggatttgtagtgtacacaggggaagaaacaagggcggtgatgaacacgtcaaagtctgagacaaaagttgggctattggatttagagatcaaccggatggctaaggttagatatcttcatgtatctcttgtgtataaatacaactcgtggtactgacagctggtgtatacacccggatagattctgtgtgctgtgaccttcgtcttatccgtcttgttggtggctttgaacggattcagaggtcaatggtacatatacgtgttccgattcttgatcttgttctcctctatcattcctatcaggtcagtaatctgctcttttgtaatgtcagtatccacaatcttaggtactaagaactgagcttttgtaacgtttccacagcttgcgagtcaatcttgacatgggcaaaacagtatatgcccataacattcaaactgatccagaaatccctgggactattgtccgaacttcaacgttacccgaagaacttggcagaatagagtacctacttagcgataaaactgggacattgactcagaatggtttgtgtagctttttctctatggttttcttttcgttcactcattgactttcatccggtcaacgtctgttgtccgtgcattctgcacattgatagaaatggaaatgaagaagcttcatctaggaacgatgtcctatgggtatgactcgatgaacgaggtggcgcatcagttggcaatctctttcggtggtaagttgcaacacaactaccatgtttctgaaattctttggcgggtttaacaaagccatatctgactgtattcgttgtacgtcatctaggtacacacgcgaggcatgggtccgggttagtgaccggtgctgtattagcttctagaggcaggagagacatggcctcgaaggtgaacgacgccgttttagcattagctgtctgccataatgtgagtgctatcctctacatttggttttggctaggttcgtgtctgattatcataggctcgtcttcaaaggttactcctgtcgaaggcgatggcgaaatcacataccaagcatcgtctcccgacgaagtcgctatcgtgaaatggaccgaatctattggcctgtctctcatatcgcgagaacggacatctatgacggttcgcattcctgacggctctaccaaaaggtttaacatccttgatatcttccctttcacttcggagtccaagcgaatgggaattatcgttcgggatgatcaaggcgagacaaccttctatcagaaaggtgcggatgtagttatggcaaagattgttcagaagaatgactggctggaagaagagtgtggaaacatggctcgggagggcttgcgaacgctcgtggttggaaagaagaaactttcagaggcggcatacaaagactttgaccgtaggtatcacgttgctcgaacgcagaccgaaggtagaaatgaggccatgactagagtggtggaagatctggagcgagatcttgagttgttggctctaacaggagttgaagataagcttcaagaggacgtccgacctacactggagttgcttcgaaatgctggtataaagatttggatgttgacgggtgacaagatcgaaacagctacctgtattgccatctcaactaaacttgtctctcgaggacaatatatacaccaggttgctaaacgtgagcgtttcttctcccgatttgaacacatacgtgctattcgaaggttttactaacaaacttgtacaaaacccactagtacggactgctgaagaggcacaatatcaattggatttcatccgaagcaaactggactgttgtctagttatcgatggagagtcattacagctttgtctcgatctttacaaggatgagtttatcgagctggcaactcagctctcatgcgtcgctgcctgtcgatgttcacctactcagaaggcggatgtagcgcgtttgatccgacaccacactaagaaaagagtctgttgtatcggagatggaggaaatgatgtgagcatgatccaggcagctgatgttggtatgtagatcctttatatactatcatagcatgtcctctcttaagtctgtgagctgacgttcgtaatcattatcatcacaggggtgggtattgtcggaaaagaagggaaacaagcatcgttggccgccgacttctcaatcaaccagtttagttacctgaccaagcttctcgtttggcatggaagaaactcttacaaacgatcggccaaattggctcaatttgttatccaccgaggactaatcatttctggtgagttcactcgtagtgcgttaagcatcatgtatgtgcgattgagtcttacactcattgtatacacagtcatgcaagccgtcttttctgctattttcttctttgcccccatcgctttgtatcaaggttggcttcaggtcgggtatgccaccgtgtatacgatggcaccggtgttctctcttgttctcgatcgagatgtcaacgaagacgtggctttactgtaccctgagctttacaaggaactcaccaaggtaaaatgttgatgctctttgtttcgctataaccttgactgactttgtgcctggtccactcgtattgaacagggacgttcactctcttacaaaaccttcttcgcttggacactcatatcagtctatcagggtatgctaatctttttgtcaacctcttaagtacctgtcatggaataaaattttgacctcttgtgttggtccaggcggcgcgatcatgattatgtcgctacttctgttcgaaaccgacttcctaaacatcgtcgccatctcgttcactgcattaattctgaacgagctaatcatggtggctttggaaatcaccacgtggtaagatcgatgttctgtcggtcatcattatgctgcccaattaactcactcctttactttttaaaaggcatttttacatggcggtctccttgattgttacactcctcttttacggaatttccatggcgttcttgcctgaatacttcagtcagtctcaatttgatacttcgcacatcggaacgaacaactgatgaacgttagattctgatatctgcacagatcttaattttgtgctctccgttcgtttcatttggaaggtggccatgattgtagcagttaggtgagtctcatgtcattcattgagtcgttctacttgaagtttccatagctcacgccagtatcgagtcgacactatctcgttctagttctctaccattatacatggttaggatcactcaacgatactttcgtccagccacatatgccaagttgatctcatgatcgatctgatatggtcggcgaagattgttagaccggacttcactcttataccctgcttaaatacaatgataccatcacatgtagacacaagacagaggatagcaatgttgttttgtgcttggaaagagagcaaacatggtgataacaccaaatgtcagataacgtctcacttatatacagactcaatgcagcagcgttttgagatcttattaccagccatcatactattctagatctcctccaatccactttagctcgcttcttcaaacaccgtaataagtccagttcacttgttctcattcagagagtgtctttcctgctcgagacgtagtagtttaagcggcaaagcaattagagtcgtagaggaaagcaagagtgttctacctgtcttaccgctcttgactgatcttgtggtcattggagattatcctgctcgccgtccacaatacttctctccatccagatatgaacacttcagtatcaccttcgtctctatctacgccgacaatgacattatcaagtctcgctacgactatcgtactcagccgtaccctgactgctagtccttcggcaacatcgacggtttccaatgacagattagatgttcttccggggaaccccttggtgaatatatactatcttcaaacttcacctgttgaaggactagtacattaacactttctgtgtgatcatcgatcataacaaccaggccaatttcattctgggactattggtcataactctcgctagcgtgatgaactctttcggattaaatatgatgaagctcgatcatgtaagtatccattccgtaactttgttctggcaggacgagataatcaagtatacgagaggcatggccatgaatcaaacagaactcatagtagagggtcatacttgttcgttgctaatggtgctccttgttggatgctcgtggcaactttctttcgctcgtcatggcagatcaagacggccctgataccgtccggtcagaaacgtcccgagtggctgcgcccgacttggctgctaggttttggatcttgtaggttctatctctctatctgtaaggacggaaaaacgacttcagacaaagctgaattaagaggtttgaggaacagatgtgatatcgcagttggtgggatccacgttggctctgagatacttgcgagctgagttcgtagccccgttaggaagtagctcgctcgtgttcaacttcttgttcgcaagatggctggtgagatatctgtgttattggttcattatcccaaacctatcaagttaacaaaagaagaagaacgctgaggccctcggatattctattttgtattcggaatatctaggttggcactcgtgagttactcctcatgtttgatgttcgcttgaagttgaagtgtgaactaacatcgttatcctacgcatatggatcttctcagcggtcacacagaaagacatacatggcacaatgcttattattacaggagtcattttgatccttgtttttgccagcattaattccgggctctccaatactctttcagttcgtacaatatacaagtattttcatcctgattgacaatgtgttcattgacagtatctttgatctacgtatacggcttcaaagcttgatagactgtatgtgctttggggtcgaggaggattccttttctacttctttctacagatattagtcctgtttagcgcatgggaaactgtgcatatgctcgctctcatcttgagaaaccaaacaagtaacgaggatgagatcgagcagcatctatcggtgtgttatgtctctttctcatgctaacaagtgaatgccatactgtttgccttaccttctctaaatcatgaatgcacgtctatggggtgtgcgatgagcagacaggaccgcacaagcatattcccaagtttttccatcctgtccaggcgtatcataaatcagcgcaacgattcctttcagtcaaattatcagtgttgttggggagatcttctgagaaacatttagcgttctgtaccggaattgggtgggcgagcgtggggggagcaatggctggtgcgagtctagtgtttgctaaggccaccgtgatgatcgggatgggagaaggaaacgttgtgagtctttctatgtcatgttgtatctcgcttgaacccttgtatttaagttgatgtcaggaaatggtcatattgctctcttcttgcttgtagtacatccactttttacccatgataatgattgctttcctcgcattaagtgctgtgctccagatgattgctctaaacagaggtttaaagtttgtctctgtatcgtcctcatcacatctatgctcagaccttggcctgactacctatatcacgaaaaaccagagcttatgattctacactagtcgttcctgtattctacgtgagttgtgctactttctcatcgctcctcaaactttatgttgttaaaactacgtttctgtttcgttgttcatgttctctttggcttgcttgatggggtcgcgcatggtaggctggatacactctccttggctttgttaactcgatggtcttcttggaccaagttggtgcatacagttggacggtgttgttctgtattgcggtcggagtaactgttttgttgagcggagtggttagtttgttctacctccgttctgctttctttcttcttggctgatactggtttgatatgacggtacgttacggctcttgctctcttcaggttcttctgtcctctatcaagaaggaacctgtgcttgaaactcctagcgcagacgtccaggaagaccatgaacggcatttgaatgctattgagcatccggatcatggtcgaactcgaactgaaagccatggaatcgaagaacggcgtgcgttgtttgacgctgaagaggatgctgaggaggaggattctgatgatcggttcaaacgtcagtcgacgcagaagagagaggatgaattagctagtggggcaaagtgggaggttggaagtgtaagtgatgatgaggaggaagaagggtcaaaatgggaaggtcagctgagtgcgcatgtttcgtagtcacatggactgtatcatcttgctcttgccttatgagatccggttaatatctttctctgctgggtagtggatcacttctgttatatatctgatactcggtaatggacgcttgctcgattataacgaccgatggatgcgacaatccatatggtttgttctcgtctgacaaggaaaaggatctgaaagcgcttcattcattcattatggaagcgacatacataaacaatgccgatggacagaagaaaggagaaaagaggggtgatggctggagagtagacagcgcagggatgtgtccttccgttttaagattgatgaacaaggaaccacgaccaacctttattaaggctttcggaatccgccctttccatcagtgatggtaagaatctcggaaaccaaaccggttccgatggtctttccaccctctcgaagggagaatcgagatccaacctccatgggagtatcatgggtaaggtcacagatcatgtcaacgttgtctccaggcatgaccatcttctcctcaggagactcggttccctcagggaaggtcaagtggcaggtcacatcggcagttcggaagtacatctgaggagcgtacttctgaacgaagggagtgtatcggccaccctcctccttggtaaggatctgcgcgatgaaaacatgattcaaatgtcctaatcatcagtgatatgtttttagatggtagggctgaggacaagacaaagacatacgtaaagagaggctcggaacttcttgacagactcgatggttccaggaacaacaatgacctgacctcgctggacttgctctcgcttgacacctcgaagaagacaacccatgttgtctccggcttctccctatgaagcacacaaaacgcatacgttggatgagctttgcttgggaaagaacaacacgagatatgtactgatactgaagagaaaggaataaatacccgctcaagctccttgtggaacatctcgataccagtaaggatggtcttaaatcgggatccgcttccaataatctcgatttcagcacccttctggatggttcctcgctcgactcgaccggtaacgaccgttcctcgtccaggaatggaaaagacgtctagatgttatccgacacaagtatttctatggtcagtgttgctatctctagaccacagaatgcccaggccagatcaagcttaccctcaacgggcaacaagaagggcttatcaagatctcggacgggggcatcgagccactcatcacagttcttcatgagctcctcgaccttctcagctccaatcttggggtctcggccctcaagcgcggcaagcgcacttcccatgatgatcggggtgttctctccatcgaatccgtactgggaaagcaaatctcgcatttccatgtcgacaagctcgagcatctcctcgtcgtcaatttgatcgaccttgttgacgaaaacgcagagtttcttgataccgacctgtcgggcgagcaacaaatgctctcgagtctgaggcatctgaccgtcggtagcagcaacgacaatgattgcggcatcaagctgggcagctccggtgatcatgttcttgatgtctataagagagcgcagagagtcagcatggcattgacgtatgtgctatcagtacgctggatgtttgacatacaatcagcgtgaccggggcaatcaatgtgggcgtagtgcctcaaatcagtctcgtactcgacgtgggaggtagcgatggtgattcctcgagccttctcttcaggcgccttgtcaatctgagagtaatcaatgaactttgtcgatccagacttctcagcgaggtgcttggtgatagcagcggtcaaagtggtctctaaatcatgaattcgggttgaaggtcaaagcttacttcacgttagaaaaggactcgatgctttaccaaacaaaaggagcgaatgaaggactaacttccgtgatcgacgtgctagatcgtggttgaccaaggaaagaataagggaatcagttcaatttctgacaagaaatggagaaacattgtcttacaccgatggtaccgatgctgtgatttaacgaaggaaagaatggtcaatgacttttccatcttcaagaggctggctaaatcttacgcaagtcggcgacttacttgaagtggggcttggctcgggaaaagaactcggcgtaagatcgctgggcctctacagatatacatgagacaaaaagaaattcagcgcagggcacctcaaaactaagatgataaagagcaacactgacctcgggtgatcacaggagcgactgcaggagcggcgaaagcggaagagagcctggatcgggagccgataagggtcgactgggaccgaatctgagtagcaaccgagagaggccgggcaagtgaggcagctttagagaaggatgaacagataaccaggcgtcagaccattggttcttctccttccgaggtgtaagagagaagaagtcctgctagatggcgttaggttgtaaatgagagcgagatgagagaaacttggctgttccgttggttcattaacattatcccagctcttcaggctgatccacagtcaaggcctccgagacctctaccttctcattgaatgtggagtatgtatcgatcaggaactctgatatccttcatcacattcccgccactgttccatcgttgattcagtccgtctcagcgatactagattcttgtctaacggcccgatttaaggcacggtgacgagactaggttccatagagtatatagctctgatcgaaactagtttccttccgtcctatctacgatctacgagtctgatcgtactattcttgcggtcttcgttctataaacgaaatgagagagagggaacggacgagaaaagaacacggatagaagaggaaagggaaggcactaaccccgctgagctccctgtcgagcggtgagagcagtaagcccggatcgagcgcaagtcttggtagcgagcatgtttgagggcgagctttgagaggatgtgtgtgtgcttctaactgttagagagacgacggaggagcgaggtaaaaaagaacggggcgaaaaagaaaagaatcggacggtgagaggcggcggaaaaagtgtaacaatgcagtaattcaaatattatatattgtaaccagctcaactaagtgttccagacccagcagatggttccttgttgaatcctctcgtttgcccacactcaccgtctttgtcgccttctctattcctctctctctctgttctttttctcatcgcttccccttgattctatccagcatgtcgtaagtcagagcctttttgaatgtgtgttctcttagcagaggtgtctgactgttcgattctcgtgattgtctgcctgtgtcgccatgctcttctccgccttgatggaaacacagcgacctcgttcaccttccaaagtccgagcttaacgaagcccaggtccgacagctcgaagagtatgaaacctcacagggaccgctctctgttcttcagcagtctgtcagaaacaacactcaggttttgatctcgctcagaaacaacaagaaacttcttgctcgagtcaaggcattcgacagacatagcaacatggtatggtcgtttttccctccttcatctttttcttccttttctctctacatatctacgtggtatccttgcatctagagcattcctcgtgagcttctatacatcgttctgctccagtcgcctcctgctttcgaaagaggtcgtacagactgcacaagcagatgagcagtgaagagattgccagcgacatctatctacgcgtctctctcaaaagtcttcagatttaaccttccgtttctttctttccttctcacgtttctaggtcctcgagaacgtcaaggaggtttgtattccttctctgctctctcatctcttgtctcatcctcttcagcttttgatgacatatattcgtcttgttcgcgatcgagcagatgtggaccgaacagccgtctagcaaaaataaaaagcctgccaacaaggatcgatttatctccaagatgttcctccggttcgtgttcttctttccgtcctctcgttgagagtctacctatccgatgatcaagagtgcgctcctggtgaactaacgctgtgcttttgttaaatatacttggtgaaacaatttgcttgttggaaatctgaatgttggtttgcgacgcggtgctgcgtttcggatacatgatgggcggatggattacttcttcgggcaacggctgatttctgaccggttgcttgggtttctttgtagaggtgactctgttgtgatcggtatgtctcattcatcctttgattctccttgtacttccagagctcatcctgaccttccttttgctcttctgtccgttcatccctgaatatgtatagtccttcgagtggctccgtagatcctctccaacctctcctacaaatgaagacagcttccagggttcttctcctttccttccctctcttcatctctttcaataacccgtcaaatacaaaaatgagcatgaacttcttgtactctatctctcaaacgtatgctagagaatgaatcaagacgagcagaccctctgctgtgctgttccagagcgttatcttctcgacgcctcaaacggccgcgtgcgtcaattattcaactccaagcatgagagcagatcatccaacctcatctttccgatgagatcaacatcatagtggtctgttgatctggcctgttggctatcagaactacatttcaatagaaagaaacggccatttgcccaattcagataagatgactaaaaaagaagagaaactgatctattatgtaaaaaaaggagagataacaaacgtttgtcggagagtgaatgagaagtggaatgagtgaaaagaacccttcatctctgagcggcaaacacctggacacaacatggacgccaagagatgaaggcttatattttctgcaggaaaactcgacgattcgttaatcctattcaacttctatctagttggccaatcccacctcctgtgtgaacggattgacgaaaacaaagtcaaagacagattgtgagtgattacaaactagaggaacaagattcaagcggcaacagagatgcacaaaatttaaaggatatgagggagaagaacacataggaggaatccttacattttgaaggaggaatccgactcttctctgactttttggtgcagttcgaccaccagtggtcctcatctcctgacacacgaagctgtccggcggtccgagccactcgttcaacctgtatctctcctcattgtcgtcctcgtcatcagcgcccccaaagttgtcgtactcgtgttcttgtccaaacagatccctggcgagttgggtatgagacactccgccgtacgtggtcacacaccgagggtttaccaaaatcctcgccgccgtgaacgcagagtttggtcggaggaactggacgtctccaccagggatgtcttccgtatcgagcggaggaggtgcctgcgaatcctccgcgtctgtcatggcgtccgcatccgaaccggcgtggatatcgtattcttcggccggatctgcctgcttgtgatggaaaactggggcggctcctggctcctcatcctcaccaccttcggcaccggcaccaacgacggcggctgccactggcttgaccttagctatttcgacatcagcatcggcgtcggcttccaaatcgatgggttcaggcatcaccggagcgttctccgcagccgatacatcctcatcctcatccccgtcgtcctgctgtctcttgatgactcgagcttcaacctgcttcgccatctcccgcttgacgaaagccttctcggaattgttgatcactcgcttaccgtactttccggtcgcacccatagtatcgtcaacccacttgacgttcctcgagttcttcactccgtccttggcagcatcggtccagagatctcggcagaaccacatctgagtagagtccatgcattgaatatctgggtccatctcaaggggctgggcactggtcgataggttctgggccagtccagatgctcggtacttaagacctttgtagtacgattggaatgggtctactacgtgtgaaccggattcacagcagaacacctggaacggcagatgagcagcatatctctctgtgcccactcgatctcggggagggccactaatcaataacaaaagtttaatattgggtcggcttctttccaggtaaattagagacaaaggtaagcaaacttactcctcaggcttggcactcgactttgcctgacggaacaagttgccctcgatgtctcgcgttctccatctatatccgacattgtaaaacctcctgtcagactttaattcggcggtatgtttccgtcaaaaaatggcgggagattttagatatagacttaccgatcggagaagatgaagaataagttatgttctgcccaatccataccacacaccaaactagcgtcattggccttgctgactcgcaagttctccagcacgtcggtcgggcaggtaaatcctttgagccagacaacccggtggaacttgatctgtctcttctcggccaattcaaacaaaggatctagcgccaaatttcgggctgtcgcctcctcgagagggtagtaagctgccgaagggttgaccgtcattgggggaactcgtcgaattctgaaggcaattcctagcatggttagtacggcttcacacaagtcggacagcgtcggagtagaatcggtcgagtctgagtcaagcatcgatacgaagacattcttgtgaccgagtctagaagaatttgggccgacaaccacagatccataaggtcagttggttgagaagtgaggaagtgggccggatacaacagaaggaagtatctcgaaaagagataggaaaagaaaggataatcatgatgaggtactcaccgtttggccagttgaacgataacagcaagttgatccaccaagaagtgatcggctgaatggacgacaatagcgatgtagtataagtggcctcctttggcaagatcttcgtattgatcatctcttttgttctgtccgaacggtcgagagagtgtagggcaggcagcctaggtcattcgcgcccatcatacacgtatcatccggaaattgaacgaggacgggtaacagggagtcttgcgatcagctttgctgctagttgtatcgcgaatatgaaggatagacgtacagcaacccatccattgaacttgaggagttcatcaattgcattccggacgacctgagcatcccgatgagcggtgtctgcgccagtgatccatggcttttgatatcgctcccagtagtcactcacaccgagggagatctgctcgtcaaacatatcagactcatcgtcacgacctgaaggatgattcaaaaaagtacaaggtgtgaatacacatcttcatgagtctatcttgatgtaaatagaaatcaagtaggttatgaggtgagtagaaaagaacgagaagaaccaagatagcaagcaagacaaacagcgctcggtctcgcctctcccggaaatctttgatcccgggaggtctaaagacgctaaggaatggaggaagaacaagaaatcttccagagagagagaaacgaccagcttggctgacaaaacgctagctagaaaacatacctaatcgactctgcaagaaaccatacttgtgaacatccaagttcttgtctcctcgtattcggtcgatcacaccgtgggccttgatctgggattgattcgatactctaacctcgggagagctgaaaaacagccaacggatagtaaaaaaggcgagaagtccgtagactgtacgttggcacagccttacctgtgcggctgtgagagccatacttcgaagggggaagggagaagagaaaagcgagagattgggtgatggttgatgggaacgggtttcgtactagggatccataaaatacaaggcaaaaagaaggttgtcactttcgcgcagtcgccccgagatgctcgtccagtgcttattcagcacagatagcatcgaatgaagaacgacacatcgtatatcatacattgtgcacataaagctcactcatccagctcatctctcagaaacccagtgagaccctcgatctgtttttctatctggctgccgccgaaaccaaagagaaaactctggctgccgtcaaattcaacctcacttatcgttctctccttcccagaggtcatacctcggaccgaccgaccgagagcgctggccgatgatgatgatgatgatgaccgagtgctcaggctcatgagtcctctccgtttgagattggctgctgtcactgttttcgtcgtctttacagtggaaggactaccgacgcgttgagaatttgaacggagcgaaggtgattcggaggccagaggggaggttggttgagcaatcggtcgaggtttcgaagtaacgggcagggaaacaaccatgtttgtatgatggattggatccggtattatgggtggaggagcacatcgtttagagttaggagttgaactagagagatcgctcggaaatgaagggggataaaactagagaagatatgcgaatgagatatacatcccaaatcgatcagccagtctacggaacaaagtagctcagagggaggaactagaagcggatagacaggacatactagatcgaatgccgactgatctaatagattttcccatcgacgcttcttgagcaccgtcgaattgtcctcttccggctccatgtcctctagtaagctctttccagcgtcctcttccagtgccctctcgaccgacagaacactggtattctcctcattctccttggtgccctctgctgcgccgatcagtgtactctctctgactctttccctcctgagttgtcgagcgggtttcttgcccgtgaaacgtgctgcgttcgctgatgacaacgaccgccgcttagtttgtttaaatgtcaacagacattgatcggatgagactcccagttgaatgtctgatggttcatcgcgcatatgctcctctcgggtcattctagccagctttttggtgttacggaagattttcttcgcccgatcggaagaaggaggcgtgggctcttgggagccaatattcacattcgacattgaggagagagggagaggaagaggagaagatgagagtgaagctgaaatggatcttgtggtaccattctggccggaaagcgccgaggctgccaaagatgtcagcggggccagagaagaagtcgggacgtgttgcacagctagcgtcgcatcggccggtcgaggtgaagacgagcgagtgttagagcttggaagcttgcgtcttttaataggcactgtcggatatgagacagaaaccacctgggtagcggactgcctccatgcgaggtattcggtctcatttctagaatggaaaaacaacggccggttaaggggaagtcgtcattagaaaacagaacgggaaataagcctcaacgaaaaggccagccaaactggtcaagaatatgaatgacaagagagttcacgaacctgggtaaacccctagagaagttcatgtgtctctctgagcgttccttctcatctattggtatagatcccagcttccgcccaacctctccccctccggctgcccagagccattcatcgccagctggatccttgtatgtgtgatacctgaccgaggtcaggtacaacatctcgggagactctcgtgcgatattggcaagctgtttgacgcgacggtcaaactcgggattcaatggtggggcagtgaatggatatggactatatcgaatgacaggaggaagcatcgacagaagggatcaacctcgaggcagaacgagcgaacgtaacagatcccacttacggcacgctagcaaaagattcaagtctctgcgtaagctcctcaagcgatagatctctcaacgagcggatggatgtcatgaagaattgacgatgtgatatgctcgatgggtcaatcgatcaagaccgaaagaagagaacgttgtatcccaacagttggttgacagttgatggaacggattttcccagttaaggtttactcgaatccatcatcactcaacctcaaccatcatacccgcatctctctcatacaacttggtatcgatacaatgtctagcaagaacactcagcctgctcaacctcagtataacaatgccggaggtccttctggtctgaaccagtcaccgttggttggggaatctgctcctccccctgcctgtaagcttccatcgttctcttggagatgcggtggctattctccaaaactagtggttcttgtacaagtggaaagctcattcctttgtcgtccatttggacagacgccccgtctccttacttccaagggcttcctacattcaatgctccggagctgtctactccgttcgtcgctcctacagctcacgtagccacccagcgagctagagctaggttcttcaaggcgcttgtggtggcgttcatcctctgggttttcctagggtccgtgtcgtttccaccattgtctttctattctttttctaggctttgacagttccttgaatctcctgcctttgtttcaatacgatctgttctgcagtgctgtcttcggaggtagcgttttcgaggatgtctcaagggacggcagtcatcgaggctcaggtcgacacccgcatgtctacagtggctctgacacctgggattctacaggaaccgaagttactctcgaccatgttgctcatacttctcccgagttgacaacgtttagagagacaaaagtagtccctgaggttgcgtctgtcgaggaagccaaatcggattaaagaaggattaatatttgctacataggtcatctcttggctatctctcgctctgcctttctcttcctcttcttcttcttcctcctcgtcttcttttcccttccttgtttttgcttcttctgattctatggacttatctctatgcatggcgtgctttgtggacatgaggacaacaccattgcgtatatccaatcattcgtcgttgatccttctgtgcttccaataggcgaaacagaacggtacgcacccgcgacgtcatcagcgccgatagccggggcctcttctctttttctctcttctttatcctccccctctttctttctgcccatttcgtccgtcaacgaccaccaacacatatcgttgccagccaatacagcaaagctttttagacagatatggccggccttcttgcatcctaccaatcgtttctctcgaggaatcctctcttgggaaactcggtctctgctgccgtgcgtcctctctgcttacctgcctcgctggttatatttctgaagacaggcccaagtagattcgcctctctaatggttgcttgtcctttatcttgtgtactacttattaggctttgtttgccactggtgatggaattgctcaacaatatgtcgagaagaaggtagagatgcttatatccaccgtacttttacttcttttaaccatctgaagatgtactaacttttcggagggactggctcgcgccgggcatgcgatgttatagggaagggaccatgactggattcgaacagggtaggtcatctcgacttctagtcaggtttaacagttctcgtctgatctgtttgctcattggtatctcgatcaaactgataggaggatcgttctctggggaggaggattgtacgtctgtgtatccattgactctctttccgaccccttgcaaacgaatgagagctgatcacggtacgggtataccaacaacggacgatccggtggctggttcctcgattcaaacatctcagatttgctcctgttgtgacccgttcgttcagttaatcgaagtagaccttgttgatgctaagcactcggtcatactgatgcttgtttcgtccgtgaatctgtctcttttcgaaacagaatggtttaagattctcgaaaaggttcattttctgatcgccacggcttctctgcacatgcatgctctgggctgaactactgcgaaatcttgatcgtacaggtccccatcaagaataaagttgctgctaccgcgaccagggtacgtgcatggttacttggcagtttggacattggtagagcagacaaggagctgattcctcatccggacaaatctcggtgtcttaggttgggttggatcaatttgtacgtatgccactccgtttatttctcaaaacactgatgttccctcctgctctctctgtcgatgggcttttgaaactgatcactggctcttgttaatggcaacatacaggtttttgcacctatagtgttgacgacgttcttcagcttcatgggactgctcgagggtaaagagaaagagaacgtccaagagaagctgaaaaacgacctagtccctactttgaaagcaaactggttcgtatctcttcctggttttcaccatcgttctcgcctgtttgaagaggcggttatactcacgctatgccatgcttgtatactcgaaggatggtatttattcctacgcaagcagtaaacatggcattgatcccattgcagtaccgactgcttactatgtaagctttggtctgggcatgtcttcccctttggacgcggtcgatgactctgctgaccagcctgtcccgcttaatgccatgtttcctgctgaacatgtcttcgtttcaatagtaacctggtaagttcagcgtgctttacatctttcatcattcagttcggcatatcaggctctgattctcaatcattcgttcggtatatatccggcttaggtcaacatcccgtggaatacgtatctttcaattcaggccaacaaagattcgaagtctgtccttaaagaataaatagattactctgcactagatattttgtaggaacgttcgcgagcaaattctcaatgatgtgtagaacgtagaacgtagaacgtagaatgtagaatgtagaatgtagaagggatatgaatgagatatacaatcgatgctactagtcatgacgaaggtgtacagatgggtgtctgtaatcgatcaagtaatttttgtgtaatggccgactacaactttcgcataatcatctgattgccattgtcatcagttcgccaacgacgaccatcaagtgaacacacactcaccatggctccctcgagagcaaacccaaggggtgtttatagtcagttcccatgctttgtttgctttgctatctactttacttaaatcgatctgaccgttgttcgctctggcctctgggttggactttagttagcaatgtaccctagtaagcccatcgtgttcaagcaacatccagcacaagacgcacctagatttgacgtccacaccatccatctatgcgtttctaatcttcatcgtccactcttctcccttatcttacttatttttctggctcgatagtgatatgacagaggaacaattggctcatgtgatgagcgaggccggaccggtcgcgaagactaggtgagtgagactctctatgacatcttcacttttatccttctttcaacctctgctctgtctgtcagaatacatcctcaaaacaatcatgtttcttccttttcttctttcttccgccctatatggacttgctggtcattctggacagacttgcattccatcctgatactggacgggctaaaggttttggattcgtcgacttttgtaggtctagtcgcgtcttctccttcgttctgtttgtatggtgagtaggcagtgtgctgattgtcagactttgcttcttccgtctcatgacatgcagatggtaagtcttctatagaacccacattgagccgttccacccaatgctttcttactctcatatccctctctcggcattattcatagattccgaaacagctgcctcggctgtcagaaacctaaacggttatctgatcaatggtcgtccgctctcggtgacttttcagatggacactgatcacaacgtccatctctcagcctccgttgaccccaactcgcctcaagcgttgttacagaaccctccaagaggtagggagcttgaccggggagctctcgcgacagacgcaatcactcaaactttagcagctatccctgccggtcagttggaagaggtgttgggccggatgaaggtttgcctagccatttctctctccctcttcctcttgcttgaactgatcattcatgacttgtttatatgtgttcactctttctggactgcagggtctcgttcagacatctccggcggatgcccgacagatcctgatgtctaatcctcagctctcctacgcactttttcaagcaatgctcatgatgaaccttgtcgatccaaccgtgatctctcgtatgactgccggtcagccagcctttccgccatccgtcccaccctcatctacgccggtccatacaacctcagccggtcttcctccaccatcgtatcctccggctgcttcgcatcagccacattatcctccccaacagccggtcagagggtatccctcgtacccaccgacgtatgctcaaggagggcctccgccaccacctacgttgccatctcatcaccaacctgcctcggccggtccgccgtctctagcgccgcaacaacagggagcacccggaagatctcctctaccacctccaccgcaacaacagccaccgcaagcggcgaacgcgatgccaccttcgttggctcatcttccaccggatcaacaggcaatgctacttcaggtgttgcagatgccaaaagagcaggtcgacgcacttcctcccgaccaaagaacaagcatcatgcagctcgttagttctttcacttcgttcttccgccttctggtattcgccctttgttttatgtatggtacaagtgactaatcatttgggaccttccttttctctctctctctctctttttcatatggctgggggttaaatcgaactcagagagctcaatttgggtcaatttaaacatggcggtgacgaaagagacggagaaaagagaaggaagaaactttgaagagaaaaagacagagaatctgtcattcgatatttgagatgctatctgatgaacacgatcggaaaaaagaaaaaagaaaaagaaaaaatcgaaagtccgacgaaagaagagaggatacatccatagagaagtgggaaaataaagatggaaagttctaatccgtcttgacgtgcctgactaggacgatgtgacatcccagagggctgtttatgtcaaatcttgattccttcaacgatcactaacagcactgattctcgatggaaagacacaatctctgacagtcaacagtctatcaggaggaatagaaactccacacattctacaatcgagactcgcgtaggcacacacacatttatcaaacatcaaagtggagaaagtagaagaaagacatctgaggctatagagaaacatccctggcagatgatgatcgacaagaacgatgatacggtttgctggcaacttcttttttcttcctcatattggaggaagaagtaaagagtgtgtataaccaagagacagaacgatcaataggagagactaagaaggcgtcaacaaccctaggtcaagaaggaaacaaatcatgagactcgagaagaacgtagtttgagttaaccaagaaaagggtttcaggaaggtacttggatcgacatctatggggaaaggtcaaaacagagaacaaaacgagaggggaaaagagaaacgcgagctggtgggcacgcaacaagggaggggggggaaaaataaatgttggaatcatatataaccacggcgtccatatgttagcagaagaatatgggtttgatggcaaaagagaaaaagaaaaagaaaagatttaaataaacaccggaacagaagcgcgatggagaaagcagagaaggatgagatgatgatagaaagccgagtatgaaagagaaagagggaagaataacaaaatgaataaagataggacaagccattgaagcacacaaaaacacaatgatgtacaagcacatgaccggctttgaaagggaagggaagaaaagatataaagaaatctcaggaggaagaaaaggagtagatcagaaaagaatgaggggggaaagagttgtgaacaactatggaggacgaacaaaggaagagagactagagatagaggagcagcgtcatcctcaaggcttctttcctccagagttttctgagccactacccattccccacaacacacccaaaagatctctggcggtagcgacaactcctccgccggacggcgatgtcacctggccatcttgcttctttgactgacctagccctagacctaaaccttgtccgatcgcagagccggagccaggagagaatgagctagaggcgatgttctgagcagagaatgctgaactacgttgatcaatcgacggacctgaccccttggagctagggggggaggaagaggaggacgcattggccagggtgggaacggccgaggatgaagaggatggggatggtttcttgggtgccgaatgagcgtgaggaagagacgaggctgacgtgctctgaccagatctaggaagagggcgcatctgtatctgctttgtatttcgcaatttgagaaaaggtaggatgaacaggatgaaaagccagtagaacgtatcgttcgatgtgcacatcagattgagttctcagagtacatccgaatcgaaaagcagagaagaaatcacttacagtaggggacgatgtaggagtcgggttggtgctagccataaacttgtatccttctccctcctcattgtcttcatctgcctctacctcttgagactctttcttatcgtcatcgtcatcatcatcaacttgttctctgaccgtgtcggattcttctggttctcggttagatctgttatcttccctctttgtcgcaacctcatccttcggtacatcccctacgtcgcccttctggaagtgatcaccaaccattccacttccggggatcgaaagtttccccttttttgcctcttgttccacatggctcactccttctcctccgccttgtccgtccttcggtccggcggtcggtacgtgcttcttggactcgttcgaatctttctggtcctcattttgagtgtgggtagcccagtagtcgtcgattcgcattccgttgtcgcctgacggagatcgaggagacaatccattatcttcatcttcctcgccaaacgagggctcctgtgccccggcttttccggtagcaggctgagtgttgatgcttggcggcttggcgcctctaggtccagcccctgccgaagagttggatgccttcgtcacaggagtcgttgatgggtgaacagctcctgtcggggacgtgactccacctggtgcggacgttggccacccaccggtggaagagatgggcgaaccaggaattccagaagaggatgttcccctagaagccggtcgatcatgtaacgatgttgcactcgagtttctaaccaccgatcggcctcgagtaggagccacgtctggagaggaaacaactttgtcgtctccaccggtcgacgccaaggatgaagaagtggcggcagaagaggtgttcgtggaagcaggggaaggagaggcgggagcagcggttgggacgttgcccggtccagagactgcttggaagacacctcctgctccaataccctcgtctcgagaaatctcaggtgtcgctgtgccggaagaagaggcggtcgaggtagaaggaggaaagtaagatcctgctttatcacctgaagacgacttgccgcttcctccgctggatccagctttgttccttaggatggatcggccagctgacacattgggcgagggcggtgttgtggatggggttgaagaatccttggacgaagtaccagaggtgtttgtggcggaagcaggtgaggaagtgtcccgaatgatcttcacttcagagtttcctaccttgtcttgaacggaaggaacagaggcatatgcaggaggcgtagtagatccgacagaagcccctctacgaactgttggggtcgaagttccagatgagttggcggatgacgtttgagaggtcgactttccttcataatggccgacactaccgactcgaccgccatggctgcttcgaccaggaccggacgaagagccgctgtgggggaagattgagaaaagagaagaaaaggattggagaatacaaacttagctctgccctatgaatgggaacggtagatggatacacatggagaggcaaagaaggaaacggaaggtactgacccttgttgaccccctcggaagtagtcgtactcatcgtcgtcttcatcccactgagcggcatcgatgggacttggaaaatcgccctcggccctggcctgggatgaggcgatactctcctttcgctggacgccggcatcctggttattggcagccgctgagccggcattcgggacgtagacaatggcgggtgcgggagcaggcaggacctcgttgtttttgagaagggcaggggcgatatgggcgatggtgaagtgctcagtggaggactgtctgctaccagaaggccggacggcgtaagaagacgagctcgatccggtgcttctcatttcgagatgttcatcctcgtctgacgaatcgatcccgccgtcttcgcttgaactgctatccggccggtcgggtgggattgatgtcggctcgctcaacgagatgcattgttcgacgaatgtgttgaacgagatatgtctctttgctccgtcccttccttctctgcctccgtggtcaccagtatcagatggggtggcccctccagggaagggggtcaaggccgagccagctcctccggccggattggtcgcggcggcataggagatattcatcgatggaagctggaacctcggaggagagtttcctcgtctgccggtgctgcgacggaggatatttgtgtcgctcctggtctgatgtaggccgggtcgggacctgccttcggtctctgagaattcatcttcttcgtcttctgggtagagagattcgaggatgggcgaggctgagccacccatctgagctcgctcgttgttaggcccggtgagaatctcagagatagttcgatgcttgagaatcggtttcgcacgctttccagacgatagatctaggtgatcttcggtagtcgagatccgaggaggaggtacggcttcaacattggtatggagagggccgtagagccatgtgacgtccgagtctttgagcctaaagagttgagaacgggacggttagccgagttgaaatgatgatgaacaggtgttttgcggtatgagaagaaaatgtatgagagagagacagcggaagagataaagagatgatgatgatgatgatgatgatgatgataggggaaaggaaagttgagatagtcaagagatcgcaggagagtaaaggggaaaaaaggttttcttctatcttttctttttcttcaagaatagagatgacccggtacgacgtccgttgaatcactgcagatcatgatggatgagacttggagtctgattgccgggtatattccaatgaggacacaaggagccagagaacagagatggagaaagagagaaggaaactcatcgaggctaaaagagaagggtatgcactcaccaattgagagtctccgggctgatcgtcttgagtttgttccgctgtttccaccaggtccgccaactggcgttctctagtctgactccgttggcgacctcgttctttgttctcgtcatcgtcctccacgaagaccagatgtcttcctcggtccaatcatgggacaaatagtccacacagatcgagggcaacctggtctggacgtctccgtcgtctgggttatgaacgacagaaccggtaccgttcataggcgaagcgatggccggtgcgggaaagtattgagccatagtttggttgagtagaaacggcggacgggagaaagggaaggaggtgtcaaagagtacgtgaaacgatgatcctcaagttgagaaggaaaagaatggagagaaggcaaggacgaaggaaaagaaaaatggggaaggaagtcgagtgacttgtagccgagatccacagtttacacggccggggtcaaaaaaacgacagatgctttgacggactgatacgaaggattcttaattagatgttttctctccaaatcaagaaagaacaagaacggcaactatcacgctgaataaatgatgggaagagtgtgtgagcgagtatgagagagagtgggagtgtgggtgtaaggatggcaagttgggttgggaaagagaagaagaggcagaggaagactaagagtgtgtgcaagaaggaaggagagggcagagggcagggggctgcttggttacaggcatgtttacgttcatgtgtaaccataagtgatgatgcgttgtaactgagcgtaagtaagtgcgtgctaccgggcagagacagagagaaacatccgatcgatagtgagacagagtgtgaccatcttggggcgaagggggtgtacgtaagcagagtgctgattcatgtgatcgtaaccaatatgattaaagtttcaggtacgcctcattagatagatgattgtgttcctttttctccgttcaaacagtccttagtggaaccctggagatcggagggaaacccatgccagtctctttagagaataccaccatctgagtacccctcaagatcactgctttcacatatccctgttgaaagcccggagcgatgagattcttgttcagatgggagtgaatacatgaacagagtcaaaccttctatacgcaccagactgatgaggttacacacgatgcactctgcgtcatcgatatccagcgagtcatcttccgtcccgaatcggagtgccgtcaggaagaacgaaagcggaagagccaccctgtcagactgaccacttgacggttgttggagacatgatcgatagatcagtagcctggtggtggatgaagagaacgaaatgtcagctcgtaattctaacctttggcctctgtccgaagggtagctaggcagatacacagaaaggggattactgacgttcgtcgaaggagacttctccatacaaggatcacgcctttctctctcaacacgcctaacacctttttccgtctgaaccattccattcggtcgacccgttcattgcccccagtctctccaagcccacgccgccagctcctaagatctccgtatcgaattccgcaaacaagcgggccaaactgatccgtcagctgaaagtgatcgagcaacttcccggtcggaagcgtgccgagaaggatcgacgttgttaaaagagacaccaggatcaaccgacggttatggaacatcgcaagcgtattcgagggacagctcagaaatgctctgtgtaaggaggtgtgagcctagaagacagtggtgaaccatgcaggatgagtaaaacagaagcttcctctttcgttcatcagacactacccgaagccaaagacacttgttcagacagacctgtggaattcttcggtcacccaaaagccaagtgccttgggcctgctcgaatctgaccttgaccgcacgttcgacccatccttccttttctagcagccctagggaaggccggacaacttgtaggatctgcgcaccaagcttatgagtgtccaatctcgcatacactctaaataagatttcggccagcggaaacagtgcttgttttttcgacgggaccgatggtgacggatcccttgatgagagcgagagcgcatctcggatgggttggaagtattgttggattgccagatggatcagatgtggagttgatagctttatggtgcatgtgagcaagaataccggatgggctgctttagatattgatccggaaactctctcaactagacaaataagacacttactctcgtcgaagacaggtatagtttgtacgtcaaccgagagaataagacggcatatcttccaccttccgatgattgaaatactgaatggagagctctaagaatcgcaaacggctaacgagatcagcatcttcctagactatgtttctcctcctcttaagccgctccttagcttatatacttatgaaagcttacccttacttccaagatctaaaacaaagttcccatagaccccactcttcctccatctttgatccttccgagtttgtcccttgaatttcgtccagataggcttcccagaaatcttggacgtccttcgatggtgtcaggtggggaggaagcgagccaaaaatccctcggacgatagtaaccgaaagtgctgatttctgtaccatgtaagcgcgacggatcccgatgagccatatactctactgcgttgtatacaccattaatgtggttcttacaagttgatctcggacggcttgaatgatgaccggattagtgcatacatttgccagttgtagcgtggattgggctgttggagggacaaccgcttgggattgaacgatcgttccaaagaacagtttggcagaagcctgagtcgaggtctgcatgctttttgtttttcgtattgtccaatctgcctataatgggtcttccctctttctttctttttcttacaactaaagcgtatgcgatggagaacgatgggaaaaggagaagagctggtttaagaagagcgttgatggagttttgtcggtcaatgcaagtacacgcaatgtaaccttttcaagtaaggattccgtcgaatgcgcgtgttagggttaccgaaatgtttcagacgcgttcaacccatctgagacgcgtcacgcgttgcgcgtcgcgtctgttctcgatcttcaaacatctcctttcctgtctatcccctttcatctctcctatcgaccatcattccacacgtcccaaatatcgttctctctatcttgccttttgtgttgattgcctagcaagatactcgattatgtcggatagcgaatctactcctccgcctgatgcgcctaggcgaagtggcagacaaaccagaaaatcttcccagacaggtaggtccctcttccttcattctccaagaagcacctcgtttcgacggatctggcaggttgtccccgtgtgtgtgtgctgagattgttagcatacaactctgtttctgtcgcgtgcgctgttaattttgcatataagaaccaccccttcctgctcctcgagctacagtaaagaggacaggtgtagccggatcaaagcccatcaagtcgaaaacgaagccgaagagaggtctgaacaaagggtcggaagacgagtcgatggattcggaacagtctttgtctggctctgaagaagaagatcttaaagaatcagatgaagaagactcatactcggatcctgtgagttgatatctgttgacaggaggttgaataaagattaactgactcaacctctccaacgattcgtgtcttgtctccacgtctacttttcctgtcacacctccctttgaccatcttgtctatagtcttcaggtgaggaattcggaaagtccgccaacgcaaaaaactcgaaatcttccagagctcgaaagtctcatgttaatgacgatccagacgcgactccaaaggctaaaggaaagacgggggctcaaaagagacgcgctaggggctcaagagctagtggcaaaggagccggtgggtccaccaagaagccaagagttagcaagagcggagctgggaatgatactgcaacgactggagggatcagaaaggtatcagcaaatacagaagtggagagggatagcgttttctttagtaagctttcttcgtcaatagtggcatcatgtcctggtttcggctgatccagtttaatgctgaaaatttcctatatcttatgtttgtagacgcgttgattgatggccgtgcatttgaacctgtgatcgagaactgggcggaaacctacgaagaggaacaggaccaggcgttaggcgacttagtcattttcctaattagagttagtctctttcttttatcaaatccggtttggcgagagaagaagtttgatctagaggtcgtacccttcgcataaaggctgctggatcatcgtcaactgtaacacctgatgaggccgtcgatctagatggagtcgttagcagagtagacgatttagagaaagatgtgagtactctagacgtaaatcttccttgcgctgatatctgctgagctcagtcgaacgattcccttttgtaactcatacagaaatcccttggatcgtaccctctggtctcaagggataggaccttcaagcgtttccgaccttcccttgcgtctttcatttcagcttttgtactcaatctatctcagacccccattttgtactcgtccaccacgcacaagtctgaaccatcaccgatgatcgaggtcctacaatcatggctcttcacgctctcacactcgccgcttcgaagctttcgacacactggtactgtcatcgcgcttgagaccatgtcagctctatgtatcgttgcctctgaagtgagagaggagctcagcgtggctagtagacagcgtgaacaggagaagcgtaaagctggaaaagcgaccggtccggcgggcaaggctgccaaggagcgtttagtcgagttggagcgaaaagtaaaggaggtccattggaagaaaggcaaggttgacggataccttaacgagctcttcaatacgtacgtcgatgctctagggcttgtcgcttgattaggacatcacactaattgtggaccatgaatgtctttcttcggcatacagcgtctttgtgatgcgatacagagacttggatccaaacatccgtaccgagtgtgtgaagcaactgggaacttggatgacgactcttccagatgtgtatcttgaatcggcttacttcaaatacattggatggatgttggacgacatcgtaagtctatctttgaccggcatgcatgtttccaggaacttatttacaactcaacaaacatgtctcattctctctttaccaatcgatgtacaaagaacgctacaacccgacttgagaccgttcgagctctctctgttctttactcggacgaatcacatgcggcaagcctcagcacattcaccgagagattcaaatcccgaattcttgaaatggcattccatgatgtagaactctccgtccgaacgacctcaatcgagatcttgaaccacatcgagcgatcaggtatgcttgaggacgagaaacgacggcaagtcggtttactcgtatttgatgccgaacctagagtccgaaaggctgttgctgggttcttcgaagctcgatggatggaggagcgagatgaaacgattgaggagattgaagctgggcgccgaagggagaagaacctgtctctcgatgaagaggatgataccgaagaatctcaaagggtgttccaaacaagggtcggttggaaatcgctcgcctcgatgtttgttagattttctcaggccttagaggatgcctcaatttcgcctgagcgagacccaccagatgattccgatgccgcggatggtgctaaactcgttcgagacctaggagtcggagatattagcggaaaaggacgggtcgcgctcgccgtagagagcttgtgggacaaggtaggaagcttgagagactgggaagggttgacagaattcttgtgtctggaccattcacagaaagacagtcagcaggaggctagtcttgacagtggtgtggcggaggaggggtggaagttggaagaagaagaggaaggatgtctcttggaaatcttggtcactgggttgaagaaaaccaggcaggaagccgttcgcttggtcagtgtttcccttatcgttctagacactggatcgagaaatgcaaccactaacctttatatcttgtttcaatggaacaccctcctcacaggccaatgaggaatccactgttctgactgatatgactcgactcttaatcaacttcctaccaaagttgattgccaagtatcagagtgacaaccagcacttagtgtttgttctagcgattcctcttgtaatgaacctcgatatgtatcttgatctccgaatcactaccgttagttttctttctgttgtgaatcgtttgctatctgtctattgactctctgtgcgttgacctcccctgtcaaggcttacgaggccctctggaccgatctcattcgactgatcctcaagaattcggatttggccgtcttggatgcatcaatctcggcccttcaagcgatgttagcaacagaacctctagctaataccaacagtttgaagatcgccgagctagaggaggctctttttgctgctcttcgagcgatcgtcgcaggacgagacgtatacaccgccgcgttcacagacgaggaagtgggaagcttagagagttgttgcttaagaatcaagctattgcttggacagagagacttgaccgaggcaatggatgaggatgaaggaggaaaccagagcaatggttgggccgttttactagccttggtttcgagaggaacgctaggttacaaagaagagcgcaaggtgggttttcgctcttcaagctaagagcaatatcagctttgatgctcacctccttggcttctatctatacagctggtcgtcaatgctcttgaagcgttggctcggaatatattctggcgaacctcgaaggcgttagagaatgaggcactgcaacccacacttctcgagaagcgctcagcgcttcttgagttggtggaggagtgtgctatcggtacacagtctaatgccgttcaactcgttcgggctgctgtaagtgtacaactgaatttctctcaatcaggaagcaaacaaatgtccgttatagatggagataagtatctgatcacaagagacgttcttttaaatacaggctttcgatctgttacttcggttccacatcttgtacaaccatcaacccaatttgactcccgcagaacggaaaggagttgtgtatacggtgcctaaaccactgcaattatctctctccagtgaagcccaagccaagtgtgctgactacgttcgattagagatcgagcggtatatcgaggaccgctccgagctcgtcgctactcagaaggacgctgatgagtctagcgatgatggagacagtgatctggacgaggatgaaactggtctttcagactctaagaagattgcacgaaaggccaagagggtcaagcgtagcagagatgatggttcgtactacgttttaagtggtgaaagaaaaggcgatcaagctcaaactgatctctgctttttacatgtcttttctttctctgtttgtcattctctctatactcaacagacatcacgctcactagcgaagcagttcttgtccaggagcatcagttcatctcccttatcgccgcgttcgtgacggcacttaaaacggatgttctcgacattcagcatgcttccatcgtctttagccattacggtcgctttggaactgaatatgatatcctttgccgctcgcttgtggatgatgttcgttccattgcttgctatggagaaggccagcaagacaaaattgaaaaacttgtcctccaatcgctagagaatgtgagtatctttttatttacgctgaatggatctcgaagaataataagttcatttttttcaatccgtctttcacagtgctttgagctcttcctcgacgatcagattgatgaggcaactttcgtctcgcttgctaagctcctcacgagcagccttgtcgtttatggaacccagttcaagatcttaaagcatgttgatcccaaaacgcttacaagtgttcacaccactctgctcgatactttcttccgacgcttgggccagtttcagaagaacggaaacaagtccaaggccagaaaagtctactcttatttccgggcgttgattcccctttctgtcggaatgcagggcagagatgcgttgaagatgttagtctcgtcatctgttccatggttctatttttctctgacctttgatggctgatcttctcctatggcctttttttctcattctagtaaaatgtacttgcatgagatacttaccaagcttgagattgaggtgacttccaataaggtctgggacagctacaggacttacgagaagaaggtcagtttttcgtgccttttccctatcatgtcaacagctatagctcatctccaatggcttttcgctttgttcgacacagttgacgacgacgatgtccaaagattccagaattgcctctggcgctcggcttcaagtggcccaagcgacatcggataatgaagatgctaccaaaaaacgtccggccgccccgtcgcgcgatgtcgcgaagcgtaagcgaacatcatctaggatgattgataactccgattctgagcccgacgaggctgatgttggtaaagaggatgatgagcggaccaaaaagaaggctagacctaagccaaaggttcgaacagccaaccgaagtgcctcttctgacgatgaagaaagggctggtgggaacgaggaggtgtttgatgaggaagagttggtgatggatgctccatcgccggcttcgtccgaactctctgatcaagattccgagccgtcggctggttctaaattggcctctgttccgatcgcatccgagaacacagatgtagacgaggagatgctggacatgacccaagatgtggaaggtacgcttttatctatttctatttcctgatgtctgatagatgagctaaagttgttatcatgctgtcttgggttgtggctgtagaggaggaaatcatcgtgaagcccggaaagaggaccagaacaaagagatagtttcagatatcctatcgttacgagttgttcgtatttgtgtctatttccccttcattatatatacctggcacgcttttcgtttcaatctacatttggtagttgctttcgtgctcggttactactcagaattgactctcgtatggctcgatcaatagcacgattgtttttgtgtttatatttatacttccctcttctcgttctttaaatcaactttcatgattctttacgcagtatcgttctcttgatctattaaccgaagtcgtctccatgttgttttgtatgactgtatgctggcgatatctgcaacacaagacacttgaaccagttgttcggtcggtctaacaggtctttttcattgttgccagcaatcaaacgaacggccacaccgcttgatcgttgtctctttgagatggctccttcggcttcccctctaaaccgaaaaacacatattccgtccccatgccctctctatcaaccaatctctccgcgccctgtctgattctcttaccagtttcgtctggtttccctcttaccagaccatctaccctaggtatcaaacccatctgttcaagaaagtcggcctgagatatgggacccagcggtcttatttgggagccgaacggagaggccagcagagcagtacggaggtgagaaaagttgacatttgtagtcagatcagatagaccaggagtaagaaatggggacaaagcggcatgtgctttgaaagcctgcgtttacaagatagggaagggaaggagaagaaatggaaaagttgaggttacaaaagagggtcagatagagtaagcaggatacatttaggggaaacagggggacagcataccctgaagctttcactataaaatccatcctttccatagtcgatcactagaccgcttcctccaccagcatttttgccttcaaagagtagcgctcctaagcgtctcataattccaaacccaaccgccccgacctcgattctctgcccgatctcgaccttctcgaactcggcgcttgttgtggggatatatgttgaatatggggtcggctcgacagagagggtgaagtggaaagcaggcgaaggcggagtgtaagttacgaggagttcatggaagtgaggttttgaaagatcagtattctctggagaaggcgaggtcgttacaggagaaggctctggctcaagaggaggaggaacgcgctcgaggagatgaatgggtagagcatcgaaaaactcgtgtgcgctgaagagggtatatgcatcggctttgaatggtagatgcataaggtagatgagagagaaatcagaacggtcagtgtataagattatcagcgcgaggccagttgacgattaaactggagtttcacaaaaggactcacacactggaacttcctcgatccgatcaaaccacctgatctgaacatggctgccatccttcctctttagatatggttccaaagctttcttctgggcctctctcatgacaggagatgattcgactagatcgactgtttgaatcgtttcggccatgaatgaaaattgcttgaacgtctattccgagagaatgagatgagacgaggacaacgcctgaacgaggaggcacgatgcaggacaaggatacactcactcgaaggatatcggccatcaatgttcctctccctggtcctaattccaatagtctaacacttgaaggcgatccattggcttgccatcgagtgatcagccagatggcaattaactgtatgtattgggatgcaatcaggtacatcggtcaacgccgctgatgctgcttaaatgagctcaacacacaagtcaagagggatcaagtgttacctctccaaaaacttgcgagatttctgggctagtgatgaaatctcctttctctccaaggacgtcttccttggtggtatagtatccatgttctggatgtccgaggcagagtgtcatgtatcttgctagaggcattggaccagccgcctatcggatagaaacaaagtacaacagcagatttaagcttacggagagagatgaagctctagattaaaggaagcttacatcgatcgtcttgcgaaggatagatcccaaaggggtatcatcttcgggtataggcgtcggaggaggtttctgaaacgaccgagtagtatctacatcgagcgccgatgcggctgattttgagaacgagttgaaagaggagacatccgaagacgaaggaagcgaagagtacgatctgacaagattgcaaagtactctgctcggcctggatgatttctgtgaccggaggatagtgaacatcgtatgcgagtacgtgtatgtatgtacgtgtgtccaacgatcaagagatggaaactcgaagaggataggcgatcgcttacgtaagtcagttccacttgatttccatacttcgtcctcatctattcgctcactcgacgcactctgtacaaccacttcgttgatcgtcttactccatctgccgttctttccaacaatggtgagctcaggaatgagatcagggatatgaacgaatgtgcttctggtcaacagctgacttgtttgcctactctcttttgctcttctcattagtccacagcctgtcgtcgacgacttattcgagatttcaagcggctctcgtcagatccaccgtttggagtctctggtgccccctgtgcagataacttgatgttgtggaacgctgtaatctttggtccaggtacgtttcgtctaattatggagaacatgacttcaatttagccatagtctggctctggttattttgatgattgaagaccgtccacgagagagaacgaacattcctgtcccttgcacccatcgaggcacgagaacactgacatgtagtttccataccgaacacacagccgaaactccttttgaagatgggacgttccggttgattctatcgttcgaagaaagttaccctaacaaaccgccgacggtcaagttcttgtccaagatgttccatcccaacgtgtatgccaacggagagctttgcttggatattcttcagaatagatggtcgccaacatatgatgtggctgctatcttgactagtatccagagtcttttcaacgaccctaacccaaacaggtaagtcacagcatgatacgaaccaaccttcttgcgtacagaaatccatcgacaactgcttacttggacgcgtcacactatcatcgtatgttccccaatcagtcccgccaacgctgaagctgctcagctctatcgagacagtatgaaggagtatgtccggcgagtcaagcagacagttgaggcatcttggatggaagggtctgacttgaccggtgatgatgacgaggatgaagacgaggacgacgacgaagagggagaggcagaggaggagaatggagaaataggcgaggcagcaatgagtggagtagaaggcactcgttagtctccaggcaagtccaatatctattccttcagacatctgcttccatggtctcacgattatgtctgtccgtctcactaacgtctattttgatttcaggatgcagaacgattttttttaaaacttccctctcgtttgctctctgttcattcaactgaggtttcttcttctcttcttctctgccctgacgttcatttccgtctcacgaccatattcgcatacatcggactcggttgtcgtcgagttcgcttgtcgcattgttcaaaccatcacatcacgccctcatcatcgagtctttctctacttaattcattacttgatcgctaccatgttccttactctacctaagcttttcgttgtttctcgcgcccttctttctctcgtcctattcagcgtacgagcttatttgttgtaactctgtccgactttccttcattatgtctctttttcttcttcgctgcgatatgtgtgcatatatgtgtcgtgcagtgagatcttaggcttcgtgcgttgtagccaacgcatgtttacataatcggagcgaactttctttgtctcgtcaccttctttgtctttcaacagtttatcatcgtcctcctatatcatctcgattaccttcgaagttcttcacgcaacgttcagctgctatcatgcagggcacgcccactccgagcacacggcctaagaagcgatcccttctctcccaggcggtcggttctccaagcacatcctcttccacccctgtctcgacaggaacatctccttttatccgatctcaccaccttccagataccgagtctcccttacgagcatactcttcttcgtcttctttgtcatctaactcaacatcgaattcgaatcaggctcacatcccggcagtccatgcctcgtcaccgaggtgctcctcagcctcagcagtccaaacacctaccagacggccgatctttcaacctcctacccctgccagtctcaccagaggaggctcgaccgttccttttgactttgaaggaagcaggagagctgcaaagaaggcgctggctaaagaaagcccggcagcaaggggatcgagagattcggtaggtggaactccgagtggacaaaaaccaaaaagatttgtgagaaagagacctttgatggacaggtgcgtgaaactctccttggccttgtacttgaaaccgatggttattctttcctaccttgctgattttgaaaatttctcgtggaccaaccatcggcgctccgtcagaattcaagacttgcctcatgacgccctcaatcggatccaagcttcctttccagactttataaggattgcccgaccactaggcctcattctaacattcttccagttcttgctaagggcgcctctgttctcaagttctcaatacaggaaaccaaacattcttagaaacagatcgataggggatagaccactgggaggaaggtacgatgctgatttggagcctgccactggtagatcatggggctggggtcattgggtatgttgcctttctcaacactcttcgaggtttcgatctatatgttgatagtgctttcgtagtccacttggctatcaattttgttcttcattgtgggagctctaaatgccatgtatctattcacccgaacaagatcatatcgaatgcatctccgtacggtaagcatcagacaccattctacattctctgagacttctgccgtacctatgccgaccaccgcacgcatctttctcaatgctgcacgcgcatcttcttaccaggacccgatctcgagtccgaatgctaaggctgtggaggaagatgaggtcatggaggattccgaaggaatcagccatcttaaatccgctcaattcacagatccggctttgtatcgagccggacttatttggatcctgtcagtttcctcgtttcttgtgtgggcactatctggcaaacttgggcactgaagtttgtttggctgattcatccgaaaacacatgttgacgtgtgtcctttaggaaacggctgaacccgattcctctacttcgattcttgatttctctaccagcggcttcggatacggataaacatcagtcgcaaaggaggcgaaggatggtccaacagttggatatctggtcgcctccggatttcaatctccagttcttttcgttcgtcgttctatctctctcagtgtctacaacctcgatctatcagtttatcttttcttcttcatgggcatgtatatctataggacatacactccaccggcctctttactgcttcacctggtgaccccctacgcgcctttctctgctcttcttgccgcattcacagtcaattttacagtctatctactggtggccaagtatacggagatggttaaggacagagaagtcattcatagtgaggtgatgcgcgagtacgatcagcgtgtgagttcctttcttctcccacttcttgtttggttcgagccgaacacggttcttatcaaagggatttttcttggacatatgggtggtagttcgtatacccttcgcttttcaaacaaagaaaagaaatcggcgtgatgacacatcaggcagagattgtttggtagttgcaagccagcgagttttctctatcttgaccacatcttgaaaatcgcctttttgctatatagatattttagctcaaggcatagtgcgcatcttcgcttcttacaaactttgcctaattgacatgtataacaagggtcgagctatggacagtgagatagatgaagagtgtggcataagcaaaaaagaaaaagaagaaaagaaaaaacggaaaatatatgtaaatgagagattctatgaatccccgcgtctgtctttttcattcctacaacctacgccatcacctctccctcctttagcaagcacgtttccttttttcctaattttcctatcggacgatcaaggacggtctcggcacataaaatatgatacctacgttctccaggttgaaacctttaccgttccttcctcgaacgatcaagcaactcctccagacgagcttccccccggctgttcagccgacgcggccgacaggcgatcaaccttcttccgttctttcgacttcaccgtcgccgatactagcatcagcatcaacgccgctgtcagcccagagcgacacaacgacagtacatggatgggtgtctaacattcaagtcaagaaacatgtggcgtttttgaaaattagagacggaacttcggatgaggctctacaagtcgtcgtgtcggggaagaaggatgatctgtcgtctggtggggaccttcgaaggttcattctcgttcgcctctatctatctatctattcattcgtacttcgatggctattttgtatattatttggggctcagaactgatcgcttaatcattatatctgacaggacggtcgaatcattaacaagaggatcgtctgtcaagatacaaggggagctgatcccttctcccggagctggacaacctgtagagctccaggccaagatcttgacggtgttgggcgaatgtgatagccaggtaaactcaaatctcggtttgaactctgaacgactggccatctttgatctgagctgataggagggcgatcttctgctttcaatttcttgttgtgtgtgtgtttaaacatgcttaatccaagacatatttaattgagccatcggtagtaccgagttctaccaaagaccgatcaagaccggtcaagacaactaaccgaccgacggttcatcttcgggagctcgctcatctgaggatgagggaaagggaaaacgcagctgtcgtcagagtgagagatcgggtagcgagggagtggagatcgttccttgaggtgggtgagtctctctgacaaattcctctccgctcttaattgctgaagaagggacggagtgaaaagagggactaatgtcctatgatgttctcttttgggcgcgagggtttgtgaaggaaaatgactttgtgcatatacatacaccattaatcactagtattgattgtgaaggaggcggcgagatcttccgggtaaccgcgccttctttgaacgagaccgtcagaacggataagccgccggaggcgttctttccggaaccaccgggtgcgagcctgacggtctctgctcaacttcacctcgagacgtacttgccggtctgtccaagggcgtacacactctcgacatccttccgggccgagccttcacgatcgagtaggcatctggcagagtttacaatgctcgaggtcgagctcgcttttgtcaatcgggtggacgagttaatggatttcaccgagcaaggcgtcaagagcgtgcttcgaggtctctcgagaggactcagtttaggcgacggacaaacggaggaaatggcgaagaagatagaaaaggaagaagacccggacgctggtgccgggataggggtattctgggcaaagccgggaacgacagagaagattcgatcggcaatagagaaaccgttcgggagactgtcatacacggaggcgattgagctgctgaaacgcgctcacgcggagattccgtttgagcttgagcctgtggacggacagacccttcaaacagagcacgagcagtggctggcctcgagagaaggtgggccagtattcgtatacgattacccggccagtttcaaggcattctacatgttaccgaacgaagacaacaaagcgggcacggtggcctgtttcgatctgttggtaccaggggtgggcgagttggcgggcggaagtctgcgtgagcatcgactggatccattgttggatgtgatgcggtgtgtacttttctttcatacgatagttttcttctctcgagtctttagttcctactgtatctgacgacatgtgtcaacgtgcttgttcttgcagacaaagaaacatgtcgaccgaaccgttagaatggtacctcgatcaacggcgttacggctctgtcccccacggtggatttggtcttgggttcgatagaatggtctcctgggtcacaggagtgagtaacctgaaggatattgttggatttcctcggttcaagggaggatgtgtctgttgaggaacgaatgaaatgggtagaccgggtagaccgaatagactgaatggacagaactaaagcgtgtttgaaaacgtgaatatcaacatgagtatgatgcgcagataatcggtatcggggcgaaagcaagataacgagtgggcggataagtagacgatcagaatgaacaacacagctgattagaataaacactagaaatttcattacactaaattccccgcgcaaggccgatggatgaatgatggctatctgctcccttcaccttctcggtgcgataatcctcggtgcgatcgacatttttttctccctcttaaacaggccagcctgggatagaacgtcttctttccttttccctcttctctcttaccatcgattacctcttctcctctccctctctctcctccttcgatgctctcctcatccaggctctcggccgtcgttcggcggtcagccaaacagcaaagtcatcctctcgccctggttagcaagtctcttcaggcacgctcactttccatcaagagcacctctcctgttctttcttccaagagaacggtctcccagacgagtccggctcttccttatgccactcctgtggactcgtgagtgggcaaggtgctctcgatcttatccattgtgcaaccctaacaattcggcctatctttttccaaaaacacgtctttctccatccccctcatacagtatctttgctccgcttgaccttcaccccgagaggcacatcggtcccgatgcacacgagactgagcaaatgctcgctcggttgggctacgattcgatggacgctttcatcgccgcttccgttcccgaatccattcgaatcaacccgtctatcgtgtcggacgagaccatccagccttactcggattccgagttttctaagcgggcgagagaagtcgctggaatgaataaggtcttcaagagttacatcggaatgggttaccatgaagccgtcgttcctggagtgattctcagaaacgtaaatcaaacttcaccgctctctctctatatgcgcataaagcctaccgatcttggttaagagctgatcacctgcccgctttaccatttgctctcatcatttaaacatccgaaggttaccgaaaaccctgcgtggtacacttcctacacaccttaccagccagagatcgcccagggtcgattggagtccttggtcaactatcagaccatggttacctctcttaccggccttgagtttgccaatgccagtttacttgatgaaggaacggccgcggccgaaggtttgtctcccatccacctttgccctgttcaattcaactcagataacgcagtgactgactgaccgaatgattgtctgcctcaatcaatcaagccatgattatgtcaatgaacgctgccaagggaaaaaagacctatatcgtcggctctggtgtggtgtgtacccacgattatgagtgaatcgcagcttttgaacgcccttcagctgaccagtcttatctattcgataccttcttagctccctcaaacattatctgtcatccgaactcgagccaagggttttggtgtcaagattattgttggttcgcccgatgagcttctcgagaagcccgagatcgccaaggacctctgcggtatccttgtccagtatccagacgtcaacggagaaatccgaaactgggaaagcaccgctaagaaagtccacgagctgggcggaaaggtctcggtcgctaccgatctgttggcgttgactttgctcaaggtttgtctgcttttttcactctgctctcagataaaacttaacttcttgctgatactcatgcggctgctcatgtacctgattctatagcctccgggcgaatggggagccgacatggtccttggaaactcggctcgattcggagttccggccggatacggtggacctcatgccgcgtttttctcttgcaaggatgctttgaagagaaagatgcctggacgaattattggtcttagcaagggttccaacggagagagagcctatcgactggctttgcagactcgagagcaacacatccgacgagagaaggctaccagtaatatctgtaccgctcaggctttgctcgccaacatggcggctatgtacgccgtttatcacggaccggaaggactcaagcgaattgccaccaaagttcacgggctgactcatattttgagagagattctggtctccttcccctcatcgccttatcagatcgttaacaaacacttctttgataccctcaccatctcggtctcttccgacctgggcgctgaggccctgcatgccattgctgccgactcgtcgatcaaccttagaaggatcgacgagcagacggttggtgtgacccttgacgagagtgttggattggttgacctcatgaagttggtcaacgtgttcgcaaaggctgccggtacagagcagtttaaggctcaacagctcatcaacaaggcaaacgaagtcggagcaaccggaattgctggcgaggttttcatggacgagcagttcagacggtcgagcccatttttgaccaaccccgttttcaatactcaccactcggagacggagatgctccgatacctctacttcttacaaggaaaggatctatccctggtccactcgatgatccctcttggaagttgtaccatgaagctgaacagtaatgcatccatggttcccttgacgcttcccggctttggaggtatccatcctttcgcccctgcagaccagaccaagggttaccaggagcttatcaaggaactcgagcatgaccttgccatcgtcactggttatcatgctgtttcccttcagcccaactcaggagctcagggagagtttgccggacttttggtcatcaaggcctactttgattctatcggacagagccagagagatatctgcctggttcccgtcagtgcgcacggtactaacccagcttctgccgttatggctggaatgaaggtcgtttctgtcaaagttttggccaacggtgagcttgatatggccgacctccgagccaaggttgaacagcacaaggataggttggctgcattcatggtcacctacccgtctacttttggtgtgtttgagcaaggtgttcaggaggcctgtcagattgtgcacgacaacggtggacaagtttacttggatggtgccaacttgaacgctcagatgggtctcacaaaccctgtcgcttgtggaagtgatgtatctcatcttaaccttcacaagacctttggaattccccacggaggaggaggaccaggagtcggacctatcggtgtgcgagagcacttggctccgttcttacccggccacgccatcgtcaagaccggtggatcccaggccattgattccgtctcttccgctccctggggaagtgcgtccatccttcctatctcctgggcatttattaagatgcttggaggaactggattgaccaactcggccaagacatctattttgtctgccaactacatcgccaagcgattggaaggcgcttacaaactgagattcagcaatgagaatgggctggttgctcacgagcttttgttggacctggccgagtttgagccaacgacaggcttgaaggtcatggactttgctaagcgtcttcaagactttggaattcacccgcctacctgctcctggccgatctctactggaatgctcatcgaaccaaccgagtcagagagcctcaccgagattgaccgattctgtgatgcgatgctccagattcgaaaagaagttcaggcgattgctgacggaaagcagccaaagggaaacaacgtgatctctcacgcgcctcacaccgtcgccgtgctgacgttgcccgacgacaagtggaatcgaccttacacccgagaggaagccgtttacccgcttccttcgctgaggaccaacaagttctggcccacggttggccgaatcgatgacgcctttggggacatgaacctggtctgcaattgtcctacagttgaagaattggcgatcgatatcgatgcctagatttagcccagctcggtttcctcatcccatactttcttctaccttggtcactcttagcttgtgattcctttttttcttcttcctcttcctttttatgctttcgtcggtattgtttcttctttcggtttcttaggttcggatatagactagatttcggttcagggtcctcattctttacatttatcatctttctcctctgcattcaactcttactcgtttcaacaatcgagatctgttggctcgctttaatttttttatcttctcggcttatctctatttgcatttcgcgtcgttctcctttttcactcttgtatatgcattctgttcatccagacaaaccgaacgccgatctcatacgcgcgatgccttgttcgtctccaggcacgtcttccagaaccgatcctcccaccaatcaccctcgaccttcttcgggcgcactctaccgctccgtttacctttcctcacatgagttgtagaggtgttgtcatcctcactctcgaccgatgacgacgaggacgagtctagatcgtctaaagagagataccaaagttcagaaatgtcatgtgcgcgcaagtagtcgtgtaacttgtgatagttcaggccgacggcctgaggtccatgggagtcatctgagagacacagtcgacctttagcagagacaaccaacttttaaagaagtcggacaggtatagatgttagttttgtactcgaaagatggagaaggagaagagaaggggggattgaaagatgtacctcaagaatctcccaactcgggtatgcctcattccatcctttcctgaatgcggcagcgttcaactcaaacaacgcgccataatcgacagcctccttgacgtttcttttgactttcgaccagatggatccctttccaagcgtacgaaggctccatgaaggattccatagtttgataaggtcgaaatggccgataacctctggtcggattgttcgcatgagctcaaactgcccgtccagataggcttcgatcaagtcgacgattcgctcatcttctgtgacagtatcaggatcggacccagatggaacacatgagcgaacggcatgtaggaaagtgggctcatcaaagtcgatagggatctgatgaacgtggtgtagactgccaacgacatagtcgattcgagacgcttgtgcctcgagtagagcggataggccagtcaggtctaacggagtgatcaaatcggtttcaattcctatgagaagagtgatttctgaagagtagattgctcgaagtcggtgcgcttcgtcaagaaacgaaagatagatttcgtgcaaggctgtcggactcaagtcggactggacgagttgaagaatagcagaaagccggggtcagtagcgcgagacgatacgttgtatgcagagaaattaacagagctctgacttcttcaggatagagatcctgctgacgatatctatggagagagcagagaaagcacagatagattctgacatcagtctttcatttcagaagaagagaagaaagaaacatctggacgaacctgggtgcatgctccgataggccgaaagtggtgaacccctgcttgatggcctcttgaacaacttgttcgagtgtacctttggcgtgtctacaaaactgacctgagtctaaatttcaagaaatgagacctgaccgaacaacacgaacgtggacaaggggagaagactgactaacgagaatgatgagattgaggcattgctgaactagctgactgaccggctggctgatggtagtcggcagttgatggacgagatcaaatccggctcactttctcccatctccatcatcgtcatcagctatcgatatcatcttatccacagcgacatacgcaacggaaccagcagacacacatatacacatatatacagactactctgatggataccctcaaggctatccagacctatctggatcggatgctcacagaggtctctgggatgaaggttcttctgcttgatgcccatacggtcagctgcgaaccctcttgatctcttctctatattgccgtcgacgaacagttgattcaagatgtctccctttctggacctacatagactcctatcctctcactggtggccactcagtcgtctctattatctcatgaggtttatctcacagaccggattgacaagtacgcattcaagtctgtctatccggagtgttgtcggagtctaaccgcggtttctatccctttatcccggatccaaatcaattgtttaacagcccaaaacgagacaggatgcctcatctgaagtgtatcatgttcatctcccctgatccagaaaccttagaatgggccaaggaggaactggctcagccgaggtatggtaactactggctatgtgagtgcttccgttgcattcattcatgattcactgaggatatacaacatggtcgcgaccgctgacgctctcagatatatgttgtgcttgatgggtgggtagacttttcgaatgtgctgacaaagtcatcgattgaactgctggctcaagccgatgagttcgaagtcgtcaaggaagtccaggtgcgtgtagccatgttgggttctccccttccatgctctctatttgattgcctcgtggttaatcgcttctctgcaactccctccttcaggaatattttgccgactatctctccatccttccgaacctattcaccttgtctgcacctccattatcttcctcaccacatgtgtgtcctacctccactcatctcatcttatgtttgaccctatggcttaatcatctcttacctttcactgtctactagtcttccctaccgcctgttccgctttactcgtccactcctcacatcttcaatcctccaatgctggacattcatctacaaggcctgctatctcttcttctatcgctgaaaaagaaaccggtaattcggtgggagcgcatgagcggtgtcgcgaaaaagctagcggaggaagttggctcggccatcacagaccagtcaggaggggtgtatggagatttgtttggattcaaaggaacgagcgggccagcgcctgtactgataatgttaggtaagtacttgtgaaatttcttcctcttttccgtatgccgagtctcagcgatgttctaagcgcatgttgttttcatcccgtgtggtcgtctggcgaacgaacgtctgtacagatcggagaaacgatcctgtcacgccgctcctatcccaatggacatatcaagctatggttcatgagcttgtaggaattgttaacggtcgagtccgtttagaggatgaaactagaccggaacttaaggttcgagaattctcctcatatttgaacttctatctcttgttctgcccctatttaaacaactttcccctacgtattttatgcaggaagtcatcctctccccctctcaagatcccttcttttcgacccacctgttttccaactttggtgatctgggtgcttcccttgcgacttacgtttctgagtttcagaaacggtcgaccgtggcatccaatccaggctctatcgagaccgtggctgatatgaaacgttttgtggaggagtatccagagttccgaaagttaggaggaaatgtcagcaagcatgttgcactcgtgggcgagcttagtcggattgtagaaagggatgggctacttggaatcagtgagctggaacagagcttagcgagtaatgagagtcatacggcggatctcaaggttggttttcttgttgccctgtatgagtagtgtcttgtttttgactctagtgcttctgcctatcaattgttatgttatccctcagaatgttcttaacctgctctcgactccatctatcccttcgggaaacaaactgcggctcgctattctttacgcgctcagatatcaacggttctcggccaacgcaattcctcatgtggtcgatacgttgattaataatggattgaacccggacagagctcgtgtatgttatctctcttctcccttttatgtgttgtatctcagctcatatttctctgttcacctgatcccttcgctctctctacagttagtgtatgctatgctcaactttgcgggagcagaccaacggcaggacgatctgttcatgaacgagaaccttttctctagaggaaaaagtctcgttaaagggttgcaggttcgtttggtttatatatacattttcttcttcgttcttcactttcgatgatctcatatttacatcgagttttctctttgattctcatcgacagggcgtggagaatgtgtacacccagcacaaaccacatctccttcaaacagtagatttgctcttgaaaggccgactcaaggaaacaagctatccatacttagaagtggaagaaagtggaatctctgcgagtgttgctcgaactcaacggtccgttgtttccttgacacttggtttaatttcttttattcgcgagtagagatgaacgaagcaatcctgacgctcctggatggtcattttggtgaagagtagacctcaggatattatcctcttcatggtaggcggaacgacatacgaggaagcccgggctgtggcgttactgaaccagcaacttcaagctagtgcaaacgctacctctggtaacccaagctcagctcctcggatcttgctcggtggaacatgtgttcacaattcgaagaggtcagtctcaattttcttctttcatttggctctttcacttcttttccgatgtttcactgactagaaatatttctttgtgttgatctacgacaatagtttccttgatatggtcgaagaatcagctactcgatttcctccttcgttttattctcccccttccacaatgacttctgttcctacgcctctcggtcttgggcttcctcaattatctcatcttcttccatcttcttccaatggatcatctccttccttgcctcaaaactccactggcaacaacctgaacacatcctctctcaaccctacattaccgacaacaacaacaacgacgaacgcctcaactccgacagtaacgagttcagctccatctacgaacacatcctcaacattcctagcaggcgcaccggcgatcaacctccgtctaggaaaatacgaagtcggtacagccggcgtgtaccgaacttctggtggttcatcgtcgtcttctggcggtctacagattgatggaaacagggtcaaagaagggttgaccaatggtctagccggagccagagatctgggagggagtatcttgggaagagtcaggcaggaggttgaagccagacgaggaggcgcgacgtaaattgatatgggttaatgtcacttcgcacaagtatctccctcaacgcttgatcttcagatcgagaagtaagcgaatttttactaagagtaagagaaatgtaaagagaatgcatcatcacatatcgtaagagccataagatgagagtgtcaacatgcgaaaaagaggaacgggaagattgtaggaggaaagagtttaacggatgaggaaactcatgcaaaattgcggagaaagatcattataaacatcgtaaaaatcaagagaatttgaaaaattgagaggccaagaaaaagcttacatcaatgtttatgaaggagaaaaagtgcaacttagctggcaaagatgtaaagtacacatccgcagaaagaggatgtaaaaaaaacatgtcggaaacctgaagacagagcgaaagaggattttgaagttgaacgggtgcgctaaccctgtgatgacagacaatccaaggctgcgtcgttatcaagcaaaactgcgggctgatcctaggactgagattggtgttggcggtaccacttcgatagatacaggggttggtctcaaagtagggatgctctcatttgattcccgaaccgaacctgtaggtagagtcttggtcggcgatattaaagatgtcgatgatgtaggtaagactggtgctggtgcaggcgaggaagagagttccaaagatgggagtggcgaaaaggagagtttcactccgaggaaatcctcagggaacggatccagccgttctgctgatgtcgttgtcgtcgtcaaggatgaaggttcttcggatgtttttggcgctaatatggagttgctagaggttgtatattcttctgatgagtcagcattaagacgtgaagacggaatagtcaactcagccgggatctgtgacgatggcggcggcgacgtttccagcgagacagaaggaggaggaagatcaggcgatagggacggcgacgctgatgaggctgaagacggaactgggggagcatcgagaccgtcgattccagaggtggagggtccttcagatgtaatgtcgaacgctggaggtggaacatcgggctctatcgatcgtcgacggtcaaaagaggctctcgaggctgattcgccaaatggtatagctagtaaatagtagaacaaaaaaaaagcgaatggtgagaaggtcagatcgaaagaaaagaaaaaacaaaagaaggaaatctggaagcctaccatatttgttgagattctcggtagaactatcattgcggatttcagacggaaagactttgctcagcgcgtgtctctttgttgcgatgaaggaaaaaaacgagtactgcccgcctaacttacctgatgaatttcatctctatttcaaggaggaacatcgcatagcaacaaaatagtttagacgtgtttgagaggattatacgaaagccacgaaacccccaatgaagggatacggaagagatggaactcacgatcttgcgttaatcccgacctcggaacctcgtacactgatcctctcaccacactttctggtaacggcgccgaaatacttaaagtacttgggctcgtcagcctggtcctcatatcgatagatgacctgctcgtcgtcgggtgcaagaggagtgagatattcgatgatctgaatggattcgctgatcctcctccggtatctatagaagaagccgagtttctacttcgatgttgctggtaaggttgtctattttgttgatgatccggccgagtttcaactcgtgccccactcgggcctgaactcgcgcgcgcatcatctactgagagcgtctgatgatcgctcgcttgtcttgctgttcttccgacgccggctctcgagaaaaatgctctgtacccagactgtcgtctcggttgatctgagtcggccgtatttgccgctgtagttgcgttcagaagttcaactgtacctgagtgagcgggagcagaagaatcatctgactggagagctgtaggaggtacgccttgttcggtatagagtggtgcctcgccccaaccgtttgttaggatcaaccgttgagtactcgtcgagcctcctatttgaccttctgaatgactctcatcgctcgctatcgtaatatccgtcaatacggtagagacagagtggcctctgttcctacctactactagatctccagctagatgctcggccggaagagctatgtgattcgaaagaggagattcatcagaatttgacggaagcgagtcgacagaagctcgacggtatgtgtcggtggtagtgatatcttcttcgtctgctgcttctcctctaaagtaagattgaaaaggataaacaagatacatcaggtcaaaacgttacaacactgtgtgcgcttgatgcatggaagacgattagacctacttcatcaaagccctggttaacccattcaaggttgagaaaacaacacacatgatcagcctcagatatatcacctcactcaaattcagtcagaagggaacaggatcggtgagaagaagaaacgtacatctcgctttcatctaaatcttctctatatcgcggcaaagtccttacactccttaacgaaccgtgcgtcctccttctttctctctccgccgctaaatttctcctcgcatccctcaagtttatctccgcctgtgtcaatactgtaggtcctgatgattcggcagttccgcttactgcttgtctagatctagtcgtgacactcataggtgttgatgattcgtcggttcctacaggggcggatgcacgtccagagaacagttggcgaacgaacgcattccatttcggacggcgctggacttgaacgactttagttgttccagaagatcaagaatagaagaaattccagccaggcagatgatcagctcacgaaaagctttaaaatctcacaataagaaaatcgtgagcaaggagaaagacgaaaggaggccaaaccaagaatgatgacgacaaagagcgagacgacgaccacaggaataactatgctgattatgctgaccgtgcccgagttggagtcatctctacgctgaatgtgatgtgctgccgttcctatctcgagatcttttgggcacgacgagtccaacgatgatcttgacgaagaacgagacatttcgccccatagcacaggtctagcagccgacgttctcatccctagagaccctacaaacccccagacggaccgacggacaacttggcttatcatttcaatcgactctgacgacgattcggactctgacaggttataacttccttgttcctgctcaacgtgttcgcgttcgtgcagttctttcttaaatttgtgttctttgacgatcgcattggagatggtgaccactcgggacgagattgctaaagggaatgctcattaggtaatcactgcgcatgacaacacacgtgaattgattgtcgtagaacagcctctttgtgttccttctcgcttagatgtgtccgacaaggaagaaacataaagatcaatgaagagaggaaagaggccaacccctaggccccaaaatgggatgaagatagaacccgaccatgaagaatgagagcgattacaaaaaaaagaatgcaaggagggtgggagggccgacgtctaatgaattggaaccccagagcccattctaaagcgacccactaaggaaaagaaggaaacgaaatacgatcgaatagagtcggcccaaggaaaccaagcctgggttttaccttgtgccagagagccagaaagagaaggaacagagaagtagatgaaagattacaaaaagagacgataaagaaagcttaagagcagagatatatatagagaaccttgaatgaggacatcggacagcctactgaggccatccggatccaatctggtggacactgaaaccgatctttcgaagggcaggagcatccaagatgagtcgtccgtcgaagacgaaagcaggcttgctcatcttctcgtagaccgaactccagtcaagagtcttgaactcgtcccactcggtggcgatgacaatagcggcagctccttcacaggcatcaagtgccgacttggagatggtaaccttcttcttgtacttggtaaggtcgtttcctccctcctcgagatcctgccaaatctgggcctcaccaacctgaggatcgtacaccgaaacgttggcggactcgtccacaaagttgtggatgagcttgatggaggcagactctcgggtgtctccagtgtccttcttgaaggcgaatccaagaacggcaatctttttgttggtgacggtagagaacaaggtcttgacgatgtttccagagaacctgttcttctggtactcgttcatgtcaaccacagccttccagtaagcggcaacctcaggaaggtgcaagctctcagaaaggtaaaccaagttaaggatactagtgacagattcaagaacaaggtcagtctcttcgcaaccaagctcatacaagggagacatatcaaaggaaatgaacttactctttctggaagcacgatcctccgaaaccgacggaagccttaaggaacttggctccgattcgggtgtcctttccgacggcgaaggcaacctcgtcaatgttggctccagtggcctcacagatggcggaaagggcgttgacggaggaaattcgctgagcaagcatggcgttggcagcaagcttggaaagctcggaagaccagagaccaacagtcaaaattcgctccttgctgtaagaggcaccggtgcaacgacagatcgttagaaaggaagcgttggctgcaagaaaaagctctgaaaactcacggaacccagttggcgtaaacatcggcaagagcctcgcaagctcggagaccactctcggtctggagggatccgatgagaactctgtcaggagcaaagagatcggcgatggcggttccctcggcaaggaactcggggttggaaagaatgtcaaagttcactccaggcttagcgttggcgtcgaggatggctcgcatcgactcagcggttcggcaagggacagtggacttctcaacaacgatcttgttggaggtggcaattcgagcaatctgtcgggtggcaagctcaatgtagctgagaagcgagatggaaaggcggtgataagtatgcgatgggaaggtgagaatccggaaataatatgtactcacttgagatcggcagcgaatcccttaccaactccgctcttcttggtgggagtctacatagtccaatataaagttaggaccaaaagtcaagataaggattggcgtggagagtactaacgttaacagactatgaaatcacaaagaaggaagcgaaaatctgattagtccacgttacaaacgacaaataataaacggctgtatacataccacaaagatcaagtcagcctcggcgatagccttgtcgacatcggtggagaagaacaagtttcggcctcggcatcccttgataacatcaacaagcccaggctcgtagatagga

SEQ ID NO: 3048 - DNA, 17917 bp, Xanthophyllomyces dendrorhous
gaagggaagaacaaagaaaaaggagaaattccgactttaagaggtggcccgtgcttaagtctcgctcgggatttgcctaggggatttggtgcgcagttttgtctcgcgtcctgatcgtctgaaccgctagcggcaggatgctcgggccaaatggtgtgattaggtaaggagaacgcgtcgcgtcgtttggcgtcgcgtctttcgcagatcacgtgattcaaactcatttaatatacccaatcttctttctctcactttcctccgtgtttcagcatatgcacacacacttgctctctaaacctttcgcaaatggatcgagcatgtcctacagacagaccgttcatcagagtgtataaccctcatcaagtcacgtctgatatctctcaggtaacccaaactgttcatctgcatcgtgaggtctaccgcgatgatcgcaacctccgtacttgtgccaaaaacaaggataagtgcaaaggcaaagagcgagcacagaccgaagatcaaccctatccagtaacgtatgctctacgaaggatatcttcgccgccttcgcgctcgatatacagatacctacctcaggtgcccatccccacgtggggtctatccgcccagctgggagaagagatcaaatctccattagccgaggaagagcgctggtggttcgagcaacatggtcatcattcctggttgaccgccggtgagaaaagaaaacgtcaacgttctccctcgttgctgtcttcaccgccgaataaaaagagatggagacatgactggtccgttatcgggcgtgcttttgatctcgttgatttggtacgtgtacatctctctggttcttcctcttcgtcgtgtccgtcacgttgatctgtcctcttcgtattcctttatatttttctttcccttcgcacgtcctccctgaacttgatctagcctcatgtgttctacccgagaacacacacatttcctccggtttccgatattcttatctctccctttccaacatacaaaacctatccaccctctgacccgtccctacccctgtcactcgtctcatctgggccgtctagatatggggagaaacgagtaaaatggctggtaccgatccacggaccagtttggggtcttcctaatgatgatactgccagccaaggccggttggttgttgacactctagacggcgataacgatcaagtcggagaaaagttaaggaaaatccatcaaaagatgtttcgtcgaatcaaaacgttctcctcatttcatcccgtaacaacttctgatattgaacccagtcggtcatcacatcatcgttcagaaccaccaccgccctcacttgattggactccgacgattctttcttcgttccatactgcacttcagaaactaagtgagaaaaaccagcttggcccaatctcggtcgtcctccatcattcgacatttccatctaccttcacacatccttatcctcgttctcgttcccatacacgttcttctactcgctctcattcttgtgcttcttcgcttccttcggcctcaacctcatcgtcaacctcatccttgacagagccgtcacctcagcaaacgattcatatcggggaccactaccggatctacgttgacctcacatatgcatctcatgttcgatccattcttgatagcgtcgatcttcgattcggtccggattccagtaaagaccgctgtttgttcttcaagggtgccagacttgtcttggtggatgacgtcgggactctactctgtctggcttgagatcattcatactcggggagggatctcctctttctcctttccctttcccttccattccctcttcttttcgttcttcctcttttaggtcgctctttcggctttagcatgaatcaagtctagaggcatgatgtttgtcatcaaagtgtatgcagtagaattgtatgaaaagaaattaaaattcccaactctttgagaagaacactattcaaatttgactccagtcaccctctcgaacgcctctctgtatcgtccggcagtccggctgacgatatcctccggcaacgtcactccatcgacacccttctttccctcggcaaccagccagtccctaaggaactgcttgtcgaaactctcttgaggtccaccaggcgcgtaggcggcaagagaccagtatcgggatgaatcaggagtcagaacctcgtcgatcaagatcaactgcccaggactggagggatcagctgggttgggcaagagtccaaactcgaactttgtgtcggccaagatcagcccaacagactcggcgtgcttggccgccgtggctgattgaggggatcatcggtgtgatatctgatcaacgtcgattctcaaaaatcagtgtcaaaaggggagtaggcagatactcactgtacagagcaacggcaacacgctcaatttcggctgccaactgaggtccgtacatctctgtcactattggatgttgaggatatggaagaaaaattactctactcaatccgtgtacaagttcccctaatccgcgagagatgagaaggagaaaaggagaagacatgagaccaacctttgctagggtggatgttctcatcgtgatcaccctgatcagccttcgttgaaggagtgaaaagcgcctcagggagcttttgagactcgactaagcccttggggagctggataccatgaactgttccagacttcttgtactctgcccatccggagcctgtagaagaaggttatttcgttttccatacatgcagaaacaggttggataacttagctgggccctagcttcagtgaggaagaaacgtcactcaccggtgatgtatcctcgaacaatggcctcaatcttgatgacctcgcacttttttacaatcatactccttccctcgagctgatccctgtacttctggacggaagccgggaagtcatcaaacgaaccagagctaggagcagctgacggtcgaggaagcacaagatggttcgggatgatggacccaagcttgtcaaaccagaataacgacaagttcgtcaacagcttgcccttctccgggatcgactgctcgtcaaagacacacgttggattgggatgatgagaagaattcaagcaaaagaggaagaggtaaaaagtcaagagcacatcagcaactccgcagccaaaaccctcagttcaagtcaactactcaaaggaaccaagagatatgtacatacgttcccgagaataacatcgtaggcactgattctatcagtagcgacaaagagaagcgtcgaatcatcatcaggaatggaatagatatcccggactttaccccgagcaataagcgtcaggtctggacagttggtttcaatcattgtggtaatctagtacgaacgaaaaccctcaagatattgaggacatgtggccgaaagacatgagcatataatgtatgatgcttacccaaagaagtgtgtttcgagatggataatgagcgaactcgacctgaaattgaaattcccaagaacggacgaggtctgtgcattcagggccagactcactaaccctaacacatctatgtcgtctgggacgacatcttatatcgtgttgaggagaactacgtgtccatcttattcaacgtaactgtgcctatcaccaagcttgtgcctgtatctttcatcgtgtactgatcaggaccaaactgatccgataaacacgggcggacagagatcttgttggccgtgtctgtcgctgatggttcttccgattgttgtatgtatgcagcgtcgctcaccgaactgacactcgctccttctagtgcttggtggtctgaacacaaaagtaccctgatggctcgatacttctactctttggtctcgccatcttctgtgctccataaaatgactatcagactgattggattagcgttcactgcttgtttgaaccgctaccgctgctgccgttaccgctgatctacataccagatatagagagtccaggaacaaaccgaggtctgctggtgcttggatgtcggccgcgatacctcgcgggtgtggtgctcagtcgagaatgggccgtcggtcaggcacgatgattaagggctaattcaggagtttcggtgttcccatcaggtcggctgtcgttcctgatcgtgcagagcgttgccatgctatcttctctgtttctttcctccttctttcttcttttctttcgctagtctcgtgatcccttttattttacagcatgctatcatcctatcggtatcatccagtgatagttcggttgacttgcttctcagtgaatgatgacggctgatatgtcatatcttgtctgacggctagccgtccggccggttactccttttccggacgcgccggctactcctaatttttgtgacctttttcccttgtccgtgttgatcgttctctgattcctccggtgctagttcgtgctctccaagcggcctgtcgactgacttctacccgtcaacactaccatcaggcgggatgttatgcaagtactctacccgttagcctacctacctgtctatccgtgcgtgcgctcgaccgtttacgatatttctgtcgaaatataaaaggaatgttatcattcttcaccccaacacgctttggactatcacccgccacctgtcacctgctgtatccattccacgtattatattataagttaacctacctacactactcacgaccattacctctatcaatcctaggcggttgttcatgtctaaaaccactaactctgcttgtctttcacgcatatctcgtcctttgacgccatatcgactcaagatgtctaccgcatctggcgcatcgactgctctcgcagccgtgtcaactatgtcggtcgttgaccgaacacccgctcctcagagactgcaccgaatctcgaggaaggcccctcccaaactggacctgaaagatctggaggcagccgaggccgagcaacgacgtgtgatgggcactaccgaacaatccattaactcttctcacttagtcgcgcgatcgacttctccggtcattcctgtcgttcctaccaatcccactacgtccgctatccggaccgtttgcaccattcctacgatatttgacgcattcggtgcgcctgtcgagtgtctcgacttgccttcatggattgcgaggatgactgaggcccagatcgccgccttgcctacaattccgacgcttccaacgttacgcactgttgctggcatccctaccattcctaacgctccgaccctctccaccgtctcaatcgtaccgacaatttttgacgcgttcaacgtagctcccgagtgcctcgatctaccttcctggatggagaaaacactcaaaagccaagttccctctaacctcagggttcttaccatcccttctaaatccgttgcgcctatattgaagggtccagggcggttaagacaaatggtgactgtcaaggaagatgggaaacctgatgttgactatgtgagttgcttttaacattcttgtcctcgttttctttgatctgatttggctgttctttgctctctcccacattttttcctttccttgttttatcgtacagatattcggcaacaagattggaaggggacagttcggtgtggtctatcgggcgctcaacatcgacaccggtgagacggctgccattaaacagattcagcttgatggtctcggagaggaggagatcgatcggctgatgaaggaggttgatattctccgacggctggaccatcctgctatcgttaaggtcaatagcttcttcttcccattcttgtcacttggcatgcccaactgatttagctctctattttccctctcttctctcttcatcctcccgattcttccgaacagtactcgggggtagtccggaaccgggatactctcaacataatcctcgagtaaataccctttcatacattctcttcttcgcttctctcggctttctctgttctcttcctctctccgcccctcttcgttttctttgactggggctgacgttgccttctgctgtcgacagatatgccgagaatggatcgctcggttcgactattcggacatttggaaagctcagcgagaagcttgttgcttctaatgtaatgcgaattcttgaggggctgcactacttgcacgaccaaaaggtctgtctttatattatctcatctgagctacttcgacccggtcactcaaacatacacttttgtataccctcttctccaacacaggtcgtccattgtgatctcaaggcagccaacatcctgacgactaagacaggcaacatcaagctgactgacttcggtgtctccctcagcttgacggccgtagagaagactaggaggaacgaaatggctggaacgcccaactggagtgagtccatacttcttttttcgtttgtctcttgtttacttttccatgcttttcttgccgttcgatacgttgtgtcttaattgacttcctttcttctctctttgcccctaatttttacttcagtggctcgtgaagtaatcaacctagagggtgcctctccggcttctgatatctggtcgcttggatgcacgatcatcgagcttttaaccgggcgacctccgttccctgcaatcaagactagcatgggtggtacgtcttgttcctatatatcagccctctttctctttgagaacgtcctcttgcagctttgcctggtgatatttctcttacatcttccttcattgttttattcttgtagtcctccgtcatattgcggcaggaggattgcccgagattccgagtgactgttcacactccttgcaggccttcttgtctcagtgctttgagcgagacccaatcatgcggccatcggccgaggttctatttgagcatgcgtggctgcaagagaacgctgagtatcccaaggtgcgctttccctccttctcctttcttttttatcttctctgttgatgcctcaggccgactgtcttcttctgctccttgtctcttccgcttctcgacagtcataccagaaggacagcattccttatcttcgtcggctcagcctggaaggtctagatgacctcagacaagctggttctgtgagctgtatgctatcggacgagtgtcttccggcattgtcgtctcttctaccggccagtccgccccgacgaggctcgcctggtagacgacttattcactgggtccgttcgcgttctcaagcactttctgtgctttcctcgagacggtcggctcggtcgtctctcgagcttgctcgatcgtctgctagtttcatccggtcattcgaacaggagttggaggttgcctcgagctccgttgctgagtcgagctacaacccgagcgagattaggacgaaggatcggcagaaccagcatggcgggacggatctgacggcctgtcccagatcaagttgctttggtgcgccgggctcgtttgtcttcaacgagaccgccttaagtaaggagtttggaagggatagctgttgaggaagatgcaaacacactgggcgatggtgggacagttggcgtgctacaacgatgacgcttagtatagctttttgcgatgtcttatgtcttggttcttggttcttgattcttatttctctttcctttctctgccttttgtattctcttccattctttcttgcttcgattatgactggcgctttttcatttttttttccttccttctgtctcctttctgcctctgcctcattctctcagcttattgtatctctaaatatgggttttctttcactctctcctcattttttaatggtataaccagtacgctccctttggtggccgtcatcctcatgtctgccttatcgtttgaaaagtcctgcgggatgtgttcgttcaagaggcttatacataattagcagtgtatcaaacaccacagatagaaccatgatctctttcttttgtttagaggaggaagcgcccaaaaaccccccgaggaaccagcacaccgtcgctcaagtttttgattctacagattcgtcagagaagagatgtgtttgtattggatcggtttgggattctaggagagcatgatcctgggtaggtcgctcggcttgtacaagttttcgaatccggtcgagctctgagtgaaaagaataggtaggaaagaataagaaggtcggtcggtcggtcggtcggtcagccagccggaggttggtcaaagtggaggaagagagatcatcaggatccaagcgggacgaacctcgagtaatttcatgaacctctttccgtaagacatcatcttctccttcagaccgagcaagcgaggaccggacctcatccagagacaagctgaggatgtcctcgaacgagtcatctatctcagcgcgatcttttctgatgcgctctgtagactcttgggcagatctagagacaagatcagatgagaaacccaaatcagtaggctgtcgtcgtacgatgctcggtcgggaaccgaccagtggatcggtgcgtactttagctcttcttctgcggtcctttttaatgaccgttttctgtctaactctaaactctgcgcctcgatctggacagcacactctgccttgacgccttctagctcttttgtccaggccgctttgagaccgtcggtcgctgaccggagagatgtatattcgttttctgatcgaagcgcccgcgcttctgctcttgccaaggaggttttgagagtagccgtgttggcaagctagagggccaatttcagggttcgtacggatcgatcagagggaacaagaagaaggaagacgatggacgttagatcggttgctgccggagaaacgaaagtcttctttctagagatttctctcttcgagtgatctctcacctcttctgagcgagctctcttcaggttgatagcctctaactctgctgtatgcactctctccaacgtctacaagatgcatgtgttgagtatgatggaaaccttctgccgggggaacaccccaaggataaatgagaagagggacttgcctcttgaagctgacgttctttccgggccaccacagagttcaacccatctgtctcgaccttgtatcggtctcgctttcgagatcccaacgaaataaataaataaacaaataaaatcgcaaggagccgtagttatctcatcagacaaccggcgcaagaaaacgccctatgctgaaggcagaagttagaaagcaagagaaagaaagaaagaaagaaccaaccgaacgttccatcccatccagcttgttctcaagcgactttatcgtactctcctttgctctcaactctgctttcagcttttcgtaccctatcttccaatcatcgacctcgccttggagtccggcgatgacccggccggagacttgtctcgaacggacgctcaccggagaatctggatcttgagggacccccgatgagatcctagggtatcctttactttgttctgctctgaacccgaacggtgagggcgaatagacagttctggcggcggtggtagtgatgatgtgtgttgaattggatcccgttggggaacacggcgtaggagatgcagaagatcctcttgtagtccgactttgcccatcaccgacatcgccatctgtaaaggaaagagagaaagaacccatcaataaaccattatactcaaccgacgagctttctaaggaaaaaaaaaagagacccttactcgagtttgagtttcgtgctcctgtagacctcggtgtattctcgtcctcgcccgccggcgtcaacgaatcatcaatcgaaccaactggacggcccccccgcagatcttcatcctggttctgtgagacctggtttgaatccgagttgggagatttgataggtgtggacgcttggctggcgagatcagaactggcggacgtgcgtcggatattggaagccgtatgggttggaagcagagatcttcgatgactttctttcgtggtagtcgacagagacggccgacgtgacatacttgcacgtgagcacgaacacggacaaaaacacgaacacgaacacggacacggatagaagaaggagaggtaaagagatgatcagagcttaacaacggtctgctgtggtgttgatcgttcgagagaggatgaccatcatcagacgatgtgcgtcccagagcaaggaaagggcgatgttgactagagtcagatcaaattgcctttgcaggccaaataagaaggaaaaaagagacggcctcgggcttgcttttgcatttctctgttccgacaagaatgcttgaaagacgccgacgacggtgacgacaaataagagagacacaataaacccatattttataaattcgcaaaggtaactaggaaagagggaaagactaagaacaagataggaacgcgcgaggcggtaaaagaaaagattgatgccgaaagagaacgtgggagtatgaatagcagagcaagggaaaagatgaagaagaaaagacaaagtaagggaaagaccagaacgaaagggataagaaggtctgttttaggtagaagcaaagagagcaaaaagggggcaaaagagaaggaataggaattagtgtttggggggggggaggggttgcagtcatcaaggaaaccaagccagacgggaaattcatggtagtgttgggattagacgaccggagagtttatctgggctcctcctccctatcggccaacatacttcaactccaagtatcgcgcgacaggatagacgacaccggcaaaccctccggagagttcgaacccgatgtcagctccgtagcctggttctccgatgagtcctccgatcggaccgacaaaccagacctgggacattccgagggctgcaccggcagctccagcgcagaacgcagcgagcgcggcgtatccaacgggtagtaatgccgggcagttccacgactcggcggcgttgtagttggcaaagcttccctttcggaagataaagtgctcttcgaacacgaccatggcaaagatagagagccagtatccaaggacgttcatgaagttctcaagcgcggaggcaaaggagtcggctccggcgatggcgattccgatgtagataccagtgatcacaacaggccagacgattcgtgggactcgggcgatgtaccggtggacgacagagatggagagaccgagactgaatgggttcgtggaaggaacggaagaataagcctgttggactgttgggtgtatacacaagagagagaagataaaaagaaaagaacaggcaagactaacgagtaaacgttgatgatgttgttgctgacgacggaaaggacaagaaggaacaagaagaagccggttccaccttgacctaggtggtctctgaagacggcgccgacgagaccgccgagttcgtttgagagatactccgtgtaccaagtaccctcttggttggccaaggccccacacatgatagccgctccgagccactcgacgaggacgagagggaagatgagaccaccgtaggtccaagagaagaccctcaggctggaggtctcagcagactggtagacgttgtaatcactggcaagactgacccaacccatggcgaaaccaaagatggtaccgatgaaggaaaggcaacctccaatcgcggcctccccagtcgccatgggcacattagagagtcctttggctccacagccgagaaggacgatgaaggtgatagcggtagggatccaggaatatcgctcgtctgtccagggaaaataaaaggtttcacgatatgagattcaaatgttagcgtgcgatgcttctttcctcctcctgagagctatgagaaacatattcaagagtaagacatacatcggtgaacccatttgtagccgagcagtccaacgacgagagtgatgaaggcaatgatgatgattccggcagcgtgagacttgagaagaacaccgcattggtttagtgctttggccgcatctagaaacagactgtatggcaagaacaggaagacgtaggcttacgattttgtcatcggcgacgactctgagagcctgggcaccggcaatggtgttgatagcagaccatccgacctggattgtggccaacgggaatagagagaggaagcaagcaacgagctcgagtcagaacatcctttgacttggcctggacggaagaaacgccatgaacaagagatacatacacatgcgatacagttcaaaagagccacgatctttgcaccatgccaaccccaagcgtatcgggctgaagtcatctgtcggagaccgagcttgggtccaaaagtagcggcgtaagcggggacgatggcggtggcggcgttagtgaaaaagatgcagagtaaggaatcttcgagaccaagaccaaagatggcgggtccgctgttgggaatgaatatggtgagtgagcatataggacctaggtgaggtggctccatggagagaacaaaaatgtgcttacagaataccgataccgaaggttgacaacacgcaattggcagcgagccaaatggtggcggagccagaaatatcattgtctgttcgctgatcctcttggactgaatgaatcgaggcgtgacaagagcttgaatgtcagatggaatgtggaacggctaggaaggcgcaagcaaggggaaagaaaaagaagaagcgaaagaaagaaaagttcgaggctaacctcgttcaattcctcggacttccatgcccaatctgtttcgggtagaaagaaagcgagcggattgtcagccgcttgtgctgataattaccaacgtagcgtgcttgcgctctcgctctgggcatggttctgtgggacatgacttctggctcgaccgtagctatcggaagatgaaggagaaagaaggggaaacgaaagtaacacaaactttgattcaagcttggtactcgcaacgttcattcggtcgaggaacctaagaaatgagttgctctctgggaagaaaggacatagtcagctttttttttcttccatacggacgcatggaaagaagcaagggaaagaaaaaaaaaggaacacaccctcatgctctgccactcttaccgggtggtcgatggagtttggtttagagtcagagtagactcccttctctatatcgtccatacgggcagcggtattaactgaaggtgaatacgacggaggctcggcttcaacagcggtgtctatgggtttcccaaggggtacagtcgaggtaggaagaggactgggagtgatttcgggagagtacatctttttttcttttctatgtgcttattgcgaggtctatataaccctggcaaacggtgtccgacgggctttcgggtcgagaggctggaaggaaggtaacgtggtctggaatcgaacagatagtggatacgataggatcgagagataggcaatgacggcttcagttgggttctttcctccggctaatcttctgggtttcctgttctgcctgaccgataaggcttcctggcttcctggctgtcctttgtctgagcggggtgtggtgggagactggagtatgcgtgtgctggctgaatgtatgctggctggctggctaggcggatgtgcggaaagctcaaaagtaatgaaaaagaataaataaaataaataaataaataaaagacagtgaaaaaattaaactcttggaaaaacattaggaaatcgagagacaaaactactagggaatccggacagagactacaaaataggtgggagcgcagccggttccgcagccgcaggtcccggggtaaaccgaatggttggtgaaattccggggtctatagataagaaagacttcaggcacaaagtaagctaaaattagaaaaagagccatgagttatgcgcccacaagtcttctgggagataacggacgagcccaggatcgagaactcttgccgcgcatacatctcgcggtgtgtaccgtcgggtttagagtacaacacatagggtgtcgatctcatctactcagtatccgctgctggtgctggttctggtgctggtgctgctgatgctgctgatgctgctgatgctgctgatgctgctgatgctgctgatgctgctgctgtcgttgttgttgttcttgttgttattattatctacatcattatcatcaccattatcgttatcattatcaccatcgctattctttctacatgattcttggcagatccatcgtccgtccggatcggatctcctcctccaaggacatcttgtctagtcggttcccgtccttataattctccattcggccccgacccggacggctttcggttgaccagccggtccatcgtgcccttcactccaccgtcgagccaggccggataagtgatagcaagtatgtatgaatctctggaggcgatccctctttcatactgaccgtcacccggtcggccgggcagcgtgccttccttatccggtaaaagtgcccgttgcagtcgaatcctctctggggtttcctggataaatcccagtcggagagccgctttgacagatggcaagtttgatgcatgagctgttcaaacaagatgcatgaaagaaggaaagaaaaagaagaaatctcgtttcagcgctcaaagcttgttttatctattcaaatcctctaggactcatttctcgaaccttgccattgaactcggcgcaacccatgtccaccctcggacgggagatcgaacgaatggtctagcatgagagataccgtatgtgtcaacacatgacttctttgtgcgtgaggcagactttgtgttcaatacaacggagagagagagagaaaaaaagtctggatcagacctgatcaagatagacaactagaatgccagaaagaaagaaacaaacaaaaacaagaagaagaagaagaagaagaagaaaactctgatacacacatcagtacaaagctcagctcagtcactaggtcgaccgcgctcgagttcatataggccaccattccagctaaaaggcccgttcgcttatccacaatcgcgtacaacagcctggtctatttcgttttatttttttccattcccatcaatcacaaagcagaaagtacagattaagaatataactagtgaaggaaaggaagagagagaagaagaagaagaagaagaaaagacgaacaggatcagaccgaacggcctcttccagccaaaccaaaacatctcccaaggtcttccatggcttaatcggcatgtaccgaaagacctctgggcggtcgacaacagcgtcgagaagagcctgcgcgtattcgctaggcttttcagtataaagaacacgccatttcaagaagcaaaccccgtcggaaaagaaaaaaaaaaggtcatggtcaacctacgctctcacatgttccttccttaaccttctcgaatgagactcacaactagaggtacaagcctgacgtctctgcctgatccttcgagcacccgaataggctgtgtcaataaacaataattaaagtcgtattcctctctggtggtatattgataaacgtccctcggcgtctttgccggttgagggggtgcgtatgcgttcttgaaaaaggctatacacataaagcgagcgctttggagatgtgagttgactcgacttgacttgactcgacttgacttgactcgacttgacttgatctgggcacatggcacatgcgcgaaaaagacggtgttgtcctacataactatgtggttgttgaatagctatgtggttatgcgcagccgcccttaattcctaaacctcccccccatctcttaatccttcggcgtcattctcccctcgctgttcgttcatcactccttccgagagaagcaaagacagacaagcatcaatcaacgtaccaccatggcaaagtttttaaagaccaaagaggacatgaagtccatgcgtgcgttcctcccttccttccttaaacagcctcgtcttccagaagtagaccatcactggaaccattcgtgggctgaacgaatcattcggtctttctttccttctttcttcttttctttccttcttcgattcattcagtcgatcagtttgataccattttgctcgattgcgatggtgtacgtcctttcttgctttaaacctgtctgctacagacagaaccaaaaagacgatctgcacgctcacaactgtaacacatgcgtcactcttccatccttctgcctcgtcgacaggtcatctggcatggaaacgagttggttcctgatgtcaaggaggctctggaatacttccgtacattaagtcagtcaactccttgccgttggaatgcgctattgcagttctcaaggatcagccggctgatcaacagaactcgcaattatctccatctgccttcgctggcaacttcacagagaaggacattgtctttgttagcaacaacgcgacaaagtctcgaccacaatacaagcaaaagttcgataagctaggaatccaggcttccgaggttggtataccaaaagttttttttatcagcagagcacatcagattctcactcccttctctgttgccttttcccattcgttgtatacgctcgggcacatcattcataggacgagatctttggttcagcctacgcctctgcagtgtacttttctcaaatcctcaagttcccaaaggacaagaaggtgtttgtcattggagaaaagggattggaagacgagcttcacagcgagggtatcaacacatgtggaggatcggtcagttgggaacagttctcgttctaccgatcaagtcttgcttgcaccggtcgtcctgacgtcctcactctttgggctttcgattcttgtctctcccctcccgttttgtgccggtgaaacgtaaaaacaggacccagaatccaacaaaccgttgcctagtcaggattttagctcgataaagcatgattccgagatcggtgccgtcctctgcgggtaggctgtctctttctttctctcgaatagtgattgcatcccacgctttccaatttactaaatcgaaaaaccatcttctccttctctgtttctctggcatctctctctctctctccttcgttgtgcgcgaattagctttgacactcatatcaactacgccaagctcgcccgagctcacctcgcgctcactttggacaagtcgacagagttcgtcatcacaaacgatgactcgacgttcccttcgaacggcgtactctaccctggctcaggttccctctcggccccgttgaggtactcgaccggacgggacccgatcgtcgtcggaaagccaaacaagagcatgatggattgcatcgtggccaagtgggtagttttctttgtttcttgtttccttacctaaatttgttttgttttgttttgttttttcttcttcctcgttattctttgggagagtgaacctcatgggaaactaaacatgaattatattgcaatcactcaacaggcgacactttgaccgatcgagaaccctcatggttggagatcgactcaacaccgatatcgaagtaagggccttccccttctcatccgcgcgtcgctcgtccaagcccgctgaccatgcttttaactcttgccgctcgttcagtttggtatcaaaggaggaacgtccaccatgctcgtcctcaccggtgtcaacaaggtggatgacatcgagagcagtggtacgacccctagttacatcgtcaacagtctgggtgactttagagctctggcggaggaataagtagagttcggattagaggcatcacgtcggatcaggattagactcgttctttctatcattttctctaaagggaacgacatgtgtttattcaaagagtaaatccttgaaccggggacttgttcgttgaacatgaagcgactgagcaaacgaacacgtcaagactgtgttttatctttgctttttgtttcgtttcgtagttggtgcaaacctgagaaaacaaagaggggaatccgtccaacacgtggatatagatatcgagatccagccagaaacaagcaaacaaaaaaaagaccatccttaagctcaaggatagaaagcgtaggaatattatc

SEQ ID NO: 3049 - DNA, 12928 bp, Xanthophyllomyces dendrorhous
gatgtacgagatcatgttggtttttaaaacatagccatattgccatgggcattctctcttttctcgtatgtgtgtgtgtgtgtgttcggatcatttggaaacctcatgtcatgcatatccatttggaaaccagacaaggacaaaactcgtgaggaaaggacaacaaacgcagcggtcgagtgaacgatgccacgagagggggttgaagaaaagggtttttaggcgagggagtttaatcgaaaagtccgaaacccatctgatcgttcggatagtcaacgggtttagggagcaaaaggaaataaagctttggtcagaaatgggaaccttgaaacactacgagaaagtcggcaagcactcacgtcgtcgtcagactcctccttgtcctcagccttctcctccttcttctcctcagcgggggcagaggcgtcagcggaagctccaccggcgacggcggcggcgggggcagctgtagagattccagcaaggacgaaaacggagaaccgtaaataaagatccgatcgaatgccagcagataaaaatcactaacctcctccggctccggatccgacgttggaaagcaactccttgacgttctttccctcgagggccttggcaaggagagtggcccagatgggctcaagctcaaccttggcggcggtggtgagagtgacgagcttctcagaggtgatctcaataccctcgtcggcgaggataagagcggcgtaggaggcggcgagttcagactgtgaacggtaagaaaagaagtcgtccatgtaagtctcaatgctgtgaatgtactaccgagtcgctttctaccaacgccttgttctacgttctgaccgctagaccgtgcttccttcttctcatctcccccttttctccctccacgacgctttgtctaccaaagtaccactgctcctctcattgcaagttatgaaaatcctgatgaacgcaccattgtacgaatcgatttaagccggagctgactagtacttgatgtcctaatcgaaaagtggggatggatggacgcggcaaaagttagtttttctcttgtttctcatctttacgacccagacatcccaaccctcatcttttccgactcgacaacgagcccctatgcacacaaaaattacaagcacgtacgagttgtgtggggatcaagagaaaaaggccaggctccggatatcggctgagctcacctagattcgctcggcaaactgctcttgtctgacttttgtctcaagtcagatgggtgacaaagatcacgtgacgtaaatcaactattggctagctaaatggctttggctaatagaaagcaaccctaaccgacggcggtccatacatggcccctttggactggggtgcccttagaccatgaactaccgaatccccatgggtcatgggcttaatgtgtgccagctccagcctcagccctactagcgacagcgtcaaagcccggcattcttgcctcctggttctcctcccggtgaagggctaggtgcagcgtgttgcgcgacgcgttcacatctctgttctatcaagtctgagagtaagcatcaaagagacagaaagacagaaagacagaaagacaaaggaacagcgaggcaccgtcagcttcctcgctctgtctgtgaactcagagacttcctctctcgtggtggctggagatgctttgagagaacgtcatcagggcaagatgttgatcgcttgtgtgcctgctcgagttttgccctgaattctgtcctgaactcaaccggctgtgcctgcgaacctccctttgacggctgaacacctgtcgaccgctgttcctgtttctttcctgtcaacgctcgtctatataacgttcttcacaatatatggctttcctttgtcttcttcatctcatcacatctgcaagtacatatattatcatcatatgaaatgtcccacactcgaaacaaagcacaagtccctccgagtgacgtgtgcttctttatgaggtctagcacacttgaggtatcaactgggtcgagcagtgtcgatagacaattttcgactctaacccagagcgttgagatcagcagccagtaatcgactttcatggttgtcgagtatgtatcatcccatgcgcattcatgggatgatcgtagccacctgcgagacactctcatccaaagaagtaccaacaacataccgatcacagtcatcactatcagtcctgagcgaatgactcgtcgagaggacgagatcgacaagattctgtatttcttttctcagcatgacatttcctggtggtccttcggcatccaagataaggatcaacccggactcagagcgcggctagtccctgtcagcgcgcatgtacccgttgtacggcaacagatgttgcatgggcgcttgataacatcgggagcgtccaaatatatgatctgttttcagcgtacggtagcgtcatacaagaagctatcgaacgtgttctcaagtgtgaacgacaactcacctgagggccacgaggatgaggacgacgacgctgaccttaaagttgaagttgaagttgaagataaagatgatttcgagtacgaacatgaagacgagagtgatgaagtccctcttctcatcccactggccccttcggtcccgttccctcctcccaacggtccacttcaacttgccgcaacatccaaattgtaccagttccagagtttcgtccagcatcatatcgaagctcgccaaatcgagcgcgtcgtcgtgctcggccgaacatctaaattttcagatagtcgaacatcgttggacgcccaagtaggtcttctacaacatatgctaggcgacttcaaaggagatacctatgtgctggagtgcaatggaatctctgcatacaaggataatcatctgctcaaagcatgcaaaggaaacaagaaggtatgtttttgcctgtcctacctttatccgagtctaagtgtcatgctgatctaccttccacttgatgtcgtaatccagactctggtccttgcgacctcggttgacagggtttgccgcaacccagctcttatcgaagatatcctcggaacactcgatgtgatgacattcgtccattgtgataccggggcgaactgtcgaatgctcgcggatgagtggctgaacactctagatgaaatcgaccaacaaacctggaggcccatcctcgagaggcaattgtctcacaccacctcggcaaagacagcagggatcactttcccatatctctggaatacaccatctgtcagccttagggagcaactcaagtctagggtaaccaaagactcagcgttctgttcctcacgaggaacctcacatcatttctcaaagcctcctctccttcctggcttggccagctacactggacgcaggattggcttcgatgatcatagggtggaactgtggaaacagatctatcaggagtacacaggatgcgtactcgacgtacactacaagaacaaaggatggacttgcgcatgccatggagatgtctgcagagacgattgcctttgtgattgcggtccttgtcaaaaacgagccacaacgggatgtgtctgtcgtcttcaagagcgttgcgattgttggatcttcgagttctgtcgatgtccaatttgtgacccggagatagagaagtggaagcttgaggcacaggagcagatagagcagaggaggcagaaggcagagcagaagaggctgaaggcagaggagaaagcagaacagagaaggctgaaggcagaacagaggaagccgaaggcaggtgagtggaagcttgaggcagagaggatgcggagggaattaaagaagcagtttcaggcgcagaagtattccggggtccaacaactgatggcagctgcaaagctagccgaccaacaacaggtagcggcagatatagacgcagtcgtcacggaagctgcaggtaaagtatcggccatagtgggacgcaatgaaatatacaatgcggtctatcagaggacggccatagtcgcacggcagaagatctacgagggaatatcttgtcggataaagactttcgcagagagggctgcccaacgaacgtcggatccggtcgtgcgacggcaagggattgcagtcgtgcgggacaggacgatcttagagactcccatgcggctgagtctggaggctctgaagcaggagacattggagcgaaagagactgtggagtgagatgggatggatggagaaacatatgacgtcagatgagttggatggaagatggacagagggacaacgactgaccaggctggtagcttgtgtagagatcaagcagttgctggatgagaagggatggagggtcgaagagacgcagttgagaggggtacgtgacttttggggggcagcagacgccaagtcggaggcggattcgaccaatgtgatgctgaaagagaaagggcgagagctgcacttgatgtcgatcaagtacagggaggaagaagagaaacggactagggagaaacggcagagagaagattacgtccagatcgcttcattccttctactgacttgacggctgtcttttccttactcttcctacgcaggttggatgagcagctgcgtgagtctccttggtggcggtctctacgacagaagaccacagcggaatgtcttgagcctgaattgtaaagtatgccggagatttgatttgatgagtgataaagtctttgaacgaggcaaactgggatcagcaagaatcgagtcagtcatgacatgtttcggaaacaacgagacatctagccgagcgtcttagatcaggagaagcagaaataatatcgatagccgtagtctaggtggtttgtgtaaaacatttcatcgtgagggtgtcgaaagacttgaatcgtctgttagaaaaccaaggtgaggttgtgatgaactcgatgaggttggactacatttgaagtggaaccgacattctggtctagtctggcacaacgggtcaacttctcttgtctttagccggacacttcatctggatagtttactttaatctttgtcgcctatttactgtcagcactggcaaaggattgctcgatagttgagaggaaagcggaaacgcgtcgctcgaacccactataatcaaagagagaggaagagagtgaggtgatgatggtcgatgggtttggttgatcacatctataagttcactatagttcaataattccagactatatgaagatttcgtgggttcgtggtctgagggcacccaagtccagaagggccatgtatcgactgccatcggctgaagtaactctcaccatgcctaaggcatctgatgaatgtttctctaatggatctcgagttaattcctaataccataaaataaaaagacttcaaatatttctcagaaatattcgagcaaaagtcagatagagttgagaaaagtcagataacctttctccgctcacgagtgggccaacattacacgaaatctccccgtcctagtgagaaactgagtgaagcccaggacaccgtcaagacaattcgtgtgggtatcgtcgccttgtttattttcttttcttctttgcacgacagaatctctatcctttaggtccggcttgttctctcgcacgtcatttcccaatcatcttcagccgtttcgttccgttttcgacatcaattttggcccggtaattgaggattggcggagggttgtcctttttcctccctaaataagcaaagagaaaaaaaagaaagaaaaaaggactactcctcggtcgtccgaggttgcagggtgcatgtagcgaaacccaggttgaaggagaacttatgacggaaacacgatgtttagagaaagatttgaaggaataggagtatagactatgccggatcaacagggatgcaggctggaatttgagctttggaaggagtgccggatacaagggataccaggatcaaccgacaaactctagaaacgacaactacagccattcactcagtatcctccctctcgtagagaccctgttgctcgctctccgctccctgtcgtaatcctcctacatccagaccctctgatccgttcgccaaagcctgcctacacaaatcctgtctttttagcagtttttccaatcagacgaataacttaccataagctcgtcttttttcgactccttcctcctatagtaaaatggcccagcgagttactctccgaacccgaaagtcctacaacaccaagtccgccaggaacaaggtcgtcaagacccctggaggaaagttggttgttcacaacttgaagaaggtcgctaccgcccccaagtgtggtaagtcttctgtcatatgcccagttttcctatggtggcctcggaattaacggggcaatattaatcttcttccattaaatttcctgcttctcaggtgattgcggaactgctcttcccggtgtatgttgaacatccacagatcttttctcagacctctcgttttcctcaaccaaccaacctctttcttctttttgtcccactatcgtgttcctctaggtccccgccctccgaccccgagagtacgccaccctttccaagcgacagaagaccgtctcccgagcttacggtggatcccgatgtgctacctgcacccgaacccgaatcctccgagctttccttatcgaggaggccaaggttcgtactctctcatttctaccacacagttccctcaagtccgaccgtttctcatttgttctgcatcaccctgttcggtcgcttgtctactgcaaatacagattgtcaagaaggtcgtcaagtcccagcttgctgcccgaaagtaaacgtgctggctgttctttgatgagagtttcggtcatgacatgcgcttttctctaatcttccgtgcacattctttcgctctacgcatcttgagacaatacgacggatctggaagctttcttagccgattacgaatcgctaacgacttggtgaatggtcattggaatacacgattgggattctttgggacatgaggttaatcagagatagaggcaaggaaagtgccttcatgagaaatcggatataatcatgaagtcatcgtcataaagatacacattgcacaagtcgccaagggagccgttttgaaaagccattaatcttcctcttccgagtccatcacgactttcttcttagatgtaaccttgcgactggaagccggtccttcgtcttcctcatccgaatcgttctgataatccttctcggcttccgactcggatcggaaagtaggactggcttcggcagtcgccgtctcttcgtctgtttttgatcgagcggatgacttctttgttcgagccttcggtttcctccgaggtttcgctacggacgcgtcagagtcttctccttggtcctcatcgtccatgtcctcgtcgtcttcgtccccggaatctgctgatgagctggttgcacgcttgggtttcttttttcctttgttgactgacgaagaacgcccgtcctcccgagaaggttttcgtttcttgactctcgaggaaagcagggcgaaatcggatggttcctcgatcggggcctctggcaaagcagccgtgccctttcttgcccgctgaaagaaagtgtgtttcgcgtccgatgtcatcagtcaacgagagagagagagaagagaatgcgcaagataaatgaggaaggcagaacactcaccagggcttcctcagccgcatagaaggcttcgtctcctgcttcatcgtcagagtcctatttattttaaaaaaatattcgacaaacagaacggtttccatccggattcaacactttcagtttgtcagggttttccgtaggaacggatacggcagactgagataactgacctcgatgaattgagtcgacttgtattgaatcctttcctctgcaactttctcctttctcttcctctcagctcgagggagctctagatcgtcctcatcctcaaccggtgctctttgctttcgaggcgcgcgcttcgcctttttcttcagctggttcacagccggttctgcgtcaaacttcagtcattttagaacgcgaaaacgaagagaacatatatctcaagatcagtcactatccagtccgtcggtctggaggaagataaatacgacatggaagatgcttacgtcgagaggctctctgataaactgagttaccatatccgcctgccgatcaagttctgtaggatgctgacgagcgggtatttcccatcgaggatcttcggctagagcaatcaaagatgcataatgagcgtttgtcctgtggttaagagagaagggggtgcttggatatgagacagaactataccttcgtcgtcatgttggaagtccagaagagtaaggatcagtcgaacgtgagggtcggtcgagacagccgttttcttgtcatctgtatcaggatcgagggctgtgagaacgtacgaatcgaagagacatacaaaaagattagattatccttctcaagaacgacgtcagaccggtttgagaaagaaagacagagagacgggtccttacggtgaggtgtaaacttggccaaggcttctttggaaatttcctttctagcggcctgagcgcgtatgtcatcatccgtcatgtcctcaccatatatcgtaggtccatcggtattcatgacaatctcgtgccttgcagcagcggcatctcgtaggacctaggtagccagttgatgacagatacatcgcatgctggtcaataatcgaaccacctggtggcgctacagcaagatacaaggataccgcaaaagaagaattcagactcaccgatatgaaccatgtgatgaacgaaatcttgccttcttcaagaagaacagagaccgcaattccaagctgttgactctgagttaacgtcttgtccctaatctgaacatcggctttccgcttgatcttcttgagcttgggtttatcgtcatcatccgttgagtcatcccctgtaggtctacttgaaaactttttccatccggtccggtttttggggaagaaagcttctaccatgaggaatggatgttctgccagtcttttgaagaatttccgaagaataaagtggatgagcgcaagaagatctttactcgaagggtctttgggtagactaagttcgttgtccaggatttgctggaacaggtccagaactgaaacctgctcggcgaccagcccgcacaagagaaaggagaagtatactggttcatcagtacatgtggacatacgctcacttgaaagaggggacacagaatgtaggcgactgagggcttatacgatacgaaacgaaccttgaagaaaatcccctcggcctgtaccttgacggccagccgatggagtagactgacgacccgcttcatcttctccggcgatttaaactcggagtaaccttgcagatacgttagcaaggtatgcagcacgtcttcattcgccagtttcttttagggcgaatcccattcgacatacagcgcgacatcaatatgacagcatgagaacaggcaagcgatcagcagagatcactcaggatttgagacgaaaagcgaatgccatgaagcttaccatctcaaattcagtgaattggaaggcatgttctgcaaatttagaagcaggatgaagagcctcttcttcatcatcgttctcttccccttcttcgccctcttttccagcagccgctaatcaccattcagattccaatgaggtaagtatcaggatatcagaccatttgaggactgcaccaacgcttggagcgaagagttaatatgaatttatacgaatgaccaacctctctttcttttagctctctgcgctttcttctttcggaaaaacatgtaagcgttccccttagagtatttttccaacattcttagcagcacacatgcaaagtgaatgaccgagtcgagataactgagagacagagaaccgttgtgaccgagatagaaaggacgaggcgatcagttcttgaggaatcaagcagagatagaaactaaagaaaaaaagaaaaaagagaagtcgaacgaactctcgagattggagcctgtaccctgccatgagtttgatcgacagttctaggatatctccgttatagtaaatctggttctgcaagatctctgctgcctctactggttcttcctctctactggttgacatggcgtccaccaataagagctagatatgaacccaaagatcataccgtaagtctagcggccaagttgatcatgttatagaatatgagaagaggagctcactatctgggtgaagcagtttaagccagcccgaagttcgacccatcctggaggctatgacattgagtgttcaatgacaagcgtatcctacaaaaatatcagcgcaactgcgacaatcaaacaaacagtcatcgaggagcacgtacagtatcctccaggacaagtctcatccgagcaacaacccatctaacagcatcgatctcgcagaaatcggctacatacccgaaatcccatgcggtcttgactggctttttgtcttcgtcaggctgtactccaacagacttacggtgggcttgtatgtctagagttctggaagagaggaaaaaatcgaggaagaatgtactgaggaagagcgttcgaagattgtctgcttctgtcaccttttgacgttccatacgtatgtcctttaggacagaagcgaagaagacttaaaacccaacaagaggaggaaggcgttgtgagccaattgagaaagaggatcgagactgagggagatgaaatggaacggactattgaatgctacttcaagaaattctcgagagaactgctgaagaacggtcatagcttctggagtcaaacatgatcgaaggcctgcttcatcctgaatagattggaaaaacataatgagaacgtcagcttttcggcaagatgtgcactgtctgtatatcatgttaagcgtcgaacctgctctcttgttctccctgatcttcttttcttcttattcttgtctagtagagcaattgcgtttccgtttatagctccagatttatgaacaacaacctgttgacccttcagtccagctgactgtatggcgattgttgatccaaaccgagaatgcctcgaggtagattgtctagaagcagctgctgattgaagagattcctgctccaggagagaagatagtgagtctctgattgcctgtggtggagaaaaaggcgcgcgggattcaacagctcaaattagtttcagaagaggaggacaagaagattgaactagaatggaggaaacgaacgactgtttgatctttgaccaacgtagatacgtcgacacctctaaacatgagatgtaagacatccaggaccaacatattaaaagagttaaattctttagttgctgctgatgaggccaaggtgatgaatagttggaggaagtgtgaatcatcgagttgaacgatcaagcgagactagttcatgacacaagataaagatgaagaaaggagcgcgcagcgttagaaagagagacagacggaagagcgtgtggagtgaaggaactgaggcaatgcaaaagaagactaatcccacctgtagagtggatttctcgtagctgtccgcggtagcatgcgttgaactgacagagtccttgatggacagaagatttcgaattaaggagagaaccaatttgataatccgttcatctctttcagttctctcactgcaccacacgatcaagagacacaagcgaagagaatttcagaaacttcaacatcatccaaatcaactcgataatcaacctcgcagaacggataatgaacgtactcgatggatttagccagataagggaggaccagactcattattctttccatgaagactcccgaccgcaagatggccgctttatactctatctgggctttcaggatggatgaataatcggtattagtgtccggctcgtcctctagctcctttagctcggcggccatatcgattggccatgtcaaggaagcaatgagctcggctgaaagtcaacaaataaagtcaatattccaaagcgaggttcattttagatatgattgaaatggaagacagaggatgtccagcttgaaagaatcgaacaactaacctgccattaaaccgactttccgaccgaaatcacctcgttcgctcacttcctcaacaatcgtcacgagttctcttataagacccgttttagcaaagattcgggcgaccgttcgttcgacatcctcatcgtcgtgtcgccatatacgtttaagatccttgagacatccgagaatcgagtctcctggtcggtaaactttcgtgatttctcccgtaggcgaatcaacatcctgtcgaggagaaattcgtagtgagatctgtcttgtgagtcaaagaatataggggaatgaagaaggtccgaataaaaatgagcagtgctcacctcccaaccacctagggcagcaagcaatgtctggatgaccggcgtcaacacggcttctctatcttcttcttcctcattctctcctccttcatggtcgtgttctgggtattcatcgtcctgagtgttcttgagcttgtttttacgcctagcctccagcagttgaatccgttcaagctcctctatttgaatgtgttaccaactgtcctaccatcagcaagaacagacacggaccgagacaaacaagctagaatgcatacctttatgtccataccctcccattgtcatatcctctaggtcgagctccatgatggctatcgctcctagaagtgtgtgtgagtataagtgtgattgtgagtgtgagcgtgagcgtgtttgtgggggagaacggttgaaagatctttaatgacgcgttaaacacgcgacgcgttagctgacgtaagccaatcaaccctagccaccaccttctactcccatctttcccttctccacgtatcctgaccagaccaaggcacaaagacaagtataccagcatacatcttatacacacacacacacacacacacacacacacacacacac

SEQ ID NO: 3050 - DNA, 664 bp, Xanthophyllomyces dendrorhous
ctctctctctctctctctctctctctctctccgttcttgaccatgtctacatctcctgaaaactccactattctctacaagatcctcaccgagaaggagtttgatgctctctacgagaccgcgcccatcaaaggagactactggctcgggacttcccttgatctgaatgacaagtttattcacacctcttcttctcaccaagttcgtcttgctctttggtcgacgcgtcgaatagtcctttcatgttccaaatgctttctacgatgatagtgtcttatacgttctgttcaaactcaactttctaaagctcgagggtacacttgaccgattctttaaggacgtagagctcattcatctcttggcgattcctcggtcgaacgagcgaatcgaaaagactcttaaatttgacgaggctggcaacggagaaaagtatggccatttgtgagttctttctctttctctctctctctctactcatcgtatgtgacttgggaaggttcttggtagcttggttaactcatttcttctttatcaaatttctaggtacgagggactggatctggttgctgaagtctcaaagaggagtcgagtaagaaaggagaacggaaaatggcagctgggcgaccttgagttctagtttgctatcaaatgactgatggatcac

SEQ ID NO: 3051 - DNA, 10244 bp, Xanthophyllomyces dendrorhous
ccatcatccttaccatcaccatcattatcactatcatcatcatcaccaataggcaggctccgatgtcatgcctgccacctatagcatccgattccatgcttctggtttctggctctgcttacttctcgtcttgtccatctttctcgtgatcagtccggtcttatcgtcttcccttccctttccaaagtcatcgtcattaccgtcgcctcctccgtcatcgtcgccatggtcttctcccgattcatccttgctcgcaccatacacgcctttttcccctcacttgagatcgagcgacattcatgtttctcctttggtcctcgtctcgaccataaacggtgatttacacgcgctcaatcgagtaacaggggagaaactatggactgttcagggagagggttctatggttggttccgagcgaccgagacgacggagaagcaaatatcaaagaaacccagagcaggttgagtctaacgaaagattcctggtagatcccagaaaaggcgaaatctggcttggttctttggatcaaagcgcgtccgacgagaaagacagaggttggaggttcaaaaaaatgggagtgacggtaccggatctgttcgtctttgttcttctcttgtttctttcaatatcttcagtgtcatgagctaccaaacctgacacctagttgcgttgttacttacgtctttgtgaattaccactgaacacagggtacatgcttcgttccattcgttacccgttcacttccgacaagacccaaacccctctcgcgtattcagcggaaagatcgacacatctctcatagcgatcaacttgatgactggcaaggtcgttaagttcggagacgaggctggttctgcagctacgtacttgggcgaacattctttggttggtagtctcgagggtcaatctgaggagcgagatcgattaatggatctgttggacgagcttgagggagaggaggaggagaaaggagatgtaggagagctattatacctaacacgaacaggtccgtaaatattcaaactttctcctttcccccgttgtctcttctgtatgctcttagttctgctaacaatacgtacctaacacatggtttccataatgaacgatgcgtggccacttggaacaataagattacacgctcagaatacatcacccacctacccccgactcggttactaccctcaaatattcgacgtattcacctccgccttcatcgctcgacccactgctatcgagcgcgatctggggacatggtcgaacggccgacggactttacgctatgtttgcagctggcactcagggagcgctacaagccgagaaagatgggggtgtcgttctgggttttagagaagtcgatcagaaaaaaactgctggagcaggaacagggggagggctagaaggcgtctgggctgtcaacatggatagtttaccgttcgtctgtctttctcatcgttgttcccttcaaattgttctcatcgagcatttgctgatctctcttcatccgtcttttggaacatggatcatgcatcaaacagaatcgccttctacgacattctctcgatcactaacatcgatgctcccccatttattcttcctcaaccgatcccatctctctccaccctgttctccacgccccatggaccaccttctcgactccctcaaatcctctttattggacagacaacttcccacaacacaagttcctccctctttgccctatcaagagacaaccatccattgatcggatactttcagcctctcagcagttcagcccgaacgagcgagctcgaaggatatcacgtactcgatggagtagatctcattgatgaagaactatctctccgaatgccttcttcctcctcctcgacagagaaaggtgtgaaagaaggatggaaagagaaacaagagagaattgggattgaaggcccacccgaatgggcgcaatcaaacggaagggatcttgtaggagagaggcaacgatggtggcatagtagatggattggtgtactagggacaagtgcaataggctttttagggtggtggtggggccgaagatctagttcaggtcgtagaaactccaatgaaaaactaacaaaggagatcggccatgcttcaggcaggtcaagttcgtcggtgaaagaacagggtcctatagtagaaaaggacgaaggaaaaggaggtggcgagaggacaaacggtgggctcgaggaagcggagcctgaacataagaagaaaaaacgacgccagcggacgaggagccggaagaaggatataggaggagatgagcacgaacaggagcaggagacggttcaaggacaagaccaggacacatcgcgccaggaagcgaagaacgaggaggaggtagatgaggtagaggaggaggaagaggctgaggagatatcaggtccagtgatgatagcagagtcggaaagcaaaaagacggagagggagttagttgtctcagataaattgataggtttgttctttatctcgccttggaccaacttcataatctattatctgatttatttggctttttcaatacaccgctcatctactgttgttgctcttttaccgttcttaaggtgtcggctcacatgtgcgtaattaagtcttacctcgtttgtaagattatcatctctgccagatattcaaaacccaatgctcatattgcttcttgctcttattatcctgtacagggaaccatggttttcgagggcacattccagtctcgacctgttgctgtcaaacgggtgctttctcatttcacaactctggctacccaagaaatcaatctactccagtcctcagatcaccatccaaacatcatccgatatttctaccaagaaacctcggacccctggctattcattgcgctcgaactgtgtccagcatcgttagaggatctcttcacgaaacacagagaggttaaagaacttagggataagctgatacccaaggacgctctgcgggatattttcggaggcgtaagacatctacatggattgaaaatcatccatagagacatcaaaccaccgtccgtcctgatcgtcgttcttctgcagctctctgatcttttcattcatgctaaaagcgcgctttgccttccccctcctctccttaaactataggaacattcttgtctctctaacagctaaaggattgaagatgttgatctctgattttggtctggccaaacaaacgacacttgatcagtcatctttcggaggcaccgtcctttcctcttcgatcactcatctagcacccacaggtacgactggctggcgagctccagaagtacttcttcatcgagggactgagagtgaatcatcaggggacgcatcaagctgggacgattgggacgtcgtgagaactggcaagggagcggctacgtcagccggattgaaacagatctcaaagaggttgacaagcgcagtagacgtattttccttaggatgcctgacctactggctcttgactcgaggaggtcatcctttgtatgtatccgtcttccatttctctcctcttacaaattttaaataagtgctgatgaaacttggtgttcttcgttctgtgttttgatgactgtctttccttttctagcggggagagaatggagagggatcggaacatttgtaaaggccgatctcagctcaacggattgcccttatccgaggaagaatgtagcgaggcgagggatctggtttcaaaaatgatctctcaagatagctccaacaggtatgtcgtttcacaaccttcttttaggcagagtgatgtctccttttgttaatcatgacatctggaatgaagaccttcggtggatgaggcctttctccatccatacttctggagtcctgcccgcaaactgtctttccttgtacgctatttcgccatactcgcttcttcctctcttttctcctaactgatgcctcttgacgtacctttggggttccgcctggaatatccgtgctgatacctacagcaagatgcttccgaccgattcgagatattcgttcgggatcctccagatccaatgcttcagttattagagaatgggtcgactaaagtcattggttcgcctcgagactggatgagactcatggatcagtcgtttgtagacagtttagggaaataccgtaaagtgagtctcagtgaccaccgttgcttagcggaggacatcttccttttggaacaatggctgatggatctcattgagggagcagtacgatgttggttctcttagagatcttttacgagcattgaggaacaaacgccatcactacctgttcgtctcgttttgtgtttcatccgtactctttccataaacgaatggttttcttttctgatcatggcattctgtgaaccatatgctgaccaacttgtatcgaacagagatttaccggctgcagctcgggaagctatgtctcctcttcccgaagggttcctcgcttactttaccaaagtgagtcgatatcactttaaatccgcgataccctttctttctagcctgacctgtcctctctctctaatagcgtttcccgctgttgttcttacatgtgtacggagtcatctcgagcacagagctccgagatgaaggaggttttcgagaatactttttagacggcgagcgataggtgatcttatttatacctaaaacagaaaaactaagggaatcgaggatttcaaacgtcttaattaccatatatatatatgtgacgttaatctcgtatgagtgtatagcgcagcgattgaagatgcaggctcagtcattgacttcttgttagacaaaaacatctacccaatcaccctttctacctttcataccctgcctaaccgtcctaagcatcaaatctttcctcgcctcaccccttgatgtacattgcgagagatctccgggaatcagaccgtgagctcgaagaacgagaagagacgaccagcatggcgaggaggaggatgtccaaggaagagaagcgagatgagttgctttcagcgcggggattgtgtatgagatgttaagatgctgtttcaaggtatcaacaaaagcggtagcgatagggtatcccagctcggctagttagtacagtggctgctgacgaaaagaaaaagaaaaaaaagaaacgagtagaagaaaaggagagatacggacctgtagcaaggggacggcgctagcgaattttcttagcatgttaatcactcttgattctctatccacagtccaccaaccccacctcgcgcactctccatcgccttccttttcggcttcttcttctccttctagttcccattctgtgccccacccaccagggatgaaaagcttgatcccttgaaggtcgagaactctcaaatgggccgggaatactgttatcaggctggggagtgaatggttcaccagattgctcagacagagcgaggtgacaggggtaagggtgaccggctgggtagggagtggtcggagaaggagttttaacatgctgagcgacacggtcgagttgggtaggtagagagttctccatcctccggaatatccaggcctcccaagatgattatcttcccaacttttctcgttctcgtcatctattgacgtggacgacagaagtgagctttcgccatcatcatcatcatcgtcgtcgtcgtcatcctccgagttttcccactctcggagatcccacatcaacatttcgattccttcatctttgagtccgggatatcccgcctgtgcggctctcgtaccaatccaccagccgaggagctctcgaagatgttgtggtaataaacctagttcttctctaaccaactctctatcgatgactgaggatgacatcttgctcgacagacgagccatacagagcgcgactagcctaggaatctcctgtcctttatgtctatcctcgatcgaggctgacgagctagattccgagacaggaaaggatggagggtaatacacctggaggttgggatagactagttcggtaaacgatctaaatgaggtgagtgcctcggccgaaagagcgaaagaggcgcgtgttttgggtttgtttgatgatcttgccggacgaacggaagattgatttcgttctgtccatgatcgggggggtggtggaccggctggacgccgaggttgagcttgcgccggttggataacaggcggtgccaccgaagctggaagaacagccagacccacgtcagtctgctgatgtaacctggaaggaacggcaagaggtaaagctgacgatggtgggataaaaggttgatcgagactcgatcggtcgatcgaccgtcgttcttgttgtcggagaagaccaagaagctcgttgacgggcaatcgagtctttggcttcggttcttttcgaggttcaagcgtcgttgatgctagagatttcgtcaaggaggccgctttggacttggctgatcctttggccatgtgagatgattagatcaggtcgagagagttgatccgatcttttgtcttgttttgttttagtagaagatgtttggaaagaagagatggtgagaaggggaaagagatggtggtgatggtggttggtcagtaggaagaagagaaaccatctgagatggacaccgttcgattcatcatcgttctcgtcctctatctgcacgtcaaacgcaactcatcctggagcacagagatgagtgcagaagcggcagttctgacaactgcctaaagtctaacctctggaagaagacccgagagggagaaacgacgacaaaggaagaacgcgattaactccaagacattctatctccctacaatctcaactgatggagaacacacaaaaaaaagcttacccggagactggaggcaagacggccaccaccgaaccctcgttaagcaacactgtatccacatcttcatctggcacgagttcctcgtcgacagcccatgttgaggtttccaataccttgccgagcttcgggaacttgatggccaggatgatcgacagctgagtgagtgaaaaccctgggtctgctgtagctgagtctacaactgcagggagagagacatccgttcgagaacatccagctgcatcctcggctgaagcaaaaaagagtacatggacagaacacatgatgacggcgaccaacaaagagggagtctggctttttttttcagctagcagatgatggatcagattcagctcgcgttgggtttcattctcattgtgttcagtcgagtctgtctgtggatgggtttgctcagcatcgtggattgctttcaagaagattgtgtcaagagagttcgttatcagctgatgtcactagtggttgtccttatgttctcccttctagttatcacaagagcgaatatggggttttaaagggggattgaatccagagtcaagccacaggcagaggaatccaagcttcgtccaccctctatccttcaaaaaagcccaacagcccgtccagcaactccgttatctccatacccatacggtccgcgttcgaggaaggttccggggggtttaagtccgaaaggtggtcgaccgaagagagacgattacagaggagagatgtttcagagagattggtttaaaagagttcgagaggagtccgaggcaggtaagctgaaggaagaggatgtcaagatcaggatttttgttcaagctggatatactttttgaaagaaaaaaagggagggaaaaaaggtacgaacctgcgagttgatcacttggatctagctctcatctttcttctcttctttctgagccttctcattcgcttcttgcgccattctacaggaggaaagaacaagagaacaattggtgagtttgatattcaaagcatggatgcatgcacaaaattgatcaagaccctttttcccctcttagtcgcacgaccctcgcctaaatcttcctctgtcctgtccaagcaagcttgacccaacggacaaaggtcgagaaagaacaagaccggcgactagaaaggaatcaaaggcctatctgctcaacaaagcctactcactgtctctcatgttgggcgaatggtgatggaaaggagagaagagagaatccagccaactacatgaatttctttttctgcctgggcgtaaccctaacagtcacggtggccggttcagggccagtcggatggctgagtcccctgagtgctgtgtagacacacgtgatcaaaactgagattagattagatcagatcagatcagatcagatcagcttaaactacaccgctcttgtgtcgtctgtatgtagcccggctggtcaagtaccgttcgtcgatagccatctgttcatgtatcatacaggagctgaagcttcttctgtgtttttgtccagcagcacatggacggatcatgtcgagcgagtggagtgtcttatgttctttctgctaacctcggattatctgcagtgtgctgtcgttcttcgttccctttgatccatgaacagctttccgactgctgaccgctttcggttcggtgctcgttccagattcatccttgtgctcggagagtcgactataagatacgacccttgaaatttctctgttctcctcaactcctcaactccttctatccaatctctcttactacttggaagaatggtccttcacgccctcaccaaagcgtacgtctggcacaagatgaccatagaaatgattgcgcggctaaagtcaaggaaggcacttcaagagtcaagagaatggagggtaaggtgggaagagatggcatggatgaagaaacacctgacggcagatgaggcaaaagagagacaaaaggtaggacggcgattgaaatggcaactggtgagcctgcagatgaaggaaaataaagctaggcttggagctgaggtgaggtggttgaagtttagaagaatactaaaaaagactagatcaagacgcacaggtgagtagttgatccagctagctcaggccttcctgttccatcttctgaccaggtgtgacttccttcctttctgtcttctcatctagactagaaaagtaaccattctccctatataggtcgaaacctctataacggctctcaaccgattgtcccttgccctttcttcatcgactcaagaggctacctgcggcaaagattcttacagggtttctacaagttcttcacccccccctttctctctggaatcagttgttcagctcgaagtacatttgtcaataccttacgtcatgcatgttatcgatggccgcttgaacgaagcaaaaatggtcgcagtctcagattaacagaaagggcagagagaccaatattatgtgtaggtcattttggtggtcgcaggtctgacagaaagttcggaatggccagcactctgattacatatataagtagagcacgaatggcagagaagaaagtaatctatggtgacaacataaaggatacaactcagatggaacctcctacactctccatagtaaaaggagaggcggtcgggccatccaatatagcaagctcttctggcgtaaaaggaaggcgcggaatgatccatatcctgacaggaataagcaaggagatctatcgagcgtttttgatcagaatacgaagaaagtaaactgtttagtgacgttgttcttcgcaacgaagctcatcatacaggaaaaaagtgacgagatggtgggaacctactacgatagggaagccaatggctgcaatggtctgtgtgatggcctgatgagtttatcagaaagaaaggaagagcacacgatcagttctctctttgcctttgccctttcttcatttgtgagcgaacaggtgagctatgacgcgaaggaggtagactcacgaacgtcgctgcaaatccaatcagctcgagtgccaaccacatataaactcttgaaagccggacccgtcttaatggttcatctgtaggaatgagtgttctatcctgaatacagtataagatgagcgccgtcacacccgatcctgccagtgcccctgagcccatcaaccacttttgattaaaaagaggagatagaaaagaatcgtcaatcatctaaatgaggggcaatcgaattagagaggtagaaaaaacatacgaaaagaccggctagaactcctttgggtacccagtggagtaatttcaagaatggacctgtcatgagaacctagaaaaaggatgatcgcaaagagtcaagacctgttagaagtgaacaaacgcttaagaagcataacactctgaagaagagacaaaccagacaagctgagccttgcagcaagttcgatactctctgctcaaccacacccaccg

SEQ ID NO: 3052 - DNA, 10327 bp, Xanthophyllomyces dendrorhous
ttcctcctttcccttcctagcctcccctccaccgttggccttctccgcccctacgttcgtccccgaagccggatcaggaacgtctatcccgctctccacgtcatcggtgtcttcatcaacatctatcttcttttgacaaaagcccatgacaacgagtgactgagtatgcataggtgcttgagggattagaccgttcggcgctggaatcccaagtaggccagcaatgaacgtcgttattcctagcaggaagactttgatgtcagatgtgataaagaggtatctgattaggacatgttgtgcgcaaatcgataaggaataagagaagtataaatcgatgcctacaatcccaatggaagccgggaggcttcttcaaaggaaattcggagccctgagcgatcaacgaagagacgttatgatcaaatgcaaagagcttgatccatccaatatctcaagtcagcttcagcacacaggatacgagagttagcccctagagctagacgaggcgaaaggacggaccacaaacagaacgaatccaaaaggaaacgagaccccaacccactttccctctaacgaccagaatcgaaccaaccattgtcttccctcagccggcatgaacgccggttgaaagggtagcctcgtctcctccacgtcgattcctacatggaatctaccccagtaggcaagcccgctgcacgcgaccacagagattggcattccgtaatctgcgatgaaccgacggacgtgtcgatggaaatagggctgagtggacacaagattgaatacatgaccaaccacgagagtcaagatagcgagaatgatggagaggaaagaagacgaaagggggagaggaaattgacgagtgatgactgttcaagaagatgggtcagcagtcaaagggttaatcaagtcctttgttgtctaagtcttgcaattctcctcttacataccttgaactccgtattgaagatagacccaactgaatgattggattgaataaaatcagacacggcgatgagcgcgaagttgtaaaaacacgtaagagttgtaagagccatccaaagaactctgcatatcatacctaacgtagaacccaaatgtctcacagggataccgggtaacatatttcaaaaagttgcatcccccaaagacagcaaagacgatgtgcatgatagctgcccagaggtaagtccatctaagaaggagcgagaacggcagagacatgatcaaaatctgtgcgcggagtatggtataattctccgaggcaagtaagatttacccaataaagttgtgataatccggtccgctctccatcccattgaagatatcataaatgaccttgttaaatacagtaatcgggccttatccatccagttgttgcgcatcaagaaggaggtcaatcttctcagacaaccagaaaacacgtgtagtaagagacgagaacaaacctgttacccccaaaatacacaacggctgggcaccaaatatcgaaaaaacaaacgcagatatgaaggcttttcgagtagtatccgagcacaggcagaaaacaaacagatcagcgcttgatgtggtttagcatagcagaccaaagatcaaaacagagaaaaaccatcttactggagagcagcacctcgttgactccatatttcccggtcgtttctatcaaatctagactaaaagcaatacccggctagacaacgacaggcatccgaagcgaggatggggtaagtccgacagatcgaacgcgttagaaaggaaataccaagagaaagactgactaggacattggagaaaaagacaaaggcagtagctgggacgacccgatagttgtacgcgtccacccacttgcaggtccgaaggagaggacggagaaaccgaattggcaaggaaggaatcggtaagagtgaagtcaaagactatacagagagtcaagcgggtcatcgagaacacgcacgtctgacacataatatggacttctctgcagtcagtcatcaggcagatagcagattaaattaaatcctttattagcatcaaagcaggcaaacagaaagaaggtatggtaggccgtagaagatagagacctaccgatttcaagtcgttccacatccctctacctggataacccagccgcccgtaaagggatttcctggttcttctgccatccaacacatctccctctgcagcgcgttcgctcgaatagttagttatcctcgagtggacgacagacggtctatcggatgatctcctgatcatggctgtgtagaatgatgatcgaatggaattgggcgtagacgttctgggagctttttgttataggggctgaccgaagctatgactaaccgagattccttacccgccaacaaccaccaccaactcttctcttcgagtatacttctatcaagatgggaaaggcagctgctggaacaccgtaggttcaaactctctgtacttctattcgatcaggactgacttgtgtttgtctgtcgcgttttaaacgaaaatcactgaaaggaaacaagtcgcgaacgccatgaaggccaagggcctgggcagactcagatggtactgccaggtctgccagaagcaaatgagggatgacaacggattcaaatgccatatcgccactgaagctgtccgtataacttcatctttctgctaccttcacaagaggagagaagagtatggacttgatgggcctaaaactgattgcgtctcctttgggcttgtggcaaatgtgctctttagcatctccgacaaatgttggtcgttggagagaattctgggaagcacattgacgagttctctcagaatttcatggacgagttcattgttcttctatctcgtcggtttgtgttgtttctcttggtctctctgcctgtcttttcgcgttcaaacttctgatgtgtttccgccttcctccggcaatctttcgaatctgaatagatacaatactaagcgtattagagcgaatcaggtttatcaggaatatattcaggacaagcatcatgttcacatgaatgcaacaaaatgggttaccctgaccgactttgtcaagcacctcggaaaggaaggaatcgttcgggtcgacgagaccgagaaaggattctttattagctgggtggacaacagtccaggagcgttggccaggcaggtgcgtgtcgtttctttttgtctctctagaccgggaagcttggccagaaactctcttatctcaatttacgagaaagtagctcgccccagaagttcttacacacattatactctgaatctgatcacatctctaacaggaagctattatgaagaaagaacgccaagatacagacgatgaacaacgacaacgaaaactactggctgaacagatcgctcgggcgtctgcctccaactcgaattctgaagatcctaccgctagtgatggatctacagctgggccgaaagttgaggaaggcctgaaacgtcctgctgaaggagggaagattgcgttttcgttcggagcacccaaaccagtagctgctgctacaacctctgctgcatcatcgagctcacctgcaccaatctctcagctatcatcaacatccacaaccacttcaccaatgcccccgcctcctcctcccccactgtcaacgtcagctcctgtatcaaacccactcaagatgacgatcaacccgctcaagcgagcagcaccttctaccaatgtcttcaaggcttcttcatcatcttcatcatcttcatcctcgaagggaatagccaggccaatgagtgcgacagagaggttgatcaaggaggacgaggagcggaagaaacgaatagctgagaacggaggtcggacgccgtttggaggagccaaacgggtcaggctctagagaaaaagactttctcttcttcaaaatctctggtcgattgttttgactctttactctgtccggtcttcgtctagatttcatctttatttttctctttccttttcaccggtctgttagcgtgcgctgcacaaacatagcacccacactcagagaactatactatgtatatatatgtgctcaacggtgtcccttctgtctcaacctctgttagctacattctgtcaagagtatgtgaacatacgcaagagaaaggatgttgatagctctgtcgtgggcgtggctgaggtttgctgagtcatccaatgttgccttagtcgttctttctctcgcactctttctctccctcggacggtcaaccatggatgagcatacaaaagcagatctttcccaggatctcgagtctttcaggtgggtctagctgcactgatcatcctggggttgtgtgttctttcgaactaatcgcttgaatatccagaaaacaatggcaagatgaggttgttcatcaccatcagcacgggaaccaacaatcgtccgctgttcaaccccgattgtctcctacgacacgaacagtaccgattcctccaccatcaacgtctacaccgacctcaccttccacccagaaagctattttgaaatcgcccgtaacatctccaaagtcaaagtcaaaaatcgtccctcctacgtctctttctggaagtgcccaattcaaacatcaccaaccgctcacttccactggaacactcaccccctcatctgaggcttctgcgctcgacgtgtatgcactcgccatcgatgccgaacgatcaggtcagcttggtccggccgttaagctttatcagcgtgctttccggatgaacgatcagatagacaagttgtaccagcgaactcaaagggagctcgcccttcagcatgagaactacccgacggcctcatccgatcctctcgatccgccgcctatcgtcgagccaacaggtgataatcggtccaaccacgaagctcaggatccagtgggttcattggtgtttgatttcaagactcacttccagctaggtccagactatgttccagccgaacaagccgtatcctcttcatcggcgtcaccagtgtacgcctcgatcgcagacgaacacccaacatttgttcaggcggaggaaacagagccatacgcttggggggttcttccagaggagatcgtcatatacatattgaccatcatgatggaatctggtgattggaaaacggtctccgcgttcgaaagagtttgtcgaaaggccttcttgttgggaagagagcaaagcgtttggaagtatgtatccctagttcttctcactgctcttctctgggtcatcaatatgttcagttcgtgcccaacttaccgagtcgatcttcttctctcctctgtctacaacagaaaaatttgcgcgctcacgtttgtgccgccccagatagaacgacatataagtttacaagcgttggtcaaaccgtatcattttaattaccgagagacgtttataaatcaccctcgagtccgaatggacgggctgtacatatctgtcgtccactgttcgtcattttttctctatctcactctctcttgtcttcgtagtctactagataggctgcagctcaatcgaatgatactatggatatggggcttatgatagatcatagacagggtatcactgagaattcgtggtacgacgaagttcataccggtatgttctcccttcttctaaacgtgttctagccagagaagaccaagctgatcgcattttccactgtgtgtgtgtgtgtttcctatctgccagtcacctatcatcgacttattcgattttatgcggacggaacggtaatctccctgctttccaccgaacagtatgttgactcttctccttcttcttattcattcacgggtggccactcatctatttgtcctttatccatcctgtctgtatacgctttgaatgtagcccttcaacgctagttcccttgttgaatagatcacttcggatgaaaggtcttcatcatggcaattggtctctgacctcctttgaaccgtctcaccacaagaaccaagttcatcttcctggagcacccagagtagtcttgaccgggctagttgatccagggctgatggagggcaggatgaagaagggaaacaaatacgagttcgagatggatctagggctgagatgtacacagcttgggaggttcgccatgcttctctctgtctcttttatccgttctcagctctcttggagcatatctcaacttatcaatctctctgtctttcttcaacggatcacaaaatgacgaaaacggttaactgtggaaacaaagatggaacaaattagacctacacacttatttctccaacaatcttctgacgggcgaggttattcctattggcatggccgttcagaaaccgttctacttctcaaagtatgtattttacgcttcttttcttctgtctgaaatcttgcatttcagtcgagcggtcatgcagttcatagaagaaagaaggaaaagagagactgaccagatgatttgcctttctccatatgatcgattctcctccaccagagtcaaatcctggcctccattcggctaagaattcagctctgaaacatcttggtactttagtcatattcctagattcctctcttgcttctcaagtcccagttgctctccatctcctctaaatcacactatatcatcatcctcctggacacagttctttcctttttctcttatcttgtctgtctttgttttcagatctttatattcgaatcttatatattcaactgcatcactttgcttcaatatatattgcacgtacatttatgttcaatacacttagctctttttgtctctttgatgttattcatggaacaaaaatgaacaaatcatgaaccgcttagaggtgtctccatttaggagagaaaacatagcataagatcaggatagacatggttggaaccggatgtgactgcatatacatatggaggggtatctctgttcttacagcacggatggtggaatgattcacacgactgaacgttcttcctatccgactggaaaagcagaaagaaacgaacgacgaagaagatcttgaatggagaaggggaatgaaatgaaagagaataaaaatggaaaaagaagatatgaacaggataaatacaaatggcctggatcggggtgatttgggctcatatgtcatagcatactcgagctcctacccatgcaaatgggtaattatgtctgagtagcacccaaggcgatataaacaaatcgtctgtcagccttgagagataacataggatatgaaaatgtgtggattaaactgactgataaaagtttcgaacggttcgacgacctgcgaagtaagggagggtaacgaaggatcctcccaactgatccgcgctcgacgtcaaacgaattgagacagaactacgagtcagctttcatcatgcggttgattagtcaattaatcaataaatggactcacgacgacatgatggacctcatcgaagaaatccgagctgtaccctgggtagagctccgatgggacatagcccccaccaacaacttgttgggctgggtgccctttcataggtgttgatgtccattcccagacacctccattatggcctggaatagtcaaacctgtcgagtctgtgtacgacatttcggctctgatggtgaagaaagagagagagagatatcacaacagttcagaacgagtggaaaatcaggaaccgagggaaaagaagaggcaacagaaaggtcttctcacggaacaggatgccagttcttcaatccggtgttactgccttcccaatcagtcctgtctccctctggaaatttatctagccaaactctgagttcagcctcggtgggtaacctgccgcctcttgatttggcaaaagcgagatgctcgtcgtacgacgccatcagtggccagtgttgagcgattgcaaaggataccgggccatacaccgtctttaccttccattctccgtcggtgtcgatccaactctttggaatccttccactagcgtcatcgccgccaaactcttgcttcaagaaagatctatactccccgttggtgatcccttttcgttcaattcggaaagcgccaacgttgatggtatgtaccccgttctcgttgtcccacccgaaaacatgatctctccagctgtcttgatcgcggtactttccatcttcttcctcgagatctttgtggccgagggtgatctctgtggcagggatattagctatagtcgagtgttgagcgtctcgttcatgttgggcgtcccataatcgggcgagagtgctaaaggaaggagaggcgaagccaggagggggaagcgtcttgggagattgaatgagcatgtagagcagcgtttcggcgtgcatgacttcgtgttcgtctaaagagagagagagcatgcgcgcacgaggaagaggagtgaacctgtcatcagctagccattcacatatcaaaaacaactactcaaacacacttcgaaagtaacgagaaagagaacacgtacaagtcatctaaaaatcgtgtgaaaagacgtagataaagagccacgatgaacaaagctgtgaaatggagacagacatgcgaggagtatactatgagactcacaaagatgattcgaccgagcctcctgtccatctgtcgctttccagattgacagtcctcatagattttgatcaaccgttctctcactcggtttctaaattgcagaatatcctccaacgaaggccaatcttcgtctttctcaggtacgatcgaatgggactgcagtaagggatatatcagccggtcgagccattgccgtaatctcttggttcgtcatcaagtttcatgagaagaaatgtgatgtacaaaaacgagggacatacatgacactgctcggggtcatccacatttggatcgatgcctcgctcgaatagatccttgtaatactctggctctgagtgaggttccttcaagtgtcgggagagaaatatatccaagaaggtcggtatatggcctaaatagaacagacctgtattggttttttttaaggaggaagcggaatcgatgtggtaagaaacagaaataccagaaagaatataggattaacgaacacttgtgtctcaagtcaattggcttttcatgcagcacctcctctctaatcatcccgatggttatgagatcccagaacctccacagatcttcccaatcgtcgaccgtcgggattcctgggagaccttttccatccggttggcccaaactggtctgtcctccagattcagacttgagtaggatgcggttggtcggagaaaacgttacgacaggtcgttcgagcacccagaggttgtatcttccttgagagtctgggaatcgagtgattggtcgaaggccagctgaagcaaatactgataaagcctcggtaagagagtacttttcatcattgatgagcaatatgtgaagtaaaagatgagaggtcagaccctggacgaataggaaggtataaacggagtgaccccaactttgtagctccattcgatgttgacaagctcgccagcatcgaactgaacgctcatgcggtcgccttccttcgacgcaggaatcgtgatcgtttgagctatgttggatcgaaagtaagcttcgtggcggcctgtatatataattgttaggagcgaattagtactcgtcttttcgaatcagcttgagaacaaatcgttttgaagtgacgagcgcgcacctttcgggacattgtaccgtccttcatacgtccaggagtctttcattcttccgggtcctttccatccaatctcccgctcgacaccctaccaatggtataaaaagaggagaacacgcatcagttctagacaacttgacagaacaattcaagacaggaaatactaagaatgagataaaaactcaggaggctcacactccacatattttcagcccaggctctggtaacaccctctggatcattgtaagccctctcgaccacctctttctcatttcttccatctagaccgacaaccaacctgtctccgctacccggtcgaagcggaatggaccgaaggaactcgatggctccttctctgtcaaagttgcctaaactagagcccaaaaacagataatggattggttctccatatgtatttgaattgaccggattagaatttgaggttgaatccatagagtcggccaaatgaccgccttgttggatccactggagaccgacatcatacgttccacacactcctccggttgtcacatttccctgggccatgattggacccagtgaagactcgtcaagagaggaaagcgttcggtctagttcggcctggtccaggtctagtgcaaagtacttgacctcggatttttctccatgagagcgctcggccagggctttaagaaaatgactattaaaaaaagccgtaattaaaatcgg

SEQ ID NO: 3053 - DNA, 3348 bp, Xanthophyllomyces dendrorhous
attaaaatcggtgcatggtgcagggaaagtcaggtaggcgtaaatcaattgagacggaggtgatctaatatatataaaagagttttgagcctgcttaggaagtacctggttttggaaagactacctgctccgagctctaggacgacgccgcctagcatattttttgattttcgcccgtccttctggccgttaacgtgcccgttgacacctccgttatggactccgacatccgctgacccccaatctgcaactctccatctctttaccgggccttttctgagcggatagggatctttacgattcttctccggctcttttttctgttcttcagctgtgtttggaaagagcaatgagacaatctctctggaatgcgccttgagaagggataattccactgggtagagatagtaggaagggcagtcggtcgtgatcctgaccaggatgagcgcagaatacatataaatggccatgccagaggaaaagcaagaatgaagatatatcgtgagacatcaggtgtccttcctatacaagtctggatcaagtttgaacgggaacataaaaatacacacttttcatagagcttgaggccgacatcgtcataaaacaacattgtcggcagactcctcctgtatctatacccgtcttccaccgagcatccaacgctatgtccgtgattctctccatccgaattgacccactgggttcctccgaggccgtttcgaatttgagcgagcaacgatttggacggcggcgaacgatctctcaggtcatgaattcggtctagaacggaccgttgctgggatgatgatgataatagaaccatgttgcttctgttgttcgtttcaaaatttgttcagagatattgatgaggacgttgttgttaacgatgatgatgagaaggatgaaggcttcttaacgtgtttccttaccgaaaatgaaatgtgtgatgtgatgatcgaaacagcagacgggtcagttgatgaggtcggtcaggcacacgcgtggtcaggcacattcatgcatacgttcgcccggtcatgtactcgagcccgggcaccgtcagggacgctcaggaacgttctatccgcagcaatcaccgtcaaggtccgatcgaggtcgaatgtgtatgaatcatgacgtggctacaaggcactctattaaccctaactgtaactccgccttcgtacatctctgttggtattccatctcctaatactaagctgcatagaggagaattggactccattgaagatagacccgcacgaccttcgcaaactcacatatactcacatatactcacatatactaacccaatgagtgctatcgaagcaatcaaaaaacaatccgagtacgagcttatctactggcctgggattcctggaaggtaaactttcctagatctttgaaccattcttggttgataagaacacaagccctgattgtctggtttcaattaaaaaaaacacctctaatgcacttgaaaagaggagagcccgtccggttagcattcgagcaggctggagtggcctacaaagatgtcgcattagaggaggaatgtatggagagattgacgcacatatgctctccatcatatcaacctcctcgtatgttttatgtatccttcgatctttccgtcttccaacctgcccggaggaagatctacactgatgacgcgctcatggttctgtacatcatccagcggacaccttgccgccgtttgcaccgccgatcctggagcatgacggtctcgtcttgtcccagttgccaaacattatgttttaccttggtcccaaacttggactggcccctttagatgaaacagctagattgaaaatcaatcaggtgtttctcactatatgtgatgcacagaacgagacgcatgatacccagttcgttccgtctctattctaccacattcgtccgtctttcatcgagctgattcttctccattgcttgatctcggatccgaaaataattgttggaacgaaaacaatgcaaaaaaagccatcctatagcagtgtcggattactatgagaatcagaaagaagaatcgctccgccgatctatcgatttcagacgaaataggatcccaaagttcttatcgtatgtttctccttccttgtcactgcctggggaccctgaagaacgagagaaggagagaaagggcatgttgcctgacgatgtctgactatattttactcccttccggataacaggtactttgaacgactgatcccagacgaatcgacaccccacgtcgtcggctcagacctcacatacgcagatctaggactgatgcatcttatcgacggtctcctctttgcgttccctaacgccatgtccgtccgactcaagtcttatccgaaattgaagaacctctacgaacagacaaaaggcttggaaaggatcgaaaggtacatgaagagtgaaagacgagtcgagtttggaatggggctatatcggagatatccagagttggatatcgaagatgatatcgagcaggctcagcagaaggaataagagcatgatgggtcgggttaagtctaccacaaactggtatgattcgaatttgcccttcatcatgtcgattctttctattgtcgcccttttctcttacatatcctcccagctaacttcgcagtcgtgatcgaattctcatttttctgttctatccttttgcctgatagcatgccgttttgtgttcctccttcttagcttagaaatcctaaggaaaagaagaaagagagagcaagagagaaaaagaacaatccttcaaacgagcatgaatcgagaccgcaagccacaaatcttcctgggtttacttagagtagctccagacgttcttgagcactaaaatttcataaagaataagcgaaaacacaaggcgggagacacgtcagttctcgatcgactcgacaaagagttccggcctcgagagaggagggaagaagacaaggaaatggaaaaaatcgagaacgtacaaccggccttggtggcaagtcggttgatggagtcatcagcctcagcctgggatcggacctgtccgacaagagcgatggtggttcctccggtcttgatggcctttccctcgttgtcaacatcaacgatggtgatctggatggaagcgtggtccttggcgttgataagtcggcctgcaagagaaagagaaatcagcctatttctccaatggaaggttgatggaggagaccatgacagaaaggacgaaccagtggcagagcactttcgggggacgtaaaggtcaacgaggacaccctattgatttaggaaacacgtattcgaatcgacaatggaaagaagaatgataaaaaactatgatcagtcagccaa

SEQ ID NO: 3054 - DNA, 9284 bp, Xanthophyllomyces dendrorhous
gaatgataaaaaaccatgatcagtcagccaaccgaaccttctatgatatttgaattatatgtttcttttgttgggtaggacagtctgaagagggcatgggtagcagaagaaaccctgagaagaggtaatggaacgattgaaaaatccagagatctcaagaagcggcaagagagtgaggatattcggctgtcggttattcttgtcttcgatcctctacacagactgacaatgtcttcagacacctaggtcttgtatcgaacacacacttcctttcttctgtactccttccatctcctcttcaaagacctctgtcctacagatcttcgtggtcccctgtccagacacctccaagaccggctttttccagcgggaaaataaagatagaatataaagagctaccaacctggtcgttctccattttgatcgatgtaaaggaaaaagggaaggtaaaaggggaaaggttggaagctgtgagaggaaggtttccgggtgttttgaaagatttcacaaggatgtttttttttgggttcgccgagaagggaagagttcagggtgaatccgttcgcagacgttggaatatgatgagacgattacgatcagggaaaggagagaggtccgaattttttcatccagaggtgaatcgtttccccaaagtcccatccacagccaaatccacacgacacacattccacagattccaatgtagagaacggacgaaaatgccattaaaaaatcacaaaaaaaagagtcaaagactgtcagtatatgctcaacataacaacgcatttctcctcatcaatcatcaagaaagccgaaattaaccaaggaaaagaaaagacacgcacacgctttgacgagagaagtaaaaaaaagaaaaaaaggagtcccttcacaggagggaaacggacgcacagagcatgcgaaaaaatttgcgccagggccagtttggtgagaatcacgtgtctcaacttatgtagcgaagagatttccctatcagggcactttaattgttctatgttttctgtattccttctctattaacctttcctctatcggctctaatgaatgacccttcatcttccttggtcctgtgctttgtctgctattgatcttctctgatgatatctctatatgttcttctgtcaacttgctccatcgccacatttcggtcttctcggtcactcgttatctcttctttgtccttccggacgtgttgtttcttgttcccgacgtctacttcagaaatcggagccaggtgattgagagtgagttttgacgcaactaagggcgcgtcaatcgcttctcatctccgaggcacatcccctcgccatcagaaagcagctcaaacctatagcgtttaaggaccatgagttctgtttctcgcgaagggtttggcgaggaagacaaacggatgaagacagaaaaaaagaaaacctgtaaataaatagagtagagagtgatctggacacgaggaaactacaggacagagataattgatcaagctaagatgaagaaccatatgatctgtttgtactaataacatatctacatgtcacaaagatgactttgaacgtgtactgaacagaaagagtgctctgtgattcatctttgtagacggactagaccatcttcataatccaacattagactccttcctaatacaacactataacccgtgtctaatacgaagttgctgcgtacagtgtgttccattaatcgagcacactcctcctcctccgatcgaacgcccaaccgttcctgacccgttcccgtcagcaagcactcagggccgatcgagactgacaggatttttgatcccttaccttgacttccacgttgacaactcttctttcccatctctcatccatctcatccaccaatccactaggtagataaggccatgtccgggttcgaatcaagtccaaaggacgacgatgacgaggaagacgaggtcgaggtagcacagacagctactactcctggttcggtggagacatcacccttgctctcatctcactcaaccaatcctacttatgcgtctacttctgtttcatcggcccatccaccacctgttcttccgtcgcccaacttgcagactgtcaaccgatcctcattccggtccagacttccatacatctggacggtcctcgccgtcatgttctatctctcttttaccgccatcatgtcctcctcgctcttcaccctacttctcgcgtcctccttcagacctgcgctctccgataaagaaactcttcaaaattccgttgtcgtcagtggtccaagagatatcaagctcctcaatgtctcccaggacggcacgatgtggttcgagatggagatcggcctcggggtcgataccgatcgtgctctcggcttcaatcaccacgatgagagaggtatctggtgggaacgaacgaggagaacctgggcaagacgcgccgtcggttcgtagttctatcaaggtctcttacttcttttcatgttcagcgcatctattgacagacgacgtccaacatcctatccaacaaatatttagactcaatcaataaggtttctgtcgcgttgacatccccgatcagaatccagacggcagatcaccacccccttgtgacggttacccccgatccgacgcctctgcttgtccccttaacatcctctctacaaaagtcggctgaatcttcatcgaatttgtccggccaacaacccaagtatccaaaatggctcacaactttcaccgttcggtcagcagttagcatggatgcatcgccagaggtgcttttgagcttcttgaaacagacatggaacgacaaaaaagttgacatcgtggcacgtctacccgacgacgccgttacgatcgctggtgttggggattggctgggtcggttcacgattacgccagacttggtcaaagaaggaatggatgtcatgaacgttagcatgcctcgtgagtacccttcgggttcctatctttgcaatcttcaaacggtcgaccttattctccggattaagacctcgggacaatgccagaggtaggttaatctactctcggtctgtttcgacttgtcggatcgataaaaatcatactgtgagaatgcgcgttgacaacaagaatacctcttttctccatcagttccagaactaccttttccaatgtcaattccgttgccctctttctgaaacatctgcttcctttctctcactttgtgggcggtagttcctccgattcgaaatcttccgtcaccgttaccagaaaacctgacagacttgatccacatggaagactacgttgtgtacccatctaacgaatccacttctcgtcttctcctcgacgccgggtcgaccattcctaatgtttttaccgacatcaccgcctactttcccttccgctttgctttcagcgccggcgtcgtcttacctaacaatgagcttcccgataatgtgattgctcatgtccgaagcttaccggtcgagatcaatccttcgttccgtcgaatcgctatgaatgcgtctggcgagatcgtcgcggatccaaagccagctgatggatctccctcggctctctcgaggtttatccaagcatacttgatcaacgaaccctactcacttttactccgtccattacgttcgcctggagttcctaaacctatttgggatgtcgttgcagcacttccacccctcgtcatgccgatccccaagatggatgaaccattaaagctgatgagatccgttagaatcgaagggatgaagattaacccaacaggcaagatcgtgttggctactggtacggtcaagaccgagatctttgtacccggagtcttgggtgatgtagatgacgggctagatgttcaaggagttttacctgaggtcttgatcttcaacgggcctgtaccggatgatgacgatgacgatgatgacgacaatgcccaagccttcagtacttggggagcggacaaatacatcaggagcgatcaggcaagaacgcttgcaggcgaccgaccgcttccagatccgttgcctaaaggtgtatttggtcggctcttaccggacgatcatctaccgtcgacctcggagaagcacccgactgagcctagggtgctgatcgtcacgtctcccttcaaggacgctcctgtagagattctagatagtgctcagcttcgtagtttcgttgctaaggtatatttactctcttctccctcatgagggcaatatctcgattagactaacgttctgactcggcggttgtgcatgatccagcttattttcaaaggcggagcattagcaggtggtgagtagagtttcaattgtcgtttgtgcgatatacttctcgatcataatattgattcaatatatgctcgatctacagtcaaaggaacgtgtgattgcaggacgctcatcaaaggccttggatctgacgtggtcgaaatcaatggaatcccattccagggcgaagtatacatgggtcgtcattaaaaaggttgtcccgttatccttctgccaagctttgctctctttcttttctttctcacctcttctggctttcaaaacatgttgtgtgtatcctctttatcatcattccgtcggttatcattctttttatcctcttctctagaggaatcttttctttctttcttctctttcttgacttctcgcatcagcacacgtcagttttccttgctcaagagtttgattttacgaccgactgtcgccgctgtacaaccgttgtatctctcagagcatactctcgcactctcgcactctatactctttgtagtcaaattatgcatatatgtgatcttctttattttgtttggcaaaactcataattgcagacgagaaatcgtgacgccagataagataaagaatgaaaagaagacccgagacctctgctgttttataacccacaacgatcatcaaccctcaactctcagcacattgtatatctacaattacatcaatatctacataatcgaaggaaaagaagtgttcaaaagcacaacgagtcggctgtactaaaagggaagaaaaaaggatggctactcagttcatgacatctagtctagcaggtttcggactggtttgttctcctccctctcttcttcttcctttgtgtttgaaccgacttgaagctcactcgatatcattgtctcatcttcatggtgtctataaattggaatcgaaactctgggctctacggattcgggggagaaacaggtcgcgatggcttattattcaatctcaagtgaaatgcggaaagaggcagaatcaatatctttctcgttcgttctgatctgtccttccgtctactttctgttctcatcttctgtccttctcttggagtttgctgtgctgaatcctggctcgattcgtgtcctggtgtgtcttcctctttgttcctggttattcggtcttggggcttgtttggaaaagacttgcccagacctcacatttgatcaacaacccccctactccatcgtctatcctcctgaatacaacgatccctgcttcggagagatatgacctcttaccactaagtgcgcatatcaaagctcgctggaacgaggatttggagagtttggttaagggtttgattaaggggttctaaaaggaagaagagtaaggcgtattttttcttgggggagggggtttcgatgggtggaaagtaaaacgatctcctttcctcatcttgatctgtttctctctgccgaaggtggaacgatagtgaatcgcagaaagaaacaaaaagtacactcaaagttgcacatatcacgtcgaaaaaatctgatggttcttcccgccatatcggagctacgtcttgtgaggtttcgtcgttcaacacgaatcgagtcaaactgagacaacgcaagaaagatagaaaagaatctgtcgagtcgttgtctgctttgtggtaaagcaaataaggaccagaagggtagcatcatgttcgggttattctacgcctgatctctatttgctaaatgatccagcagccggtcccgttcatcttgttggtcgattagattgaagcaacccagaacttttctaaaagctcgagattcggggaaggaacacaaaaaagagcatagatacaagaagcatgagattgatcaacaacgtgaagaagagacaaagagaagctaaggaaagattgggctacagaaacggagaaaaatagagacaggcaaacggcaagatcgaacactggagaaaacgtcttcaagcaggcgcaaactccgtgctgttttcaccatccatcagatgcgttcaagtcagaatcctctcttgttactaggttctcgtataccaggacttagtcaaggaagaaagaacgcactggtgagggcctttgacgggatcaggcgcattctctgatttcagatcgtactgatgatgaccaaagtagtccatctactcgaagaaaaagaattgaacattgaatgaactctatccaactagacaaagaagatgaggagtactgacctgcatctcttgaaagttggtgggtagttctttaccaccacattgtttcaaccaatccagcgtcaccgccagcgcaggagcgactgatagaagacgcaaagaagaagcgaaggaggagtgatcatggtgagtacctctccacacataagcaacccatccgagcaatgatagatgacgaaccagcatcggtctccaaagctaccctacagacgttcttgagaccgtcataagttcctgaaagttcgtgggcgatctcggggatgaacagcgtgtttttgcattgaggatctttggcgagtaacggttggagaagatcagcgatccctcctgatcgaacgatacaccctgctcgccagattgcaagacacgtctctagcgagacgccccatttcttattattttcacgcacaaacgatagaaggagtcagatgaaacgattcttttctgcacagctcaaaacaaagaaaatgacaaacctcctcgtcagaagctttggtgataatgcccaagccttgcacaaacgctcccaagataccggcatatgtcgccttcctgcagtcctccacaaaggcagggacatctttgacaaacggctgatcagtctttggctgaggaactttcaagttttcgagaactctgtctctttctcctcttcgcgcagagatgactcgaagacaatgagaagctgccatggcaggcgctgcgaaatgccgggttgccatttcctttttgcccatgaaacaaaagaatgcgaaacgttattgagtacacccgaagatgcaaacggaaggaagtaattcaaacaagagaacagcacaaacagcgacgctccacgttccagtcccttcagtgttatcgacgtcttggacgaccttgtcggcaatgtcctctacgacaccctttttgttgaaaattccatctccttttttgaaccgaagcgacttgtatccaatctcgatcaagtaattgtccctatatcgttattgatattcaatcagtgaactagatgacttgggttcgatcaatggaaaaataaactgacgaaagacgtccctcggcattccaagactcgaaaatatcggcaatctcatcattactgaggccggcttgatgtcgaagcaacgaccagatctcacatagaatcgaaagttgggcgtgttctaaacagatttttccgcgcgcgtggggtcagtctcgagaagaatcgggcaatgcgctcatgaaaaaaagaaggaagcacacctattccattatggatctacataataaagtcgccaaacactaccagcacgtcagatcgagatacaccataccagaaagaagctcacagcatcaggacgtaccatcttgacataatttccagagccgcccgggccgagataagcaacacagggctttccatctttgtccttcgcagcccatttggcgagtagatgttccaccttatcatacgcttccttgtctccaccggcggacatcgaaggacctctccttgccgcttggtctatgaaggggtttgccaacaggagacacacgtaagcaacaggtttcgggttgaaagcatgaagaaaagaacttacagccaccactgactccgcaaccaatgtagtgaatacccttctcggccgcttcccctaatcgtctgttcgtatcttcgtaccattcgtttccacagtcaatgatgatatcacctttatccatctttggtaggaggtcggataggacgtcgtccactggtttaccgtggggaagagaaaacacgatgatccgtggttcgttgggcttaaacgccttcaagagcttctctactcacaaacgaacacccaaacgcattagaaactccagagataaatgtcattcgagactttcttcggagaccaaaaagtaagcttgacttgaggagcgtacgaaccggcagaggaaaacccatgaacatgttccgcagggacgtcatcctcatctctcgctcgcttcagaagcgcttcagcttgttctttatcgtaatcaaagaatcctactacgctctagaagagtctcaaaagacgtagaacaatcgcggcaaacggtcatcagtctgtgcaagcacatatccagcgtaaagatcgaacaaacagaggacagcgaaaagaaggagaagagagaaggaagaacaacagagagaccaatcatacgtttgatgaagcaggagaagagaacaacaaggtcattcctccacccatagaaccacctccaataattcctacttctacatctttgatctgttcgttgtcgtaatctgccattgtaatgtgatcaatatatctatcgtgtgtccggatgagcaaagaagagaggatgtgagagagtgaggtgatagaagactgagacaaatcggagaagatgagagaagtacgtatgctatatatgatcactccgatgtatgctgatggaacagtcggcaggtataatgtgattgcggcatatacgaatctcgttgtggcaaaaacatgacgtcagcttgcccgcacgtgttggcacagacacatccatagtatacgatattaatgtctagactgagaacgacagaacccggcaacaaagatggcaagagaacaaaacagaagagcaagcaaagatggaaggagatggtatctagaagagaagagatataagacagaaaggcttgtagaggacagaaagaacacctatggctgggcgaccgtgaacacgggagacaaccaagattctggaatcacacaagagccgaagaagctcggtcagtttgttttcccttgtcgttagagatataacaaggacataccataatc

SEQ ID NO: 3055 - DNA, 1017 bp, Xanthophyllomyces dendrorhous
gacaaaggtgtaagcagggtggtcctctgtatgaacgctaccgtctttatcaaatacgacaggcaaggaaacattgaagtagaaatccgaaatgttttttattgtttttattaaacccagaggtccggaagaaaatgaaaagacttcatgtcagattggtagactgaagggcgatcagaacacaaatacgaaacaaaatggacttgcgtatctaagatggggtaatcattgtacatcgcaccggcgactcctgcgtatagaatctggagggtttggtcgtctgattgtacccgaatgtagccctattattttgattcgtatccaagaatgtcagcgagacacagaaaactccgaagaaagagcatacatgaactggagagaacacccacagaatagattggaacgctcttcccattcagaaccggagcttcgaatccaacagtgacttgaccggcctcaccggccttgatagtgatggactgaacgttaaaccagacagttgccccatcgttggtgacaggtacatcgaggttaggttgactatcaccctgtttagcgccattcaaaagagaatccagcaaaaagaagatagggtcagaaaaggagtaaacaacgcccgcgcgggtgtgtatatgcgcgagtctatctgagtatccttgaaacatgacatacatcagtgaaagtataaacggtctgagcaggaacatgcgagatttgataagtcaccgcgtttggtcccttattagtgatcgtgaaatttgcgttcgtgatcggtcggtcggtatcgttcaacgcgaactctgagacggagagaacggtctggtagtgaacggcggcgtaggcgtcgatcaagcctccgccttgttgaacgacggtgtgaatctcggtggtgtccagactcgagggaagtggtctggcgtgcgtctcaaaaatcgatttaatcgtctttggtttagaccgaccatttttactgatgaacaaagctgccacgccagagactgcaacaaagataggtaa

SEQ ID NO: 3056 - DNA, 3542 bp, Xanthophyllomyces dendrorhous
gagtacagcttttgtggcaagctagagaatgacgccatttcccggctaattgtccacacgcgccccagagaaagaagcaaacatgatgagaacaccggaagaagcacactcacactcacaccgtcgaacgaccaacgagataccgttctgacggaaatacaacacagagggaaacaaaattagggaacatgccggattcttcgtttttgtcgttcgtttctggagctctgggttggctgtaagtctgaactcgaaggtcgtgtggaaggatactcgttctttggctgacgaatcctgttcttggtgacctgtacatcgaggacatagatacttcacagcttggtcggcctcgttctatccccaggtcattctcaactatcagcgcaagtcgtatgtcttctccttctttccttctgtttgtttttgcgcagaaaagaaaaggaagagtcaggctgaacactcttatcgtttcaattgtgggttctatccgggtgaatcagtgtggcagggttctcacccgatttctacatcggaaacccagtaggccatctgtcgttagctatattcaataccgttctcttcttttcccaaaaggcgaggggtcaatatgccgaaagacatcatggatcgattcctacggtggaaccttcggatgtcgcgttcgctctccatgtgagtttatctctttttcctctcttgcttgacctttctatgctaaaaggttgagataggcagagctgaagggagaaaaaagagtgagaagaaaataaaaaactgacgttgtgttttatcccgttcgtgaaaggcttcgactctggcggtcttcacattggcacaagcgctttactacccggcacctgcttctcaaaaactaagtatagtcaacaggattacacttcctatcataggagttgccatgcttgtactcgccatcgtcgtaggtgcgggatggacatcactagaattgttggattggctctatgggtttagttacatcaaagtatgacgcacttcttcctcttacctttcttaacgtccgttttggatcatgcgctgacatcctggttcgatccgttagctctatatcaccgtatcaaaatatgtcccacaggcgtacttgaactaccgtagacggtcgacaacaggatggagcatcggcaacgtcgttctcgacgtcatcggtgcatcgttgtcgatgatccagttggtgttggactcgtatagatatgatgacctagttggtggagtattcggaaatcctgccaaactgtgagtctcttctggatcttgaacttttccatttggagtttctcagtagcttgctttttttgtctatctaaaactgaaaactttcttcggtcaactcgctctcgcttcaacagaggtctatcattctttacattcgcattcgacggtctcttcctcctccaacactacgttctatatgtagatccttcagagaaggatttgatgaagcgagtcaacgagcgggatgtagagtctcaaactcgaccaacagaggtcgatgagaggacacctttggtttgaggatagataaatctttagacttttcttcttcttttcccttttcttcctcttgtattttacttctcgttgtcccctccttttgatctgtttccatacatgtacaacatacatatatatgtgcaacttttcctatcgccctccaagcaagtcaggattgaacagagataatcttgcgctacttcttttgcacagcttttgaacttgatcaccgttaaccatcacacacacgcacatctccctcggcatatacccaccctccctctttcagtccagaccgacagaagtctacacgtgaagcagaggcatggcaacgttcgagatagatgaagaagctttcctagctagatacagactccgaacaacatcgcctactcaatgggaagatgaagatcacggcacaggccccctggatggtccaacagaggcagaacaggattcggccgggctcagagtggtcgaactagaaggctgggccggtgagccggatccgtttgggctaagaggatctgggtgagttcgaaaggtctcttgtctgtctgatttctgtgggacgtttgcgttggtgaaccttcgtttggacgtttcccgtttcagtgggccgcacacgagaggaagcacactcttctgtgtccacaagtgtatgcgtctttctttctgacccttgaagaactcttttattttcaggaggaagaaacaagcaccgaacgaagagagatcaaaagcacttaggacactcgttcaagagaactttgacagattcgtctcggtcaaggctagtacagacggtgcgtcattgtggtctttctctcgatcttcaggaccaagtcatcaagggaacgatatgttgattcgtatggactttcggatcgtcatgaatgggatctccgctggttctctcagctgtctatcaagaaatgaaagatgctttgttgatggaaggaaacgaatatggtactaaagacatcaaaacaagtctacaaggtctgcccgtaacccatccatcttcctttctttgccttgttttgttctgtcctaattgctcgatgttatcccggcgcggacaccgacgttttagattcgtcttccatcgcggatgaaatatatctgccaatactcgaaaatacgctgagagctcaaaaactaaggtcgacgttgtcggtatttgagagatcaaagttcttcttcaacctgccaggctcgattctttcttctattgatgctgtaagtagacctggtctctccgtctgtagctcgttctatcatgtcgtctagccagtactcgcacgtatcctcagttgttctttcctttctcttcttaccagaaccgaccggaccaagcgctctcagcctacaaaaaggtgctctacatcctagagacccgacccggccagctcctaccaatctcaactaagaatgctactcaaagggatcaacagcatcggatagttgacaaggtgtggtctcaagtagaggcgatcatcgggcggttgagaaatgatctgttggcgctcttgaaggatggctcaagggggtgggaggatcaagaaaagactatcgagtacgttgaggctgattcttttttctcttcttttctatcctctggttccaaccaagttggttgtcgagagcaaaccttctgaccggcgctcattttctctttctgggtgggcaggattctactggagttggatgcaacggacgaaccgttatggacgtattttgattctcaacacaaccatgtccttggccaacttcaaaatgctcacgatgagtttgcagaacgcgtcaacagtatgtctgggttcacgtgtaccgttcttgttgaaagaaaatctcgtaatcttggcttgtttcttccgtttgtcgtcgaacggactttcttttattctaggtctgcgcacttctacggaccaggcgttccccaaaggagaggaggccttagagaaaagacgagcgctgaatttacagagatgtgtgttgtctctgagtttgat

SEQ ID NO: 3057 - DNA, 9327 bp, Xanthophyllomyces dendrorhous
tttattttttattttttattgactgttttcagaaaacggagatggccatgaagtatggaaggcaatgctcgatctagtcaagaacctgtcggatgtccttttacattctctaccaaatttctggaggatagccaaacatttcctagatggaaagtacgccgccaaggtgagtcgggtgtgcttctgaaagattctcttaaacaggaacgcctcagagactaacaaagagatttacacatagacaaagaatgctaccccttctcgaacacctgtatcccctatctctgccaatcgacctccgactcaatgccgaaagatggcagtagacatcatcaaactatacatctctcttcttgcttcattcttcagcttcacaccctcagtatccaacaatcatgagctcccaccgtttgtgcctacacaatcgacatcactcacctcggctgtatatgctaataggatcttgtcggagattacagaatgtgtaaatgacatcaatgccggggagatctcatcagaggcgagagatcagctcaagaatcttttggaacatgctcggggaaaatttatagaagtaatctgtgaaggatggagaaaaggtcagtcgatggcttattccttgtatagggacgaagggaaaggacaaaggtatctgaacgacccttgtgcttcttcatagattccgaaatgatatattctctcgaagattggattccaaatccagacgttccatctacgacaatgtacctctctcgaatcgctgatttccaaaactacaattcaaacgcggcgttcaaagcagcgactggattggaaaagacatcggaaactcgatctgtatgtttttggctcgctggccttttgatcgtccacgctgtttctttgttttcatatgtgtatatactgaagatgcgtgtgtctgctaatctaccgcttgacaggtaatcatccccccgttgttcgtagctagaatcaaaaattcatttttcgactcgctctatttcttgttggacggtatggtccgattatccttccaggattacatcccgcttcaagacccggctacacagaagatgatggtttcggtgggaatggcaggcatgtcgagcatgcccgatgttaccaagattgtaagcgaccttcctgtattactatcatcatgttagattgtcgttttttttcgttttttttttctcaaaaagaattctcgttaatcgacaagtcgctaatcattttcatcgaaccggggatggtaacaggaaacgagaacattgttgacgatcagcaatttcggccatctcaaagcaaaactcctacctcagttaataaagcagtttgagacttcatatggtatcgtcaccaaagaggaccaaaaagtacgtttcttctataggaatagatcatccgagtttagaccatcatgaacatggacgttgacgccaaatttggttggatgaacgtagacactagcagaagtagaagatcaactagacaaaatcttgttcgatgattatgttcgtcgaaaagtggtggtcctacgagaaatcatcagacgtggtatcctcttcagcgggattgattggtacagagcgtccaaaccgacaggttcgttgcgtatcatcgttattatctctgttggctgcctcgagatcatttctcctttcaactgacggtcctctccctttctcttcttggcaccgctttgttcttctccttgacacagaaattggctcgtacatgtatgaagcccttgtcttcatggtcgaagttcacgctcagatcagtgcggtatcgaagcctttgttacatcgaagcctgagcagtttactagaagaaatggcgaaagtcgcactcgaatctttccgacaagtaaaacgattcggaatgggaggaatgctcagtgtaagatgactcttgccgcgttctcttccctcagatcaaaccacacaaagaaatcaccttgggctgacagacatttgttttctctctccatcttctttctctcaaggctacactatctatcgaattcatgcatcagaccttagtcgcacacgtaacgcctgtagcttcagccatccttaccgaagtctacgctgtgatttccaaagcttatagccggccggtgtcagaatcaggtgacgaacttcaaaaggaattggatgccgtcaaaaagactctgtataattccagaaaggcgacgtcggtagagttcatgtgtttgcgaaaagaatcgactctatcggcttcttcttctgcttcttcggcggcgacagggggatccggcatgggcaaggtgacgcaggttggagaacacagtgggtcgtccaccggggggctgactcgaccagaaggacttcgtagagacagtaaagagtagggcgaggagggaataaaatgatgtaatatatcgtttatgactttgacgacttgtactcttgcctgtttttttttctttttttcttttttcttttttctttttaattgcttcgaacctttagagaaacaaagatgagtcaccgcgagaagagaagagaagaaaagatatcgatcgtcacgaattcaaacttttcatgtttcaattatgctatacaaacacaaaaccctcccccaaaactaaaggggaaagagtcctactcctccatatcgacagcgctctccgacgcttcctctgttgtcggcacaggctcagcttccttggtagcatctccttcctcttcatcatcgttatcatcgtcatcgtcgtcgtcgtctgaatcgtccgagtcgtcgaatagactttttccgccagctgctgcggcctgagcttgtttccaggcatgagccatttgaaggaccctgttttaagtttaaagataacgattccaggagaatgatcagataaatagggtcgatgataggtaggattatggttgcgagagcgataagaatattttctttgaaaaaatcagagggacatacttgaagctggctgggttggcttcccgctcgtcgtcggggaagatcatgtcccagtctgtttcaacgagaaacaaggcggaatatgtaaaaggaggctcagtcaaaaaggaacgaaacagtcagaaggagaaaaatgacagaagaagggaacatacactcctccaaggcaccgttggcctcctcgagcttcttccattttttgacgacccgaggcatcttctcttccactgctttcagttcctctggtgttccgtggaacttttcgaattctttccaggcttccaacaaaacgacccgctattgatgcacgcgaaagagcgaaagggagacaaacagaaaagaccggatgtttaatgtaagtcatttagcagacgatcaaaaggatgcacaggtgagacaacaaaaatgcgaacctcttccttgaatcctcggtttctcagatcagtgtaacctctatccaacacctttcgggcaagctccggatcacctccttcgtcttcgagcggttctccatcctcatccgtcatcgcttgaacctcgaacaacgcgtacgcgatccagacctatttaaaaccataagagtagagggatgtgttcaatcaggaattgcacctggtaaagtaaaaattactcaagaagattttcacttaccttgacgtgaccggtcttctcgagcaaggcttcgtagagcattcgagttcgctctcgttcaccctgctcaaactcgaaatcgatccaagcctagaacaacggacagacagagagactttcaatcacacaatttatagtaaaaagatggcaagaaaaggctcgatagaatgacagacagaccttccaaaggacctcgggcatgtcaagctcttgagttgttccgagatcgaacagatacctcgctcggtcaagatctccgagctcagcctcaaactgagcccatcggacccaggcaccggtgttcgaagggtcgaactcgagatacttcatatagatagttcggacatcgtcgaactcgtaaagctgtagaaattgagtaagagagattagtgtagttccatgagagagcagacaaccaggattggcactaggcaagacaaacggaaagaagatgactatggatgaaaaggcaaaccaacctttgtacggaattcgatgtagaccttgaacaacttctccttggggcacattccaatggctgttcccagcaacttcttcgctgcttgtacatccttctgtcggagctcgaagtaagcgaactgaatccagagctatcgcacagacattttgaatcgaaataacaagaaaggaaagaaataagatgaggtaagtggatcgacagaaagaagacaaggtgtgagagtcatgagtagaacaaaccttagcgaaggtgaaagttcggtgaggaataagttgaagagcggctttgtagacttgtcgggctcgttcgtaatcctatcagagagtgcgcgtagaaaaaaaaggtcagaatgcggagcggatttgatgaagcctcattcacggaaagagacgaaccttgctctcgacttcctcgaacgcagcatagaacaaccataaaaacacgtatcgcctccaatgtctcttctcatttccaggtggcacctgagcgaccgcgcgctcatacacatctcttacctttgccggacttaattcctcggccgaagtggtctgaccatcttccctagcggacctgtaagcatcctcttccagtctggcatacgaaatccaagcatcctgttgttcaaaggagcggagcgggatgagaagaaaagcagaggaacagagaattattgactttggtatatgatattcaacgtcaaacctcagcagaaggaggtaagaggatccactaacgtagttgttcgcgtcatgcgaaagctcttcctcatactgaattcgtctcttgcccagaacagtgctctccaccccagcccgtgtaccgtgctgtttctcaaacttcgtgaaagccgcgtagagagtttgggattttgatcgaggaagtctcgagagggcaaactgtcatgagaaaacgaaagaaggcgataaatgccttgtttacttggagagcgaagagaagaaaacgacaaggtagaaaaggttctcaagagaacacgtaccttgtagatgactctagctcggtcaaactccttcaatcgagtctccatcctggcgaatgcggcaaacacagattgagccttctcaacttcctcctcagagtctccaaagaactccaaagccgtctggaagacctctctggctttctctgtgaatgtttggacaaaccgagagaaacaaccagacgaacacacgcacagtaggcctgtcagtcgtccaaaggcttcgcatattcgaaacccgaagagaaagatgcgcagaggagaagagtacgaaccaatttttcctcgatcttcctcgaatcgactccatacaatccagttctttggctcgggcctgaccccaatccatctctcgtaaatgccggaagccctgtcgaactcgttgtatcgcaactcaagcttcacgtaactaccccatgctctgtcatctggctcccatttcatccatcgctcaaagatcgttcgcgctcctgcgatgttccccaaaagctcctctagatgaatgaacttgagccaaagagagtccactcggggaaggagagtgaccgctcggtcgtacaagtttcgggcatgggcgatgtttcgggctttcagttcctaattggatgacgttccgttgagcaaggtgattgcaacagtatgtggttttagctaaacatgaaccggaacgtgaagggaagaggaatcgacgctcacggtttcacagtagtgggaccataattggatgtccgagggatccacatccaaagctcgctcgaacaccgatcgagctctatcacaacaaatcattgttcgacgcgtgtcccacaccatacggagacggaaaccagatcgcatggcgattgagaggaagatgcaagcagttcgccatgagataatgctttatgaatggccctctctacctgatgaagcacttaccggtcatattctccctgactagcctcccaagtggcgtatcgtctccattcgtgaatctgttacatgtacatgccagaacaacagcaattgatcagatttgtgtcgaagcagttacaatcgaagaaagattgagaacgtacgctggatctggaataacgaattcgattctcatactcttgcctctttcgtcctcggtactcattcagttcctcgagatcctcaaccttttgcttgggtacgattgttccactctcctgtcgctcttgagcctaaggccaggttgtatggttgagtagagtttgtgagaagcagacgcgtcgggaaagtcgagtttttcgaaaggaacgttttgatcagacgaaaatgttttcaagaccagaagagaacaagacggaaccaagctagacgaacctctcgtaaaagctgctcagctgtgatctgttgggaagaacgtgaggatatgaaacatgtgatataatgaggatcaagagttatgccactgagaacgaaagcaagagaaaaaagtaggatcgacacaagagatggaaagcagtcggttgactgcaccgtctcttccggccaacgaacccagctaagacgaaagcgaaaccaagagacgaaagacacacctgaacagcggcgggcgctctgttcttgaccctgggagccctatcgccttgacgggtggacatgatgaaggagaagaacgaggatgggaaacggaatgggtgtatgcggtggtagttaggatgggaaaacggttccaaatcggaaactacaaaaagactacaagacgaatacaaaaatttcctaatggatttccatccatacacagtctccatctcgattgactttcaccttctatccatcctgaccatcaaccgagctcattttagattggcatcattcatctaggcaatgttcaagacagttgctgtgccctctgctgtgagtagaatggtgtggtcgatatgcctgtgcactcgttccatctgcgttcttactcgtttcttgttgcatatatacctcccctgaaatagaccgctatcaaacgaatcaacaaagaggttcgtccggtggtatctctcttgatcatggcttgctacggttgactgaccatattcttgtcaaggcagatctccgctctctccaaggaaaccgatctcggaggaatcgtcctccagcccagcgatcaggatatcactaggtggacgtgtgttctccctggacctatagttagttgcccgatctatccaacgtcattccagaaacggcctactaacttccttgtccttcgggacgatgccacgtacaaacaaggggtcagtgtacgaaggtggacagttccatgtgtccgttcagcttcctccggactatccattcagtgcgccgaaactacagttcttgacaaaggtatcaagctcttcttccctcttccaaatcgatttgactacgaagactgaacccaatgattttggcgcgctcctttgttttgctgcctatagatatagtaaggaccgaccatctccttttctttcttatttgtctatctgttcgaggcctgctcacctttccttctctttatctgtcctccctgtgtggttctgaatggaactttcagtcactgtaatatcgcagagtacgtcccatacgacataagcgttaccctgtccttctgctcgcgtggactgaagcccacatctttctgtacgctcaataactaggtccggcgcgatttgcctcgatatactgaaaaacaactggagtccggctttgtcactgttgaaagtgatactctcactgtcttcgctcttgacggatccgaatcctcgttcgtccacatgttttgagcttgtttgttgtgtatgatagaaaagactgatgatgcgctccgtctcttattgtacctcttctgtgcgtgcgggggatggacagttgatccgttggtaccctcgatagcccaagcctatcaagtcaaccgaacacaacacgacaccacggctagagaatgggtcaaactgtttgtctcgttatatacgtatatatctggtttcatatgcatcatcgtatccgttctaacctggcggagtcctgctcttttcctctatcttcaagatatgcacaaaagagacagagtacacccagcgcatcgtctgccagcccgctggagcttgcatcctcagtctccctcccgaaccgacttgctcgatcggctcggcttccaggtctatggccctaccgttcgtcctccaccgcgtcttcttcctccccgacagaccttacgaccagatcgggtccgacgacgatcgctccaacagaaaccgtgctcgccagaaggaaacgtccgtccttccctagcgcgggaaccggaacgggcgagggtgcgccatcaggttcagaacaaggagcggtcatcaacattgatgactctgacgacgaggtcgatcaatcactcgtcgctgaatccaacgtattaacaaatccatcgtcgacgacgacaacaactgcaacggcaacggcaacagcaacagcagcagcagcagcagcagcagcagcaacaacaacaacaacaacacgatcgcaaccacaaacgcagtcgcaatcaaaacaagaacaagagatagaggcagaagaaagtggaagtggaggaagaaaaaagataaggctatcggagatcgaatccaaagtcaaaggagacgatgaaccctgtccgatcccaagcgctggccctgatgcgagtccgacagaccgagccttgaacagacagatgaacgacgggtcagatatgaacactgacgacacggaagtcatcgtccttgattagagaaacgagagagacttgatattttttatttttatttaaagacgggacagggaggaggaggaggaggaggaagagagaacgtgttcaggaagaaagagacgcaatttttttcggcgaatgattagatagttcgataggtaggtaggtgggtatacatacaaatcgattgacgatcaacagcaaatcaggtagctggatgggacgagatggggcggtagcaaaagaagggaggaacacaagcgcactctactttcgctcagcgcggcccatgtgtgatcgtttgtcaagtaaagatgttgctcttcatcctcttcttcttcttctttttctcttgcggacgatggtaccgagaacaacaaagccatgacatgacaggagtaagagaaaagaaaaaagaggaggaaatccatgacgactaaattgaacagagaaccgaaacaaatcgaggatacgcacacacacacacacacacacacacacacacacacacacacacac

SEQ ID NO: 3058 - DNA, 11278 bp, Xanthophyllomyces dendrorhous
cacacacacacacacacgcagaaaggcagaggcgaagaaacaaggaggacacacacaatacaatgcaggggaagagggggtgggagaaagcacacgaagagacgagaaaagagggccagaagcaaagacaacctaataagaaagaagaaagaagaaaagattgataactagacctgcctattcaagaaccaacaagaaattagaggaaagaagacgaagaacgaagaatcgaggaaacaggataggataaactagatccttttgaaccagatcaaaccaaaagagaaaaagaacagtcgagcagaataaacagagagagagagaacaaagaagaagacacgagagataggaaaaaaagcctgtccgttatacacaaagacttcgcctaaaaaggattgtccttgcctcgatactcctacaaatacaaacacggacctgcatatggtcggatactagaaaatcccaaacatatgtggcgcctggttgaccaactgtccgccttgcgcggtctgaacacctccgaaaggctggaagttcatcaacattggtggtgtaaacggatccgggacggaccacgagaacgggctcggttcagccggggccgacatcgacatcgacattccaatcgccaccccgggttcaccaccggttccaaggttgctgtttccaagagatgtgtcgaaggcgtttgtcgccgagatggcgtatgggtcgattgatcgggcaccatccgacggattctgaaccgacgctttggcctggaacgcaccggataaagagaatcgatgatgaggaaaagaattcggaggatgtccgttggcacccgttgattcgccgatgtcatcaaaagaatcgccgttgaatgttctcggtcgatcgtcgtcgtcatcatcatcgtaaccctcttcctcggctgacgaatgatcgtcactttcttttccatagctactagcgctgacgatcgaatccttccttagctggagccctgccctcggttgatcttcaccattggaattgataccggacaagacagaattgttgcctgatgatttccgtttcttttggttcccggtggctggttctttttccaaagatgcgtttttggccgcttcctctttacgttttctacgccaaattcgtcgaagttcacggaattctaataaaaaggtggatttggaggtcaaaaaagtcagaaaggaagcctttctcgtcgtgtaaaagaaataccatcactcaccagctggcgttcgcttttctccgtggctctgactgatgatatgtgtattgaggctgtacgaagagaaacaaggaagaaagaaggatatggatgatcggcaagcgaagagcgtaaccgtcagccaggcaaagacagggaaccagagaaaaggtggtacgcactggttgagcgtcccgtacgatctcccacaatcctcaaactcgcaagcgtacaatctttccacctggtcgtgtttccttctaggcctttttggttttccggtgacaagcgagatcggcctgagctccaaaggaagtggctcgaacggcttgacgatcgtgttcatcgccttgtgtttcgtcttcttcaaaccaccagtggcagctgcagcgacggaggctgatccgggttgagcgttcgattgggaacgacctcttcggcctagtccgagggttgcctttagaggtaaaccagtggaagaaacggaaggtgatgtcatcggccttcgatggccgtcgaggacagagagtgggattgaatctagtctgtggccaaatggttctagcccgtttgaagaagggaaggtaggtcggtaggcgaaagtaccgtccggtcggacaccggtaggattggtaaatgggtagcaagggaaaggatgaggggaggaggaggcgttgttgttgtcattgtcgaacggggtgacactcgatgaatgcatagttgacggtcggctgatggtcgggacaaacccgtttgtcggatgctcaatagagccaacggcatacgtatgatgaccatagtggtactaatccaagcgagtgaatgtgttctaggtgagaacgaaagaccgaaagcagggcgcatgaatgagaagaaaaaacttacgttttcggatattccatcgctcgtctgcggcctggaggtactggcctcgggatgaccgacggtagacattctgtttcccgcgtgtcctccttcgatcggccatttgtcgaaaggaccgaccgagtccttacttcttggtcggacccctccatacgggttgtatctgacagccggctgatgttgatgctggtgctggtgctgatgttgaagctggtgctgatattggtgtcgaggataagctacttgttgctgctgctgttgttgttgttgttgttgttgttgttgttgtgaatggggttgctgctgagactggagaaaggacggctgggcccgggggatatgctgtctagagtctgagccggtaagatctatcgttggagagtgacctggcggcccgttaggataggccgacgaaaactgagtgttgacattgggttgaaagctgccgttagcttcttggctagcacccatgctttgacttgaatccaagttgaacaagattgactgctgttgctgttgttgtcctggccagatattcgatgtcgccgttgttgttgtcgtcgtcgtcggctgctgctgctcctgttgctgatagaaaaactggggaggaggaccatgaaggtagcctaagcttttggacaaaaatctaggcgactgtccatcggtcagaacgggagagaatccataggatacctggttcgattctgatagactgtgcctataagcattcgggttgagcgccaactgagagacgttggcactactactattactaccaccaccaccaccggcttggtcgactccgaaatcgggatggttatcctgaccaggatttgtaggtatgtacctgatgggacctccgggcgagctatctggatgaccgctcatgacaccctgtctaggtgacggtgccaaagtctgactgctaccacttggttgactcataagcattagtgcggaagcagcaggggccgttcctggtcggggacccatgacggatgctgaagaatctgaagagagagctgacggtggtgaaaaggtggcaggagcggaaggacggccgacaggttggttagcagggtagtacgctggaagaaccgattgctgaggtggtggcagagggaacgagaaggcggactgttgatgaagttcccaggggacggcggcggaggcggcatcgtctccatcaccatcaatgttgttcatactgttgtctgcacctgtatcgatgctattggtggacgacggcagttttgggttaatcgcgatctcggtatcaaacgatgaatggaccggccggacgaatccggtggctgagtttgaatgatgaatctgtccgccggtggagggacgaccggtggtggtggtggtggcggtggcggcaggaaggctgttgcgaccgttttccgtgtggttggtagagctaaaagatgagcactgatcgtctgacggaggcatcaggccggccgacagttgttcgagggacgacggggaggggatgacgaaattcagcgaatttgccgaggtcggtagagaatcatacgcgtacggtgtgagcaacggggatggcacgttcgacgacgagaaggacggatgggagagcagcagcgggtttagctgaccatcaacagcgagttgggactctatcgaatgttgatggtgtgattgggaatgttgacgctggtgttgtgattggtagtggagctgctgttgcgacgggtatggttgttgccgttgctgctgctgctcttcctcttcctcctcctcctcctcctccggcggtttgaacaagaaaggcgagcgatcttgaaaggacatccttctcttcggtttttttttgcgttttttgtttctttgttttcggttttccgaaatgaattcaggagagggatgggaaatcccttgtgacgtaatgggtacgggcgggtaaggaacgggaatgtgggccggaaaagggagaaagtgtcggatcgctggatggaagaaactgaatgtgtgccagcggagggcgagggagagcgaaacaagactaagagagaacaggaagaggcttcaaatggatgatgagatcggaaagggaagctagagaagggagccagagaaaggagagatacccgagagagagagagagagattgtcagcacaaaactatcacacgtttagcatgacggacgaactgtggatgcctgttgggctcaatttcttgagcctaaagtgactggaatatgacgaaccgagacgatggagacaggcagacagacacagagcaggaacgagagagatgacgaaggggaataagaacaggaaggaggagaaaagaagattaaagtatatacaaggtggctgtctgatgggcagatgtagatggacggtggaggaggaagaaagtaagtgaaacggagggagaggaaaaggtaaggtgtgtgtgtgtgtacgctgtgagtgattctgccgggtgtatctcggatgtgaggtgggaaatggatctggctatctatcgaactctttctttgcttcctttgccaatttctcctcagcatgtgttacctcaccagcagaggatgaatttgcatcgtgaatgagtctgaatccgcgtgtgtgcgtgcgtgtgcgggtgcggatgtgttttgctcactttatcaatcgcttaaaaagaagaaggaaaaaagggagaggactaaagcaaaccaatcaaaatgtaaagagagcgtttgatcgtcgagcacccataaatcttttctccgtcgtcggacgaatctttccgagagcgcgaccgagtcagcgaggcggtagcgaaggagacatcagaggaacagacagtggcaagaaaggcaatgtcaaagatctacgtctctctttgcgtttttttgccgttgggtgacagagaagaagggagaaaaaaaaggataacgagcttgaaaggaggaagaaaaaaaaacgccatcaaagtgttatccgatagaccccgtacgatgtgagagtggatgtgagcgcgcactctttttcttccacttcgctgataactatgcagaaacccatgaccccgcccacccttgccctcatctcttgccctcacccccatcctctatctcgtcatctcgtcctctaccatcctcaccctgaatcttgtgagattccagatggttaacggaaacgaatgcacagttcagctttcgcgctaaaaatgacatgacccgcacaggccatacttgtctgccgccctggctgatcacacatgccttccctctctcttgctctcgcgggtccctggatcgatcggctgatgacgtcatctattaccgcgggaccaaacataagggcgatctacccccttttttattttattttatttattttcgtctgtctcctcctgtctcgtcatcttggtcagtcatttaacatacggtccttgtatccgttctgtagttgtctgcttcgactagctcggcagcttcaactggctgactgctcacgtagcctcttctgtatttttcttcctctgcggattctcatgtctctcctgatattcaccgttcggtgctgcaaaaaatgtgtgacgtctgagccatcagctggttggtctcgttatccgatcagaaaatcaaaagaaacgaagaaagcgttccgaaggagattacagagacaaaaaaaagcaagggggagttctcctttttgtttttgctccttcctccctgtgattcagacaggcagatccctgccggcccccaggattcatggccctgcattctgagttgaaaagaatatagagatgatcaaatataaagaagggaaagggaaagagaaaaaaaaaaggagaaaaaaacaagattcggacatagtttggccgacatttctagagtgatcggctggaaacgttccaagagagggcaagacagtaagaagaaggagcgccggtgaatcttagtagctttaattgtttcatgcttatctcggtgcagtctcatcagcattctttcctcctttcctataggtttctttcttatttcatctttgattctttattctctttttttcccacttttcggcgcccaacgctcaattcctacataccctgccttcatttgttgttgaacctcccctcgaacaaattcgatcgagggacgctcgtcggcgttggtttctccgattggatctcgctcggacagtgatttatttttgattgttcagccctcgaacccatcagcccttgcccttcttgttatcacccttgttgccctcgcctttgctttctccccctcgctcccgctgattccgtgtgggtcttgtttagtcccgacgaggccgaaacctccacaattcacggcattaggtccactcaattggcggtcgtcatcgctttgccggtgtgtctgaacagacgttagatcctttcccggaggccgaagacgagctcgtccggccaagagcacggagaacacggagaaaatttccggcgattcttttctatcaccttctgctgcttctgctacttattcttctttggcttgcttctgccctgctctgctttgctctctgccatccctttttcgtcttactgtgttcttggcttccctcctcttttgccttcgtcttgttatcgttctcttactgccttttattttccttctgacctctacagcttcacatcaactctcacattcactctcactctcacattcactctcactctcacgtttacacactcactcattctcactcggacttgttattacccaaacatgagatcaatgaatccagtccgttctccgtcgtcacaatgagacttactaacactctcccccatcgccactctccctgtcttccttgtacttaccaagctcaatcccagaggaacagtgttaggtccggcgtctctagcggtgtcacggggatgtccgctagggtgaacccatgcaggtagggttatcgttacgtaatcaccccccaagatcatgccgtcctcgtttccctctccttcccatctcgatcttgtccggatctggaacagtggacgtcgggtttctttctcttctgaacatccacccatatctgtaacagcacaaacacacacacgctcacataccaaacatgaaagcttcaggcttgctagccttcacattccctttagtggctctcgccgctccgttccttgatccatcccagctagcattcaatattccttccgtggtccagcaagtattggcttacgggaaggaccagatcgggaatcatctggaagggcctatttacaaagctcaggacttttccctggtttgtctctcctctcgttctcacctcttatgccttgtgtacatatgcgtgtctatcttggttccttcttgtactaattctgttggaacggacggacgggcggaaaggattcttggggtctcgtcaaaggatgggtcgaacaagagggaaagatgtgtatgcattttcttcttgcttctctggtttgtctctgcttgacagccagaagctgaccagtctgtttctcttctcttccttcactctccttctgacaattcttggatcgcttcctgatcgctgtacttgctacactgactgatttcacccgtcccgctcgtcttcctactgaccacaaaagtcgagacattaacccacccttcgctcccagagtacaagctcagggtgaccgagccaaagctttgtgattcgtctgtcaagcaatactccggttacctcgacatcggaaccgacaaacacctctggttctgttcgtcatcctcttcctctccgtttgccgcacacaacccgagaccgccccggaggctgaccgcctttctccctcacagggttctttgagtctcgaaataaaccaaagaaggatcccttggttttgtggctcaatggtcagtccatccgaccatctctttgctccttcgctcactgctgaccttgctgcgaagcatcattttcttctatttcttccttgatgaccaaatctacttcataaaacaagggttcgttcaaaactcattctcttgccttttcctttccttttgtgctgacatctaatctcttatctactgaatcacttagtggacccggatgctcgagctccactggtctgttgttcgaactgggaccatgtagcattcaaaagaatggaacgatcactaacccatactcttggaccgagtaagcgcccttttcttgaatacgttctctgaatgttcacaagactgagatgttttcgttctcgctactctttctccttccttatcttttcacctctcgacctcctcaggtctgccaacgtcctcttcctcgatcagcccatcaacgtcgggttctcctactcggatagagacaaagtcagcacatcacctgctgctgccgaggatgtgtttgctttcgtgagtcttttcttctgcctttcacagatcctccgtctacctcattctttagaaactgactgggtttctcgatcagttgactatgttcatcgctcgataccaagattacaaggatcttgactttcacatttctggagaatcctacgccggaacttatctgtacgtattcttccctccctcttcttcttctccatacgcctaaccagactctactctttgtagccccaacattgcttccgtcatccatcgaaatgccaaagcactccgttcccttggtgccgaagctcctctgcctgcgctcaagttcacatccatccttatcggaaacggactgaccgatccgctcgtccaaatgggaacgggtgtgtacgattacgcatgcgagtcaaaatatgcagtgttcgacaaggattcccagcagtgcagatcaatagccgcaaaggccccaacttgtgccaagtaagtccagctcatctctctgtgttcagtcccccccttttcttctcggacttgttttctgactcgttttgaaactggtcgacaggctcattcaatcttgctacaacaccaactctcggttcacctgtggtgagttttgcaaatgacggtcttcctatccatccaaccccactcttctttctcctctcacaagctcactcttgcactctttacccccttccttgtcaactcaagttcctgctggcttgtattgctggtcttcactgtatgcagacttccagaaacttggattgaacccttacgacgtcagaaagacttgtgacaagagccctgagaaggacggcccgctttgtatgtctcacactcccgccttaccctattttacaccttccctgttacagacccgaggactgatgcttctgtcatccaaactaggctaccctcaaatgggttgggtcgagacttacttgaacgaagcagagatcaaaagacaactcggcgtgccaaaagatctcgagttcaagagttgcaacatgcaggtcaaccaggctttcatgagtcagggtgacgggatgcacaactcggctgctttgctcccagagttattggaagacgggatcagactgttgatctacgccggagagactggttcgttctttgtattttctctcttccgaaccgcctttacgagtccatcgagctgagccggttgcgtacattcattggtattctgctagatttcatgtgcaagtatgtaacgttgtgtcttttttgtatgatgtagaaaatggctttccgtatgctaacctttctgagcgtgattagctatatcggaaaccttcaatggctcgaggctcttgattctcccttcaaggtttgttctttcctcctcgtctgtacttttcgtatcgcatcaagccaatggtctgacgaaatgacgcacacacacaacaccaacgatcggcccaccaggtcgagttcaaccaagccaaactctcaccctatgttgtcatcggcggtaagaagaaaatgggctccgtcaaagtagcaggcgcacagggtttcacagctggaaacttggcgttcgtctctatcgagcaagcaggtcacatgtaagcagcccgtgtttctccttttgccttttctcgttctttcaaacaaccatcttgaatagaatcctgttctgctcgagttctctcgtttgattgattctgatgtgcatgttcctttttctcttcttcttctccttctcctccaaagggtgccgttcgaccaaccggaagtcgctctcgacttgttctccaggttcgatctaattctctttctcgtctacttttcttctttctcatcttcttaccttctgcctcctacctttcgacgtacgtacggatgataccgggatttccatggggaccaccagatggttgcacaacgtccctctcgtgctttccaagccggagtgagtctgaaagcttatcgaaagaggcgagactgaagaatttccatcctaggtatatcaagtttctctctttgtgtctatctgtctgtctctttcactctgttttcgtctatccacgctccttgcttgtcgttctattttcgtctccacatatgaatgcgtttggctttgtgagaacggatgggtgtctcttgccgacctacagggaaacaaccagatgaaggatacgaaggaacgagggaatagaaacgcatggcataagcggggggggaaggaatagatctcccccctttggaaactcgagattcgagaatagaggcataggatgtgatcataagtagacgagaaagagagaaatggagattagagagaaagtcatataaagaagcggagagagagagagaggaaagaaaagaaaagaaggcgggaagaatggagcaggatgaactagacacgataggtcggacgaaagattgaaagattgaaatattaagaacagaaaaggcgagataggacatcaacttgagggtcgttatatcaattatattgagtaaagaagaagtaagagaagagcaagagaaggagagaaaaggcaatcagaagagaatgtgatgtgcgagataacatgagagagacatgtcgatgatttaaaagaaagaaaaacgagacgaggaagagatgagaaaacggaaatgggcgaagtagaaagaaagaagaaaagacaggaaggtgtaagaaagaagagaatcgaacagcgctcattgctaaaccgagtttggtttgattgttcgtatccactaccacttctcaatttccccccacccatcggatttccaaatcccttccatccccatcagaaaccgaacgacaaaggaacac

SEQ ID NO: 3059 - DNA, 6616 bp, Xanthophyllomyces dendrorhous
ccgaacgacaaaggaacacaaccggaaaacaacccccaccccgtctctctcttccagtttgtagggttaaaaaataaaaataaaaaccttagaatgaccgatgacgtttcaggcttcaactagcctgtcggcctcttgccgcgcccgcgcttgcgcctagtcctccaagactcaagccaacgggccaggattcgttcgctctccattcgtaaccgtctccagcgctggtcccgcttctggatacgactgctgccgctgcggcggagacactggcaggagaatcctcgaggagcgatggcgagattcctgtcgtcccgcctagagtcaacttgatgtgtttgtatgttcctacaaagaatctccaaaagctgttcgacaagaggatgtacagagaatctttcaggttagtaccctagatcgaaaaagagcgatcggcagacagacagtacgaaacaaaagatacaaaccaggtgacacccccactttcgtcccaaagacacaatttcccagccgcctggacttcatatacgaccagatcgacgatccaacaacatagtacgaaactagtcagcaagatgaatatcgtactgatcgctacagagatccccagtaagaactgtttcctccaccgcgccaggaagaaaggaagggaggaagaaagaagggtcaagccggccatcgagcatgtatataatttggtaagcgcgggatacaaagtgaggcaaggaaagagacatcatccgggagagcttaccttgatgaacggaggctcgtcagaaggcctgtaccaattattccaacgaggcatcgtcagaggagagagagtatctcgtccaagggtggtgtgttcgactgttagaacgaaggcaagggaaagaacagagaaagtaagagccggaacgtgagaagaacggaagatgcccgagagaagaaacgatcggcccggtccggttggggataagaatatcaccgtcgactctgggaacattcaagtgtgaaggggcaggagatctgttcctcatcagaaggccagatcttcactcacaacgattgaacagatagggaatatgcgtgtgatccacagttccaagcgctcttgatcaaattatgttgaagatatgcttgggcttggctctggcaaatcaagagtggcttcacaacctgcggaaacgtcggatgaatcaagaaccggagtatcacagtccgacgaagatcagagatcggtttgaacccgaagacaaggatagaaagtggattcgtacccaacgtcagagataggcaagcagaaaattgtttttgatagacgggaagagacctactcgacgatataggatgctcttctgagtgtgcaacttagatattactccgagcgggaaggtcttgaacgataaagtctaggaactttagccaagccgaaccctggatggtagccacagagattcgagtggactcaagactgctttagatcgacaagagcacgagccagagtgttcccagcgaatgatgtatgtgggaagaaggcaacagtcgctcggtgttggcggtgctgatgggtacatacatgtatgctgacgcggtcggcagctgtctttcgatcatgcttaggtaagccatcggctatgagcgaaactggatcgatcttctttctagccaaacatcatattgatcaagtaagtataagagagaaaacatggggagagagcgcggcaggaaaggagcaaagggatctcgaaatgtaagagagacttcaaatatatgaatctggtttataattgagccagcgcggaaggagcgagggtagacgataaaaagagtgatttattagagaagaggatgaaggatagatgagctctccgtggatcatcaaaaaaaaaaaaagatacgctctccccctgatctagtcaacacagaaaattaaacgatatctccatcccctctgaagctagcgaccgaaccctccctggtcaacgacaatggagggcagcactgagcgggtgcacaatcgccctcaggaggacatcggagaaggcaatcatccccgatggcctggtcgcttgacggaggcagggccaagttgtttgtcgtcggggtcaaagtggggaactcgggctggaaggaagaggaaccgatagattagcttcagatgcaatgatcacactcaaccaaagagggaacgaacctgaatggtggacgagtgaattccgtagttgtggagaactcgtcgaatgctatccacagtggccatatactcgttctccctgtcgaccaagacatggacagaggcgacgatcttggcctcactcaactgccagcagtgaagctaaggaaaaggggatagacagacggcgtggtcagcaagacaccaacgatatatgagcacgaaggtcaagaacaaacctcgtggacagagataacaccggaaacagcaagaatactatctcggagatcatccaaagaaaccgtgctaggggtagcctgcaagagaatgaaagacgcggatttcactgatttttggagaaaaaaaaaagggaacaggaccggtcgtcaaaccgacattctaccgccagaaccttctcgaaagacactgagtggaatgcttgctaacctagtgggatggcagagctggcaatgatacaggtgataaggaaagaaatggctggatccgactaggcaacaaagagaggcacgttttcagctgtcaagcgcctgatgaatggcagccggagaggcctgatatgataagagagaaggacatacgtagaatctccactgtcccttgcacaacatgatgatcaatccactggcaattacaccgacgttccccaatgcatcacccaacacgtgcaggaatacaccctccatgttcatgcttccaccatgtccatgaccatgagatttggaactcttgtcctgctcatcagcattcccagaagtcgagtccgagtgagagtgcgcgtggtcggtgtggtcgttctgagccaacagaggctctcgctcgtcaggaccgtgggagtgatcgtggtgcttaatgggggcggtggctccgtagcccatgtgttcggcggcggcaacaacggcagctcgactctgagccggatgtctatttcaggatgcaggtggccaaggattgacgactcagtctttgagaaatctgttttctttttctactttttaaacaaccataatgaaaagacaaaatattcgacgaaccggtaaagagactcgattgaatcagggccctcaatctcgggaagctgagggagaggaggcggcgaaggcttagaatgggagtgggagtgtccaccaccatggccgtgctcatggaagaggaaaagtccagcaatgttggaagccagcccaagggatccgacgattataacgatcatcgggtttgtcacctctgtattggaatcaccaaagaactcgacgataggtcagtatctttgtcgatacacttgaatgtttgtgatacgaatgttccgtctgtcgtgggcatgacttgatacaataatcaaaaccaacagaagaaatgacttaccagtaacctgaatcaatcgctggatgcactcaataaagattgacaaacaaagggcgagaaggagaatcccattggcgagcgcaccaaggatctctgctcgctgccaaccgtaagagtacttggccgaggaagaggttgtggcgagcttgatggcgtagagagcgacgaccagcgagatgatatcactggacaagaaaaggaaggaaacgagaaagaaaggaggagagagagacagagaaagacagattagctaatcttgcaccaggaagaggtcacataaatggtcgtacgtacttgagcatatggaaagagtcggcgataagtgcgatagatccaacggcataacctaagagtatgcgccagtaggcggacgaacagaaagacacacaaacgctactagtcagcccagaataacaatagcatactcaggcaggccagtacatgtctgttctcagctttgagggtactctaaagcagttgaacgtgagcatatgtgtcggcagaggaatccattggccagcacttggaggagacttcacaacaaaacacgcatcttccttgccatactctcaacccgtccagggaaagaccaacccaaaaagacgaaagaagcaaggcagggaagacagaaaaaatgatgatagaaaatgcctcagatgaggagcaggccggggaggagtggacggagaacgaagcaggcatgatatgaccatcgtcgactcggacgtacctccaatgatctcgatgaagaagaacgtggtgtcgatcaccagcagggtgatgattctggcctctctagaaaagcccatgacggatgcgaggatgtatatacggctgggtggtgtatgctggatgatgagtgtcgagttcttgatgggattcgatgatcgttggaaattaggaagaggatggagtggtggctgactaagcggatagtaacgtgcatatatcgttacagcttggttacggctatatgcatctgtgatgtttgtcccacccagcatgtctcttgctcgggcttcgatggaggcgaggagggacacactgaggaagatgaggagacaacacacgagacgggttgcgttctgtaggtgtagagagggagaaggagagacagagagagacagagacagagacagaggtttaggtggagtgtcaatcgttcgtttgcggatgcccatcttcctgttctactcaagaagccatgatatgaccaacgaagacctgatcattctctcagaacaccaaacgagacaaacagagaggccaccagagtgctgagagaacatcttttaataggattgaacaattatctttcatcacttcttgaccgaccgaacccatccttgtcgctagagatcaccaacacagtcatgagaacgaagaaaaaaagtcgatagtgggcgtcagtctttcgccgtgtctgctttcctctctacatagtctgcttcgatacgccctgttctcgagcagaccgcgccgagaaaaaagaaaagggagagaagaacagaacgaacctgcttgtgcttcgggtccttggaacatcgaacgacgtttcggcctttcctatcaacatcgtcatttcgattccatagaagggatggcagaatgtcgatttcatttaggcgtcagtttcgggtgtccttttccgatcattcctccagccaacaaaatatagttcacagatgaacgctttcacaagacagagaaagaaagagcgaacctcttgacgatttggcacccgtcacacaacctcttgatactcgacctcactttgatccctcttgtctgtccaaccaaagatccaaacatcggagaaccattagacaacacggttgctgacgatggtaccgatgaagatgccagagatgatcccgatgcggacggaagggcaagcgggatcgttcggcgagagaggaagagagagaacgagcgtggtttgaggaaggtcgaaggagcccggagggacgtgaggcgagggaacaacttggaaagcatggtatgagtgtatttgtcttgtcctctcttgtttatttccgttgtttctctatctatccaagagcgtgttcggatagatccaccagagagagacgttggggtttgcctttagtttggatgatggaaggagaggaccaaaagagaagtgaagaaaaaatgggaaaaggactacagaaaaacggccaaagtgattacaaggtttgaacaaattcatagtattcattaatttgcttgtaccctcaaaacctcccaacctttcgctcagaaaccaccacgaccgcattcattcgttccctcactcatcatggctactccgacaacagtcacatctagtcagcttcctgaagctgctaacacaccgtcccacacactatcagcatcgactttcaaacgacttcatccccaagcatatctcgaacgattcttcgcagagggttatcgaccggacggaaggaagctttcagactcggacgatgcctggagagatgtcaaagtcaatctaggttcgttctctttgaccttttaaccttagtgttctgtatctttcatctctttgcttgcttctgctgacgtgtgtcgaatcccggaacatctctcctgggaaactcgtacgatctacaatgttcaaacaggatcggtgtccacagctatgggtagttccctcattcgtttaggagaaaccacgattgtctgcggtgtaaaggcagagacgttcgaaccagatttgtataccccaacagacggttgtctaggtaggtattttcttgaacctttggcatctcttgcctgttgtcacaaaggccggcgagaactcacttgagtatgacttcccgcgtacaccacacggtccatacacgcagtcccgaaccttgatctgccagccttgtcatctcctaaattcaagcctgggcctccaggctcagaagctcaacttctaacagacaggctagatcgagttctctcacagttggtctttccgaaacctctttgactcttctagaggaagatgaaagaacagacaaagactgacgaatgcttgtgtcgaatatttcgcttctcagctcctcgatccttcctctc

SEQ ID NO: 3060 - DNA, 2171 bp, Xanthophyllomyces dendrorhous
tcctctctcctcgctctgcatagaaaaaggaaaatcagcttgggtactctatatcgatgcagtctgcatcaattatgatggaaacgtgtgggacgcttgtctattggctgttgtggccgctctaagaaatagtaagcgcacgatccattcgaatctatcatcagaagagagaaaataggaattcttctacttgtccctagaggcgatcgagacctgttcaagaagactaatatgaaacgtatcttccctccgatctcttcctgttcttccacccctaaaaataaaaaaagctcgattgccggtggccagatgggacgacgcaacaggaaggacaatatgctctcgaacagagacagtaccccttcagctcggaaacttcaatcctataagtagcacctttggcgtgttttcctcgtaagaccatctcgttcttctctctttatctttgtcacatcttgatagcgtgaatgccaatacatattctctgcatatatccgtatgggaatcctttgtcttctattatttctagaaaaacaatcttcccagacccgacgtcattcgaagagcctcttctcggatcaaccatcacttgcgtcctcctccagcccctttcttccagcaacaccgacgagaaaaagacgaaagcaaaggttctcttcttggaacaatccggtctaggaggtctatcggtaggcaaccaggctgtaggctcagaagccgtcttggctggggtgattgggaagtcaagaaagagagccaatgtgttgagaacattgatcgaatgagttccaatttctaggtatcctcagggacagctaacgtcgaaacccctgttagaagaacgagggccagagttgaccgtgtcggctgataaggaggcgaacaagatccaaggcataacataagcaaatgcaagcagagagacgatagacaagcgcaatccaaataaaaacacaaaagaaagatagccaagcgatatatgtgtgtagataagattgttcaagcaggagaagaagatgaacgcatgcgaagaaaggaatgtaagctgggaggtggaagaacaaaacccaggtcgaattctgaaaacggaaagaatgagaacgcagcgaacgataaggcgatggcgaaaaagaagagaggcgagtgtgtgtatcaggagtagaagaaatacaaagtagaaaaaatttgtgaaaggagtggctttgggaacaacggagatccaccaaaagtttgaactagaacgtatcaaaacatcaaaaaaaaaacacaaaaaaaaagaagaatagatcaagaaaaactcatcaagaggatgaggagaagaaaaaagatatggatattcttttgtaaatatctcaaaaatgcaaagatgagcaataccggagataacgatgaaggtgtgaggtcaagaggagaaagaagaagaaccaaaggatagagtgcacatggatgaaggtaatagatacatgaatgccgcacagaaagaaaagggaataggacgccaaagaaagactcaatgagaagattctacagcgagccaggaattgttccagtgcggttcgacccgtcatctctctcttgttccaacaaaccatgttccgcttacagcaacaaagacgacaaggcctcagacatcacatctccttcttctcccctagaagctatgagagtatcgtctccttcatcaagaacgtgaacctcagagaccttagacggcgttaataccaatttcgccctcgcccgaatattctcaatcgagtctcgtttgagctgtagtgagattcgccggacggtctccgtcggcacttccgccagcgaaattcgtttggaatgcgctgctcgtgtcgatgaccattcctcaggagattcctcggcgtctgacaaagcccgaggacgagatttaggagacgaggcaggaagagcaggtaatggatgatccaaggatgctcgtccaggaggacctttagaatcagggatcaatatgggtaacgcgttcggcgaggacgatgagtggtctttcgtatcagcaaggaatgttggtggtggtggcggtagcggcgagtcgagaggcttggacaggaacggagcacccaaaggcataatgggtcgaccatctttaggtggaggcacaggaaggtcggatgtactgtcaaagtgaccgagcggaataggat
